United States Patent Application Publication US 2009/0018031 A1 - sequence listing, part 22

SEQ ID NO: 11564 - DNA, 6000 bp, Homo sapiens
agtaactgggattacaggtgcatgccaccatgcctggctaattttttgtatttttagtagagacggggttttaccatgttggccaggctggtctcaaactcttgacctcgtgattggcctgccttggccttccaagtcctgggattacaggcgtgagccaccgtgcctggcctctttttcccatatctggtaatgtttaattgaatgccagatatttcttatacaaaactatagaaactctgcatggtgttttcttctttttgggaggatgtacttttgcttctggtagacagttacggtagggacgtatcagtctaatccattaggcttgagatcattcaaggccaggcttcagtctttatgacgaccggtccatttccactttgtccttccttcatactaggatatagcttttcattggtcctaattgaaagcctagttcattagttattgactatgacctcattttcttaatgaattttagtttttacctctcaagaaacatgagcctgacagaagctttgcttggcttctcagcctcatagttgcatctttctgttgttcttcttggcctcttagccactggtgtcttgaagggaaagtggcactgtctgccaggttcacttctttgcccttttcttttctgtatgatcatagcctctcaagttttgactgcattggtagccccaaatgccaatgtctgtcctcttggctctgttgagtttgctgaaaggtttgctttagaatcattgccttttacccattgatttctcaccctcttgggtccatgccatttatatattgggaaatgtcttgcagaagaaggtgtagtacaaattggaggtcttagctcagtttacttcacagaatattggcccctcaattttcattgtcttgatagctctctgatacgttcatacagattttttaaaaattaagtttgatttatcttttcttcttgttcttagcatgaggattggtgttataggtaaaagtagaagtttgcttccagcctttagaaaactagaagtgcttatctttgggaaaatagaagggggctgggcgcagtggctcacgcctgtaatcccagccctttgggaggccgaggtgggtggatcacgaggtcaggagatcgggaccatcctggctaacatggtgaaaccctgtctctactaaaaatacaaaaaattagccgggcttggtggcatgtgcctgtagtcccagctacttgggaggctgaggcaggagaatcacttgaacccggcaggcagacgttgcagtgagccgagattgtgccactgcactccagcctgggagacagagcgagactccatctcaaaaaaaaaaaaaaaagaatagaagggatttttattcatataactttattcattcagatatatatatatatatcaatatgtagatctatatgaaatacaaatatagccctcagtattcgtgggggactggtttcagaacccccatgggtaccaaaatccacatatggtagaaaattattgcagaacctgtggctatagaaggcctactgtatgtctgtattttcagagtcagctgtatatcaacaatatatttccttaatgattgagatgtcttcacagagctgaaatttacgcatcacaggattgaggtgtttaatgtagcaaactggttttaaaactctgatttttgtctgggtatcgtagttcgtgcctgtaatctcaccatgttaggaagctgagcggggaggatcgtttgagcccaggagttcaagaccagcctgggcaacatagcaagaacctgtctccacaaaaaataaataaaaaaattagccaggcatggtggcatgtatctgtagtcccagctacttgggtggttgagatgggaggatcacttgagcctaggaggttgcagtgagctgcggctataccattgtgctctagcctgggtgacagagcaaggccctatctgtagtttttttagtttatggaggaaaattaaaagtaatttatgttttttaaaaagaaattatgtataaaacagattatagcattatggaaggaaaatgttaatttggagaaaactttgttttattttgtttttccttttaatagagaggcgaaaaaaggcttcagcatgggaaagaaatttggtgtatcccgctgttatggttctccttcttattgagacagtaagaatttatttgcctagttaaataaaagcaaattatattttatttacttcagcatttgagtatggcagctccctcagctaaatggtttttcataaactagttttctatcaacaggattaaaatccatctatgcctttatttatgaaaatccaataaagcaaaaatggaaattaatggcaatttaaaaaaaattctgaagattatctgtttcttcatgaaagcaggaaattcagtctttgttttcattgaaaattaagaaaacaaggtgttgcagataacctgctttaaattctgtgataaaatatgaaaattacattatgaagttagttctgataatattttaccacttttttaagtctgtggagttgtgtgtttccaattggtgagatcacttagtaaaaggatctatatactaccagcttttgtcacaagctttgaaatgacaataacttgcagaatcttttagaatttcttcagttcttgtttgtagtctgattactttagttttatatatagcgttttggtcttgactgctttccctctattctgaaacgtgtatttggttacctagattttaatattttgtattggtgaaaaatcttgagagctgacagtttgctgtttgtcttgtagtccatctcggtcctcttggtggcttgtaatattctttgcctattggttgatgaaacagcaatgccaaaaggaacaagggtaaagtaaaatcctttaaaatgtctttcttttgcaaaagtattctatgtctataccctgagtatttcaagtaagcaaatgaaaacattcacctttgtgcatgtatatacttcaagttgtatgaatttctttatgcaaagagcctttaaaatataaactgtgatttttgtttctaattttttactttggattgacagggccttttttcaagtgttggaatttccttttagatttcttatcagagtttatcttgattttactgaaattcatttagctatatgaaattcctttagccatagtcttgattcagatccccccacctgagtctttccaggaccttgtgccatctgttattgccattgttgtattcacttacagcctcttctccatgagtacaagcccaccatcatgctccaggtgcctcatcctacagacagacaagaaactaccctttgccatgtacagtcttatctttttctttagttttatacccaaacccactgatagaacaggaagtcgcttactatactgacttcctagtcacttttaacccattttactataccaacaaaacaagtcccaagccctatagtatatttttgtacccatcccccttagtgcttagtggagaatgacttgtacgtcataggagatccctgtataattgtgtaaaaaaattagatactcttaatccttcctacatggcttctcttgagatagcataattccaaagtattatctctgttgatcaataagcttctgtaggggagaagaagtaatacctttttctaacctattggaaggttcatggctgagatgcctataacaaaagattaataagagaaaagctgacaaacttatttaagataagttttacatatcacaggggtcttcagaaataaagaagaccaaagaaacagaaaaagctgtgtacttttatgctctggtttgttgaagagtggacagtagtgggaagtatgattggaagacaggggtgtgatctaatgattataaaccggggggatttagcaaggcctgttcatattcttctcggtgtcctcgtgtctccggagataaacatgtgcttctcctctgggtgggttgcggggggcacccttggatgggggtcttatggcctgcttcgcaggagaaggagacagatcagtgtgtgaccttcctaggttttctcaaataccaggtcccaaattttggagtagtgtgtcttgaaccccatcactttctaccagcatcatttatttcttcttcaaaagattgtcaaaaagttattttttattgggctgactgtagattcttaattatccctggtgtttctattagatgtaatctgtgctgactagtaaaacattcagatagtttcttttattagtaatctttgaaaatacttcagtagggaatgattttttcagatctaattataaaaatagtaacttttttgtgttttttttttaagttctaggtaaagatagtttttgagatagggataattgtttaggaaaaaatttatagcattacttttttaaaaatctatgttaacagttacatcctttgtaactctgaattcccaaggaaaatttgggcaaaggaaactttcaggtatgggaacaggatatgcacatttactctctttctactcttagcttaattttgacatacttgaattgtgtaatctttgtatattgtgtaagcattcagatagctatgtatcctattcttatttttctattgtgtttttaaaaactctttcccaaaactattcaggatttttttcctcaagtggcaagttgccccattttataacagtaagcataatcatgtcatcttgacaagtaacttaaattacatttgagataagtaatttttcttgagcttattaaaattgttaacatggtgcctgaatttgttgatgaaatcagtctaatgtcatgtcttgttggcctttgaaagtctagatgttatttcaaagtagtaaacattcataatttcaactgtcttattttatgaaacagctgttttagggaaaccaatataatggtgtcatcaaattctgaaaagtgtctttctcccaccccaggggcctggaataggaaatgcctctctttctacgtttggttttgtgggagctgcgcttgaaatcattttgattttgtatcctttctttaactgaacgttcagcctatccacaaattttataccaagttttctggggcagtagttatttactaagacacttgtctagaagagaaaacaacaggttagtcttcctcaagcacttaaagcggctttttgttttgcttttcctatgggccttaagactttttggagactgccgagaacttaggaaacttgcattctgttggagagtttttttccttgattctcacagctatcttatggtgtcctctgttgtcggcttctatagccttcgattttttggaaactttactcccaagaaagatgacacaactatgacaaaggtaaggtagaatcttaggtgactgtggcctctcgtttgccttccctgacagactgctttatttaatagtcattctgaatggttcatttgcagtgataggtatttgtttgtaagttgcgtaaacacaaactggaagattttcaaaatgctgagtgagtgggaaagggatgtaccctgtttaatttggatggcgtccattcactgtaaatgcggagaactgcagagcttgttaactagctatagaaggctcctgaaaggactctttttcctctaaagaaaacgtattgctaatgagtaacttggattgtgctaactgtacttcagggagcttgtttgaagtctgaagaacttagttgctacaagtagtagggacaaagtatttcaaatttgaataattaaagtaagacggaagagttctattcagaaacattttgtagtctgaggctaatttgactttttccacaacatgtcattgggttcagaataaaaaggctgttgccgtatatagtgactgaatctttataaaatattcccgtaggctgacaaagaagaataactaataagagctgaaagcttgttttgtttttattttatatttttagcctac

SEQ ID NO: 11565 - DNA, 6000 bp, Homo sapiens
aaataaagtcctcagccatgccacaccctgtatctacactgcacatgtccttgactgcccgtgggtttttgtaaataggttgagcacaaggtgggggctggtacggatatgaaaattacagcgaaaccttcccaaggccaccaggcacaacatgtcagagaaaatggtatcttccgtatactgtgagatagagacaggagtttcgggagtggggaagcaggttgaggccatcgtagccacaaattcactggctaggagcatttcccagccaagggggttattactgcattttgccaaagcaggagctgaccagctatccatgagccaccgctgtctactgacttcttatgctggcctttcctcaaaccagcacactttcttaaagggtatctggtttggggtttggggtttggtttgttttactgtcccttttttgggtgtacttggtctcatgaggaaaaaatgagcaacccctggtgactggtgggtgtggacccagaagctgagcttagtctctgcgtagagtggaccacgaggtgtgaaacacagcaggaagctggaggagcagaactgaggtcattcccatttgcaagattcagaggctgagccatggccagtaaactcctctgccaaaggcaaaaggcctttcaaagcaaagccactcaccatttggtctgatagttgagcctgcttgattctacacgtgcacacgtgtgcacatacgtgctcacgtcacacacatgcgtgcagtctcatgcacacacacatggtctttactgagctggagggcttcccacccccatgctggggtgcacccctgaggcctggtatccattctgtcatcaggagccctcgatgctttacagcctgagtcaggaatggaaaattgtagaagtagacataagtgggtctgttttccaacctctttattctccagggaccaagaatgttcaaggcactctggcatacaagtgctgttgcctctaaggagttcaccattgccttccccgcctctccccaaagccttcgcaccactgtgtgccccggaaaaacaacaacaaacacctctaacagaaacggtgacacggccctggaggccgttgctggttgtgcctgtgtctgagcccgcccatttttgggcatcagcctcgtgtttcacagaccagagggcagcacagatcaagtgcgtcctggctaggctgtggccgcggcccatctgcaggtgggcacgccgagtccagtccctgcaactgctccttcagctcccgtggtgccctccagactgggcattcacactcccatcagaagggccttgttctggtaactcctcagggaataggaagagaggaggagaaagctctgtggtttgggctccgccgtattcaagcatccctcccctcatgctcactggacactcacctcccctctccttccacagccaccctgcccctcctggcttcaaaggtttgtagcaaagcaccggttgatggaatgtttactttccacggactctttggtgctggataggcaaggctttgcaaagaaacgtgacattttcccattgatggtccatacttccatttttcttaatttgtttcttgtaggagttcacgcagcacattgtagaacactctccttcacacatgctttattccaataacccgaggttccgcctttaattttacttattcagaaatagttcactgacaactttaatggacttcataaacatgtttcattgtttcactgaattaaaaaaaaacacctggatttacacagtgaattttaaatcagtcctctgttttgatttaggggttggttatgaaatcttaaatatatgctcatttctaatttttacaacttctgatctaaactctgcacaatgaagttgtttgtatactcaaagttataagcatggaagggacttgtcttggacttcatagaggtttctccgtaatttagatatccttaccaaaagctgacgggtcacaaatgcccttgaagatgctgtttttagacagtatggaaataacagttttcaatatgatgtctggactaagaaattttgagcataaattgcaaaactcaaaaattttagtgaagaatcaagatgtagtgtaacaaaaggtcaagtcaacataagcagaaacagaaagaggagagcctgcaggggtgggacgggcaggacaggccgggagtccactggttcaaagcctggcacccctccttggaagaagaaagcagtgtagaggtgtaacattggttttaaagctccgattaataacgtcatgttgagaagaagaataaatgtttgatattatgcgtatgatttttattttctccgtcaaaacaagcgattgcaaaatgatttcaaacacacagaccttgcgctttgttttaatagttgttttggataacgcaaagtcttagtacacaacgataatttttatatctctttttatttcagaaaagtaaacaagtgctacaggggccgttcttgtccaataattgttcattgcaggcaagtacaacttttaatggattaagaagttttggctacctcaaaaactaatctatgcaattaaatacagaagcttaactttctaattgcttaataaatataactaactggcacttctaaaggaaaccaaaaatataaacttacttttctatgccatttgggtaaatacaattgggcgttgcttgtattatgtctgtataaactgcacatggcttgcttttttttttttttttttttaactctgttgcccacgctgcagtgcaatggcgtggtctcgtcaggctcactgcaacctccacctcccgggatcaagcgattgcgcccgccaccacgcccggctaattttttttgtatttttagtagagacgaggtttcaccatttggtcaggctggtcttgaactcctgacctcaaatgatccaccgacctcggcctcccaacgtgctgggattacaggcgtgagccaccgcgcgaggcctcacatggaatattttctagcagcccacggtgcagtgtcctgccttctactcacccgtgagcatgtcctgccaccttgcttgttcttaaaccctgtggtcccatgacacagaaacatcgagacaatggtttcagcctgttgcattgtctcaaccaccaggacgtccagcagaggctcagaaccctctgcagatggtgagaaatgcttggggccagttatgtacagggacgaaatctgtcattacaggaggtacagccacctccagtttatcatgtgggttcaggcctctgggtaaaaattcagtgactcatatccctaagtacgttaaaaccacaccagtaagaatagattttacgcaaagaaaactcaacctaatagtactgtctctgctggacttcatacccaactccttttggtgaagaactcatattccatttttctagaactgtcttatagaatgttcttcctgcctggaataaaaaggaaacctgtctccaaagaacaaacaccaaatctgtcaaatccaatcaagaagcatgtgtgttttgtgtgtgcattcctgtctatgagagaggaggatgaaaatagattacggtttgttatccttacagagtagagtagaacatcttttttacccacaaatgtatcaagacaagcaacacttagttggaagatttttgaagtatatcttaaaatattcatgtgaatatatgctgtgcataggagacaagtgagaaaggcactcagcaaccagaatgctcaccgtggccctttgaaatgagcagtgagggttacgtggcggcccaggccgaccgcctctcctccttggtgatgcagtgagggtgtgaggatgtgaacgtgccgttttttaaacatttaccatcccaactgcagcttttttcaaccatttgtttgaggaaacatgttaaagccaaaatgcgctgattctttaccatcaaaagatcacctataggattccagtcatttcttgggatcacagacggcatagaaagcagaaccgaaagtgtgatatctgctgggtagtcacatctttcttgaagtcttgaaatggaaacatttattcgttttccggaaagtcacaattgattttgctaggattataaatgtaaaaggtcctctgtttaaaagccagtcatgggtgtgaacacgagccctatgtacttttaagaaggtctctcaaactcatgcaacccagtgacagcgtctgcacgggggcaggaaatggcttcacacattcctcataagaaaaggatgatcctgaggctactcttcttccagaaaaaaagggaaattttttttcctttgctactgttgaagtattattcaaaacatttttacaactctagcccagatggtaaatattccaattatagctggtgggatgagaaagagatgaaatgagagtgctttttaaagagtaagatttagtaacgactgttatgtcaatttctccttctgagacggaggacctgcgtttagaaggggtggcaggcagcctagggggatgtgcctgaagtgtccctgcgtgcatgagccagcggggcccagccgcccagcgccctcccctctccgctcgggaggttgcccggcaacactagagaaggcaccttgcagatattttcaatacaaatgccatcaactctgacacagtcaaacgcttagttcattttgttctggcaaaatttaccacatctttggccaaagaggggggaacaagcaagagggagtcacatctgagcacagcagctcatcccacaagctacaagctgctcagaggctcgaagcccccaggggcctcccttctcccctcacttggattctcccagcccgcgtccttcctccccctctcacatccgccatcctttcctctcgccggcccccgtaagcaggaaggaaatgaactgtcactagctttgttgtgggtcgggcttccgtgtggacggcagcactttcatttctctccttctgttggcagtgacggtgcaggccggagcggcacctacgtcctgatcgacatggttctcaacaagatggccaaaggtgagacacagacactgccgctttgttgcggctcagagctgggatggcgtcgctatggcaacgtagggtgccgtgttcacgggaggccctggaaaaaattcgctgcttgttgtgcctctgctgggccgtaggaaggtggtttgcagcaagcacatctgcttctgaggctggtcgtttgttacctgcctctgcgtgccgagcctgcagtgggtcctttgttacctgcctctgcgtgccgagcatgcactgggtcctttgttacctgccttggtgtgccgagcacacagtgggtccttgacaggtgtttgctgcatacgctgcagcgttaacctcagagccacggagaagccaccctcgggtccttcagtgttgttgcagtgcagaatgccgctccagtatttggtgtaactccactgttgtcaaaacggtattcacactagaggcacactaaaaatatccgttagtaattgccatcaaatgtcaatcaccccctctcaaatgagcctttcagccctctttgtgaatgtccttcttatctagggaatctctgtgcgtgctgtgggaggcgttcctctcagagacggtgtggggagtcttagacttgaggcctgtggtgggagaaggacaggtttggcagagcggcagcatgcgcagacggcgtggggagtcttagacatgaggcgcagggtgcgaggatgggtccagcagcagcgtggaaaagcagatctgtgcgcgggtctggctctgccagcaatgaggtttatcactttggacagagcttttaacctctctgggatccaattttctcctacaaaagcatggggattgagctctggcatttctcaaaaggtggtctccagaatacccaacctctaaggtcatctctttaaataggggccagagagaaggctccccaggcaggtgagcttgagaggaggcac

SEQ ID NO: 11566 - DNA, 6000 bp, Homo sapiens
tctagcaaggcctcaggctgcttccactcatggcagaggtgaaggggcaggtgcatcacatgatgacagcaggagcaagagaggccgtgaggaggtcccagctctcgcacgaactgagtgagggttcacttatcaccaaggggatgacgctgggcaattcatgagggatccgcccccatgatccaacacctcccagcaggccccacctccagcagcagggatcacatttcaacctgagatctgtaggggacaaacatccaaaccacatccgcctctctcctgggccctccaggtgtggccatggcagggcaggcccagcattgccagatatgatttttcaagagaagctggaagtccagattttaaaaatatattttttaagtcctttaatttttttttttttttttttgagacagagtctcgctctattacccaggctggagtgcagtggcgctatcttggctcactgcaagctccgcctcccaggttcatgccattctcctgcctcagcctcccaagtagctgggactacaggcgcccgccaccacgcctggctaattttttgtattttttagtagagacggggtttcaccatgttagccaagatggtcttgatctcctgaccttgtgatccgcccgcctcggcctcccaaagtgctgggattacaggcgtgagccactgcgcctggccaagtcctttaatttttaaatattggcaactcgtttatttttgtttgtttgtttcttttgttttgctttgctttttttgagatggagtattgctctgttgcccaggccagagtgcagtggcatgatctcagctcactgcaacctctgcttccccagttgaagcaattatcttgcctcagcctctcaagtagctgggactacaggcatcgccaccacacctggataattttttttttttttggagacagaggagtctctcactattgcccaggctggagtgcagtggtgcgatctcggctcactgcaacctctgcctcccgggttcaagtgattctcttgcctcagcctcctgagtagttgggaatacaggcgcataccaccatgcccggctaattttttgtattgtagtagagacgggtttcaccatgttggccaggatggtctcgatctcctgaccacgtgatccaactgcctcggcctcccaaagtgctgggattacagtcgtgagccaccgcgcccagctgcctccttttataaggatacatattggattcagggcccaccctaagccaggatggtcgcatctctagatctttaccttaattatatctgcaaagacccttattccaaataagattgcattctgaggctgcaggtggacacatctgggggccgctatgcatcctgctgctgtttaacagacctgccgagagatgacctaaaccccagggatcagctaggtaaaagagcaggcatcctaaaacaaaacagaacaaggtgccacccaaatatccctgtccctgcttcctcgtttctcttgaaagacctgtctgtcctgcctcgctctacctgcctcctctgttctctccagaacccatccttaccatcctgccaaaataactcccaccaaggccgctgtcgccgcgactcactaaagccctcactaaagcccagcaatggctctgtggccaggctgcaccctcctgtcccctaacgtcctccccaatcctgtaccctctcatcccccaccattctccccacaaatcccagctacttgggaggctgaggcagggaactgcttgaacctgggaggtggaggttgcagtgagccgagatcgcaccactccactccagcctggtgacagagcgagactccgtctcaaaaaaaaaaaaaaaaaaaaaaaaaaaagaaggccaggtgaggtggctcacacctgtcatcccagcactttgggaggccaaggggggaggatcgcttcagcctaggagtttcagaccagactgggcaacatggcaagaccctatctctacaaaaagttaataaaattagctgggcatggtggtgggtacctgtagtcccagctactcgagaggctgaggcaagagaatcacttgagtccaggagtttgaggttaccatgagccgtgactgtgccactgcattccagcctgggtgacagagcaaggctctctctcaaaactaagcaagcaaataaatacatacataagtaaatgaaacgctcttcagggcccagcatgcatgtctgcagtctacagtgagttcaaaccctctgtcaatgctgggagcatctgtgtatggattttggattctgtgtattgggaaatctggctgagttcaaactctgtcaatactgggagtgtctgtgcatggattttggattctgtgtattgggaaatctgcctgaaatctgttacagctctccggcaagttcctttcaccactccccacagtctcacacactgaaaccacagcaggggccgccctcactcaccgcaggggacaaccacccaccaaaaaccatttcctctgcggatgcttcccgcccaaagaaggaaccagaagcaggcaggatggggaagcagctggtggagaagccaaattgtttccttaagagaaagggatttacgggaggtggaggttgcagtgagccaagatcgcaccactgcactccagcctgggcgacaagagcaaaactctgtctcaaaaaaaaaaaaaaaaaagagagagagatacggatttcctgagcctccaggaggtcggctgggtaattttccttcgtccgactctctccctggccattgcgtagccacctcatccagatggcacgaagcctccgggctcgggtttctgactcgtctcccaggagccggtttctgtttaccgctgaaaggcacgcctgctgccaaatttgaggtgtgagctcaccgagaaaaaagcactgtgctcccccgggagctttgcaaaacgggccgctgctgccctccgttctgcagcagagatggtggccttgaagacagcgagcctgcctacggggtcgctgcgtccggtctcactccagccaggctgccggcctggcccctgcctccgtttcccttgctttgaaatgtcagtggctgcactacctgctccgtcctgctctgcagtgctgggaagatgggaaaagccttaggaactgaagcccagcctgttgtccaatgtcctcttctgaaatgaggacagttggccaggccaaagaaaacagacccaagctgtgtttcgggagacacagaagccccccagactctcctacctgcttgttcttgttcctcccttaacccactccacggaccggggccttacggggaggccgtactggccccagggtgggcagggtggaggccagcctttttgggggcacgatcctagtatttgaatgtccatcttctctagtgacagacccaggcggtgggttctggcacggccatctgccaaaatctttcccccaaacagatgtgtctgtttaaaaaggagatctaatgcaggcttttagcagcaatgtaaggtccatcagagttaatgcttggtttaaaaaaaaaaaaagtagtcagatgtggtagagggtgcggggggacgctgaggcagaggatcgtttcagaccaagagctcaagaccagcctgggaagccgggcgcggtggctcacgcctgtaatcccagcactttgggaggccgaggcgggcggatcacgaggtcaggagatcgagaccatcctggctaacacggtgaaaccccgtctctactaaaaatacaaaaaattagccaggcgaggtggcaggcgcctgtagtcccagctacttgggaggctgaggcaggagaatggcgtgaacccccggggggcagagcttgcactgagccgagatagcgccactgcactccagcctgggcgacagagagactgtctcaaaaaaaaaaaaaaaaaaaaaaaaaaaaagaccagcctgggcaatatagtgagactccatctgtacaaaaagatttaaaattagccagacatggtggtgtctgcctgtagtctcagcgactcaggaggctgacgtgggagaatggcttgaacatgggacggcgaggctgcagtgcgctatgatcataccactgcgtgatcactccagcctggatgacagagcgagaccctgtctctaaacaacaacaacaaaaagcaaaacaaaaaggaaaaaaacaggagttccagaccagcctggccaacatggtgaaaccccgtctctactaaaaatacaaaaattatccggatgtggtggtgggcacctgtaatcccagctactcaggaggctgaggcacaagaattgcttgaacccgggaggtggaggttgcagtgagccgagatcgtgccattgtactccagcctggataacaagagcgaaattgtctcaaaaataagtaaataaataaaggccttattggccgggtgcggtggctcatgcctgttatcccagcactttggggggctaaggtgggaggatcacttgaggtcaggagttcaagaccagcctggacaacatagtgagacccccatgtttacaaaaatataccaaaaaaaggccgggtgcggtggctcacacctgtaatcccagcactttgggagcccgaggcaggcgaatcacgagatcaggagttcaagaccagtctggccaacatggtgtaaccctgtctctactaaaaatacaaaaaattagctgggggtggtggcaggtacctgtaatcccagctactggggagactgaggcaggagaatcgcttgaacccggcaggcagaagttgcaatgagccgagatcgcgcaaatgcactccagcccaggcgatggtgagagactccgtttcaaaaaaaaaaaaaaaaaaaagccaggcgcgcctgtagtcccagctactcgggagtctgaggtgggaggatcacctgggccggggaggttgaggttacagtgagctatgactgcgccactgcactccagcctggacaacgggagggagaccttgtctcaaaaaaaaaacaaaagagcaaaaaaggtgaacatgattgtatgtaaattacacttcgttttaaaagtgcaaagaacaaatcagtatttgcaagacgcggtgcagtccccagcacggagaagagaacctgcgaattccacgcgggaagagccggcgtttccatcagcaggggccctgcaggagacctcgcgtgcagaccccacacattccccagaagggcgcctggggaggaggggccgcgggaggagcccggcctgcgagcgcctgcgcacgcccggagcggcggggaattggggtgggggcggcggccagcaatgggagacgtgcggaaggccaaggaggcactggccgaggtgagccccgtcggaagtgggggctgcctcccggagccgcagctgcccctcccccaagacgcggacgccctcctggagattcagaccctctcatggagatgcagacccctcccccggatccaaacctctccccaagatgcggacgccctcccccagatgcacacacctttccgaagatgcagacccttcccccagatgcagacccctccccaacgtagaccgcgtatctgaggggcagagccctccgcgatgcagacccctcccccaggtgcagacccctcccccaggtgcagacccctcccccaggtgcagatccctcccccagatgcgggcccctcccccagatgcaaaccccccccagcaggtgcagacccctcccctaaatgcggagccctccctcagatgcaggcctttcccccgaatgcagtccccctcctccaggtgcagcccccataccgggacgtggcctcgcccgtcccaccccgtgacgcatccaggcccctccccctccctccctctccccctccccttcccccgcctggagtcctcctcgcccctccgcccgcggcccgtagccgcctcgtcattggccagaacgcttcgggtggcgcgctcgggactggtgaa

SEQ ID NO: 11567 - DNA, 6000 bp, Homo sapiens
tttttattgatacatgataatcatacacatttctgggctatgcgtgttattttgatacatgcatacaatttatggtgatcaaatcagggtgattgggatatccacctcaaatatttatcatttctttgtgctgagaacattccaaatctttctcttttttttttcttttcttttttgagacagagtttcactttgtcacccaggctggagtgcagtggcacaatcttggctcactgcaacctccacctcccaggttcaagcaattctcctgcctcggcgtcccaagtagctgggattataggcgcatgcagcatgactggctaatttttgtatttttagtagaaacggggtttcaccatgttggccaggctggtctcgaactcctgacctcaagcgatccgcccatctcggcctcccaaagtgctgggattacaggtgtgagccactgcacccagcctaaatctttcttctagctgttttgaaatatacaacaaattgttgttaactatagtcacctagattcaacaattttagcactttgtcataactgcttctttccatatatctataatcatatgtagatataaggatagctatatatatctatctacatctagagacagaaagagggattttaaaaatcatttaaagcatcaaaaatagccaaatatacaaaccttgattggggtgataatggtgtcagggctatttaggacaatgctcttattcttagacatgtgtgccggagtctttatgaataaacagtcatgatgtcaagtgtgtcaggaaaaaaacctacagaaagaggtgtgtcaaaataaaaagataaagtatctctgatttgaataggattgtgacttgaaaacccgataggaagaaaaatacattaaatgatatctctacattggatttttctgaataattgctttgtataaaaccttcattgaaatataacaaattcagaaaagtgcacaagtcataagcatactattggatggattctacatattaagtgtttagttgtctaactacttttaaactagttatgaaaaaaatacgaaaaagtgtttaattcagtgatgcatgcacattgggttttctgagcctagataacactcatggctggtttctatctctgtttagaggctggtttatctgctgatccgtatgtttacaactggacagcatggtcagaggacagtgacggggaaaatggcaccggccaaagccatcataacgtcttccctgatgggaaaccttttcctcaccaccccggatggagaagatggaatttcatctacgtcttccacacacttggttggcttttacaaacccctaagcttcttctttacctttccttaaaatttcaaccttctcttttcttactctataattgagaatgataacacagagagttaataacagtcaccctgctaactttccttagcatgagtgaacagtgagagataaaaatgaaatcttggttaaccttgccaaatctccaggacaccgaagagttaaaaagagagaaaaacaaaaagattaagctctttttcaaaaaaacaaaaccacttaatttttttctacctaaaaccataacaagaaaaaatgctaacacttatttatttgaatggcacatggagaccgggcatgtggctcacacttgtaatcccagcaccttggaaggcggaggcgggtggatcacctgaagtcaggagttcaagaccagcctggccaacatggtgaagtcccgtccctactaaaaatacaaaaattagccaggtgtggtggtgcgcacctgtaatcccagctactcaggaggctgaggcaggagaatcacttgaatccgggaggtggaggttgcagtgagaggagattgagccattgcactccagcctgggcaacagagtgagactccatctcgaaaaacaaacaaacaaacaaaaaacagaatggcacattgatgagcattcattgattgattctttagtttttttatgttctctaaagaatttttaagatttaaagaagcatgtgctatttatttgtaggaaatcctcagaaaaggtacaaataaaaaataaaaattatccataattaataccagagattataattgttaattattatggtgttttctttgctagtatttaagatcattattaagatcacatacacatttttgcttactatcattagcatttgatgatatgatttttttaatttttatacattgttttaatggctgcacgatatttcattgtgtacaaataaaataactactgttccgctttgacctagcccattctgtctttttttaaattacaaatggtattcattttgttgtattattggggaaatgattacttttagaaggagcaaattgagcttattattaattaggctgctaaattcttagtttaaaatgtcactaggtgccacctggcactgagtatttgaaaattgctaccaatcaagcagcctccagattactaaatatttcatctttcatcacagattagagagagctcctcttccttcaattaacttatttacaaatcaggacaaaatattaacaatacatacccattgaacagagtataagctatgtcaaatattatgctcatctatataaatcaattgccttaaagctaacttatttttcactgccattacgaccccattagccaactcaccaaacatttctttgacttgtcactctcatgacagaattctgacattttgcatggagtcacttatgttcactaacactcgccgactctttagcctagtaaacattccaataacttaaccagatcaaatgtctgtatttaaaatcaactttcagcctagaacttgctctgtttgtctaacaagactgccttgaatttctgtcttccactgaggtctcagagttaactgatattctccctcaactaagtatggtctcacctctcagagctgaaactaacattttcctcacgaataacccctgagagacatctcttccccttataacttctgatggaactacccctgcatctcaacgtgaaggaggattccaaaccacacatccctggagagaccagtgtgtttttctcacacgtttgacggtgtgatacacggggtcttgaaacaacccggtctcaaaagcatgcaacctaagatacccagtcagtgacaggtctaaaccaggccccctggcaggattagaaaagttcttgatttgggaatgatagtaagaggagttacagagttttaaaatttgtttaaatgtccttgagccctgaaggagaggaattacttccacctgttagctagcagcagggagggttggacaaagaaaaggaatgactcaggggtgtcctaggaaagtgcctgtggaaccaccccattctgttttatgtctgccatcctctatttcatcacttacgggatttttatttttatttttttgagacagagtctcgctctgtcaccaggctggagtgcagtggtgtgatctcagctcactggaatccccgctccgggtttaaccaattcgtctgcctcagcctcccgagtagcttggattacaggctcgtaccaccacacctagctaattttttgtattttagtagagatggagtttcaccatgttggccaggatggtctccatctcctgacctcgtgatccgcctgcctcggcctcccaaaatgctgggattacaggcatgagctaccgcgcccagccacttgctgtatttttatatacaaatactattaggagatggaggattccagtccccttttaaaaatccacttaataatatagcggaaatagtaacaaaaataaggtaggttattggataaataatttttttaactcttctggacacctcatcattatattaaatgtattttctatggggaaaacatgtatttcaagtgccaaattacttagcacaaacagcatttatttgtaaactaagggctaactgttttatgccactaaacagctttttaaattttaaccaactgtatacaattacatgtatacaactgtgggtttgttttataagattttacattaaaatgagcaccatctccctttctgaagcagcaccacaggcccatcctattttccctcctcagagcaatctataaatggtggtagctagtctttaaggaacagcttcctataatgatgatataatgcagccaataactaaaaatttccatcctcccaaaggtcagtatttccagaaattgggacgatgttcagtgagagtttctgtgaacacagccaatgtgacacttgggcctcaactcatggaagtgactgtctacagaagacatggacgggcatatgttcccatcgcacaagtgaaagatgtgtacgtggtaacaggtgagtggtgtgaactctaactgaggatgaggcacttcattctgttgacgtcaatgggttaaaaaagaggtaaggccaagtgttcggggttaggttacaatgcatctggcccacctaagcttgtgtatttaattagttgtagttcatctgttttccagaatagcttagggaaaccccagaaaacttgcatgtgaaaaggaaaataatgctaaattatccctcattttaatatttcaacctaaaagcatcgtcgaagccctccacttacaatcaagcaatcatgcattctttatttctttgggggatgtatcttttagatcagattcctgtgtttgtgactatgttccagaagaacgatcgaaattcatccgacgaaaccttcctcaaagatctccccattatgtttgatgtcctgattcatgatcctagccacttcctcaattattctaccattaactacaagtggagcttcggggataatactggcctgtttgtttccaccaatcatactgtgaatcacacgtatgtgctcaatggaaccttcagccttaacctcactgtgaaagctgcagcaccaggaccttgtccgccaccgccaccaccacccagaccttcaaaacccaccccttctttaggtaaggtttcgcagtgatctttgagggaggctccttaatggctaacaaaatattcacgcaggtcatattattaaatccctccttaaggggatattgtaaggactctgcggtgattccattttctacctgttgattttttaaagcaaagttatcaccattttacacctatagaacacagaagaaggaagaatgtatgtaaagtcactttgcaaatagaattcagtgacttgtagaaagttctttgaccctcctcatttgcactggtccctgctatgtgtacacactctcccctcttctaacctgtcacatttttgtttatctcccattttttatggctatgagaaggcacactggctccttatacgatcaggtcatttctatgttccttcctctcccccactaatttctttccctaccctgcccacacctacccagtgtccatgaaaacacagctgtacttgaaagcaatttccaaatggtccaagaaagaatgtagcttgagagtatgtctgggttagcaagctgcagtgactcctgacattaaaattgtgctgcatcgtatgtttattgcggcactattcacaatagcaaagacttggaatgaacccaaatgtccatcaatgatagactggattaagaaaatgtggcacatatacaccatagaatactatgcagtcataaaaaaggatgagttcatgtcctttgtaggaacatggatgaagctggaaaccatcattctgagcaaactatcacaaggacagaaaaccaaacgccgcatgttctcattcacaggtgggaactgaacaatgagaacacttggacacagggcggggaacatcacacaccagggcctgtcggggggtaggggtagggaggcgggatggcattaacagaaatacctattgtaaatgacgagttaatgggtgcagcacaccaacatggcacatgtatacatatgtaacaaacctgcacttt

SEQ ID NO: 11568 - DNA, 6000 bp, Homo sapiens
aatttttgtatttttagtagagacggtttcaccatgttggtcaggctggtctcgaactcttgatctctggtgatccacccgcctcatcctcccaaaatgctgggattacaggcgtgagccactgtgcccggcccaggctgtggtttttaacctgtgaaagtttgtccagcttcctcagttttaggttttgtttgcaggtagccactccagtcctgactttattatttttcactctttcctagaacccacgagaagctgatcccatgactaaagtgcaggccgaactagatgagaccaaaatcattctggtaagcaggaagatggagagcaagcccaagaactgaggcgggggtgcgatttccactggccaggcatgcacagatccatcctcgttttaatataatagtaaccacggcactctccagcaagtgggattgcccaccccttcccccaccccgggcatcagactgtctttcctatacccttctcttggttaatggcacccattgtttctaggggaccaagctgggaaccagtggaaccctcaagtctcccttcctcatggctactgcctgtctgaccatttactgggttcctagggtttggcttctgaagacctggattcccaccctggtgcctttgttagggtttcgggtgcctccacaccccacaggtgcctccccttgcagcgtttgcattgaaggtgaacagattgaagcaccgtgcactgaccacagggcagcttctggaatatgggcccagggttgtcacataggcccctttgaaaagagccagaaccctgcattttgagctgaaatctcctgatttgtaactgttgcttcaactctttttttttaaatttttgcatacaagtggaatgtaagcagctatctgtttttctcaggtttttctcttacagcctttgcctctaagtggtccccttgcctcctgctcacctccagtctgtccaccagagagtagtcattgatctgcacaacttagaacccttcagcagctctcagatccgccccaggataaagtgcaaactaactcacagtctcctgactgggccctgttctctcttataccctttcttgcccagctcacacacaggcgcctgaaggttgggcctttctgaccagatgtcacagttttgtcactgcttgtttacatgtctccctgaccagcgtatgagcactgggacatctttccatcctgctcatgatacagtgcctagtttataccatgctcagcagttgatagatacctggagtggattgaaacccacatacaaagctttaccatttacacaggcatagctttagtgtgtacatcagcgtctcctggggttggagttgttggcctgcgatggagcctgggaacctgcattttataaaaagcatcccaggggcttcaaacacaggtgtgctgactgcactccaaataacgtggctttggaatgaacgatagatgtgaaagtctcatggtatctgtgtcttttgaaaccttgtgagctttcttaccacctaggtggcatttctccgttttctcctcaagccatctctttctgttgctcaagtcctagtctgagtaccatgacacctgggacacccgctgtttctcctctccccacggtggggagtggatgagtcctattcacccagcctcatctagctgcagttgtaaaatctagatgattggtgtgcatatctgaatcagttaactttctgtgttaaaaatttgagtcgctcagctgtgtgtagggatgaaggacattcttgctggctccttgttctatggcgcttcatgtgtgcatctagctgctgcagcagtggccatctgaggagagaagcgagctgctgcttcctgagggccctggcagcagagctgctggctcttgtgaggtctccatctctagaccccttcccatggggtcagtgttttcatttcctaagtcagagtttgtagtgatgacatttaggacatagcccatttagaaggcaggacatgttctgtcatagtgctgtctggtatatatttggggcatgtgtgtaacttagaattttctaggagccatattttaaaatgataaaaggaaaataggtagaatttaatttaattatatattttacttaacgcagtatatccaaatacaatttttccaacatgtaatcggtataaaacttgtttttttttcagtataaaacttactaatgaagcatgtgtgagtttgcatctgaaatctggtgtgtctgtactcagagcgctgctcagtttggacttgcctcacatcaagtgctcaatagccatttcccaccgccttttgtttcctgtggctgctgtcaacagaaaccctcaaatatttgcttttaacagatagctctgtgggcctggctggtgtcttttggggctctgagtgtctgtcccaggcctctctccagcctctggtggctgctggccatccttggcattccttggattagaggtgcatcacttcaggctctgcctctgccgtcacgtgaccttctgtgtgtgtgtttccgtttcttaccaggacatcagtcatggaattagatgccaccctaatccagtattacctcttcctaactagttacatctgccaagaccctatttctaaatatggtcacattcagagattctggggatgttaatttctgggatgcggttggggttggggggtgcggtgtgggtcactctccaacccagtacaatcatatagtgcccagctactcttttttccaaagctccatgcacacgcacatgtgcgtgcacacacacacacacacacaaatgtatatataaatgtgtgtgtatatatatatatgagttttcctggagtgctggttatctaagcctgtgctggggacagctttttgggaagtctgctacatcccagttagatcttctagatttcacgggaatgtcaccaggttctgttccatccacttggacagtaactattcttggaccgagtctcgacacctagaggtgaagtttgtgtgtgttggagaggaacccaggtaaggcactttcccccatgactgaaatatgaggggctcatgtcagggcacgtactgaacagagctggattctcttttcttttttgtccagcacaacaccatggagtctctgttagagcgaggtgagaagctagatgacttggtgtccaaatccgaggtgctgggaacacagtctaaagccttctataaaactgtgagtacccagcacctgctgcctcctgggtgttctctctagagagcagtcgcagcttgctgcttctggcactctccactatgaacgggtctttcttagactgttgaatcatggtggatgattccttgtgcggcaagagcctaaggtgagcgcctcaggcccaggtggttggaggcagttcacttgggcgccgttggagtcgatgcgggccgaggccttgttccactcctgcctctgctctgccctctgctgctctggctgatttctgaactcctactcccagtccaggaaggctggttcaagttctgatcaccagagatttactgttgaatcttattcctctttctgctgagtagacataagtctttaagatgcaagcaattcagccttcctgaagaggttcttaagcttttaatttccctttgacagaaaatatttaattgacaaggatgggtgctgctgactgccgctttctctcaggtcagtgctcatgtcttcctatgtggagatggcactgttggcccatggttggatagtcatagggacaaatttacttggtctgtccacacacatttgctttcatgtgcacattggagggagatggctaggtgggattaggaagatagtctgtgaccagaaagcaagagagaaggtggcaacagtggtccccacaaaccacatcccaagtgggaaccacatctgttgtcctcaggaccatcttctaggaagaaacaccaccgtggtggtcagatagcattgtgtgaagacaggagtggggcaaagttaagatattctgccaatcccatttgtattattggtcctttgtttgtacctggcctaactgtaggaattttactcactttttgatagcattaatggggtgtgagaaaagaaaggaaaaaggatcccagactagttttggaagccggggcccgccttgtgcttggtgatgggaattgcttgtggacagcttccctcaaggcctccacccccaccctgttctagtgctagtttctctgcctggctgtgtcctgtggagctccctctgccacgcctgccaggattggggcttcccttacttcgtcagtcctccttctcagctcctctttgtttttttccaaggcccggaaacaaaactcatgctgtgccatcatgtgatgcagcctgccagaggcccaatgctggaatggcaccatcattcacatcagaactgcagcccctggaaaagaagagacagccatagacgaggagccagagtgggggcagactggccatttttattttgaagttcctgcgagaaatggatggtggaagggtggcgaatgttcaaattcatatgtgtggtagtgattcttggaaagaatttgaggtccccaaaggtgtatttttgggcaaatgaaaccataaactccgactggcttctgtagatgccaaagggctctttttcagctaaccctgggaaggctctgtgggagggaggtcggagccagctgtttctcgatctttggtatatctttggatcttatttgtacattaatgatattaacactccagtggggggtggggagtccctgatgctagggctggggtgggtggagtttgaagactcttgggaaagcctctcctggggccactgttgggggtgggagtgagcccaccacagaggccacaggcaggcccccacttcaggcccaaggcctggggcggggggaacagtcactgggtctcagattctgagactgttgtttagcttacctttctgctaggattggcttcccgcagagggcagggcccatcctaagcagcttccaagtcccacaaaggtggcttgtgggaggatttggaaggagctgcattgtgggcggggagtgtgtgggttgggttcgtaccagcaagtagactaggaactgagcccaggaaagggggatgttttcctggtgtttggatggtcagctgggagtgtccatcatcaggggaagatcaaacacaggtgcactcagctgcccagggcctctgggacacttgccttgacttgcaacttgccttgaacatcacgatcaaagcagcaggtgctgtggtctctcaaaattgatttttatttgactctgtggctctaagactgccttgaaccgcctgaggcctatgcatctgaacaagtgggtctctcccttgagcaccaggagtgggtgccagccggccccgaggattcccagcaccccacctatggtcttgccagcataggcttgctagttccttcttggtcagaggtagctgcagaggggggaggccaagggtttggtctaagctgtgccctgccacctggcaggaggcccactcactgcccaagtcatggcaacaggctggagcagcccaggagatgggcctaaaatgttctggatcccttgggtcctagtgttatgttccagtctgcccacctgtgctcaggatgcagccctgggatccagcacccatggaagcttctgctgggatggtgtcacctatgggttttgaaccagtgtggtatggtccttgggagctctgctctgagcttgccacactgctgagagcacccactgtcctgaccagagtctcagtggtcctgacccccaatgtgggcaggggctgggcaggagggtggggtctgctgtgggttcagaggactccacctcctggctggtttacctgctgctgcccattttctctgggtactgctggccagaggactttagcctacccctgaagagcctgtccatgtcattttcctac

SEQ ID NO: 11569 - DNA, 6000 bp, Homo sapiens; identical to SEQ ID NO: 2485

SEQ ID NO: 11570 - DNA, 6000 bp, Homo sapiens
cattaatgctttcttaatttttaggaatttttatatatagtaaacacaaattggaagcatcttcaacttacatctgcaaatgccacttaatactatatgtttttatctttcaagaaaaattgcatttactggtattgttattttgcttgtttaaagtgagtttgcttctttttaatctttgaaggatgtgaaaacgtgcttttatatttctttataattatttatagagcacattttatttttaatttattttattttattttattattattactttttttgagattgagtcttgctgtgtagcccaggctggagtgcagtggcacgacttggctcactgcaatctccacctcctgggttcaagcgattctcctacctcagcctcctgagtagctgggatcacaggcgtgtgccaccacacccagctatttttttttttttttgtagtgttagtagagacaagatttcaccatgttggccaggctggtcttgaactcctgacctcaggtgatccacctgcctcggcctcccagagagctgggatttagaagcgtgagccaccactcccggccaatatatttgtatttgtaagttcacatcattcaaaaatctttatatctggtttctacctatttgagacaatatcctatgaattggtttttaaattaaaagaacatcatattggggagaagattgctctgtaatgtttgttcaagaaagcagcaaactaggctgagtgcggcagctcacccttgcaatctcagcactctgggaggctgaggctggcggatcacttaaggccaggaattcgagaccaacctggccaacatgatgaaaccctgtccctactaaaaatacaaagattagccggatgtggtggcatgcacctgtagtcccagatagtcaggaggctgaggtgggagaattgctggaacctgggaggcagaggttgcagtgagccgagattgcactactgcactccagcaagtgcaatgagaccctgcctcaaaaataaataaataaagcagcaaactgattttttaagcaaaaaaaaagaaagaaagaaagaaagaaaaaggctgccagtatcatgtgaaatttagagccctacttctaaaataccgttgctgcataagaataggaatttctattattgtagtatgaaatccatgtgttcatttcatgaagtactggggaatttgctctcatgagagtttttcttgtcccttgtttaaattcctggtccccctttttaatacctggagttgctctttcttttcctcttaatgtttacctggtggtatctgggtgcttaagcaagtctaccaagcagattagaaatactattgtagaaggctgggcgcagtggctcacgcctgtaatcccagcactttgggaggccgaggcaggcggatcatgaggtcaggagatcgagaccatcctggctaacacggtgaaaccccatctctactaaaaatacaaaaaattagccgggtgtggcggcgggcgcctgtagtctcagctactcaggagggtgaggcaggagaatggcgtgaacctgggaggcggagcttgcagtgagccaagatcatgccgctgtactccagcctgggcaacagagcgcgactctgtcttaaaaaaaaaaaaaaaaaaaagaaatactgttgtagaaaatcatctagtgtttctaaagagatccccaagaagaggttcacactggcccatcagcatctggacttttatgtccagaagcactaagattctggacatttatgctggccctttggaatcccagtacattactgatctaggaaaaggcagaaaagatctatgtgtaggtcagttggagagcaaaagtagctgggcatggtggctcatgctcgaaatctcaacacttcaggaggccaaggcaggaggatcgcttgaggccaggagttcaaggccagcctgggcaacctggcaaaacccattctctatagaaaatacaaaaattaaccaggcatggtggtgtgcatatgttgtcccagctaatctggaggctgaggtgggggaatcgtttgagctctgggggtcaaggctgcagtgagccgtgatcacaccagtgcactccagcctgggcaacagagtaagagcctgtctcaaaaataaaaagagaacaaaagtataaagggtatgctgtgatagacctggccagaggtaagatcaccaattataaaagggattgtgcagaaagaaggggcaggaattcagaaggctacccttctgtatgattccatacatacgatgttctagaaaaggcaaaactgagggacaaggaacacagcagtggttgctagagatggggagaggggttgattataaaaggattaacttcaaggggtgaagaagctgttgtgatgctggttacattactttaggcatttgtcaaaactcagtactgtctgccaaaaaagtacattttattgtacatagatgtgaaaaaccaagaagatgagggaaacgctgtttgtcatttgatcatggttacataaagttcagaagagggctgagcgcagtggctcacacctataatcccagcactttgggaggccgaggtgggcagatcacttgaggtcaggggttgaagaccagcctggctaacatggcaaaaccctgtttctactaaaaatacaaaaattagccgtgcacggtggcacaccatgtagtcccagctactcaggaggctgaggcgggagaatcgcttgaacctgggaggtggaggttgcagtcagctgaaatggtgccactgcactccagcctggcaacagagcgagattctctcaaaaaagtgtgtgtgtgtgtgtgtgtgtgtgtgtgtgtagaaattgttcagatagttcagaaggttatacaatgaaaagaaaaaacctttactcccaccccaggcccagtcatgttccccagatgtcatcaccctttaacagctcactctgtatgtgtatatatagtgctgttctgtgccggcttttttacagaatttatcttggagatgtcagcacatcagtgcacataaatctacctcattctttttatcgagtgcatattttctgacggggagtatttcctaatttacgtgaccagtctgcattaatggctattcaaatggcctatgccaggagataactggaaacaagacagcaatgaatatttgtatgcattcaactttgtgcacctgtctaaatatagctggccgtaggacataaccgcaagtgtcattattgggctgaagtcatacacagtttccattttgatatggatgatgccacactgccctcttgggaggtcaacaaatttgtattcctattagctggcatatgggagttcaacatgcacatagatatttgtgaagtagggccaattgcagtggcttacacctataatcccagcactttgagaggctgaagtgggagcattgcttgaggccaggagtttgagaacaacttgggcaacatagcaagaccccatctctacaaaaaatttaaaaaaattaaccatgcaagatgacgtatgcctctagtcccagcttctcaggaggctgaggtgggacgatcacttgagcccaggaatttgaggctacagtgaactacagtgagctatcgcaccaccacacaccagcctgggtgacagggcaagacccagtctcaaaaaaagaaagaaaaaatccatgagtaaagtatagtttgtgacttgagtcaaatttatcctcactttctgaaagcattcacaatagaaatttaattatgagatgaaaattagcaaattatgtgttaataaagttggtattctgaggtttgtgggggcagttaaaaaatttttgatttttaaagttaatttttacaaatcttgattttttttttggccaggctcggtagctcctgcctgtaatcctagcactttgggaggctgaggcaggtggattgcctgagctcaggagttcatgaccagcctgggcaacacagtgaaaccccatctctactaaaatacaaaaaattagctgggtgtggtggtgtgtgtctgtaatcccagttaccctagagggtgaggcaggagaatcgcttgaacctgggaggcggaggttgcagtgagcccagatcgtgccactgcactccagcttgggcgatagagcgagactccatctaaaaaaaaatttttttttgatttttaagttacttgaggggtaaattttttttaaagaaagaatgtatttcattttccttgtatttttaaaatatttttattgtggtaaaacatatatacataaaatttgccatttaaaccatcttaagtgcataattcagtggcattacttatattcacattgttgtacaatcatcaccactatctgtttccaaatcaaataatattttttaaattgtggcaaaatgtacgtaatgtaaaattcaccattttaaccattttaagcatacagttcagtggcattaagtagattcacattttggggaaacatcactaccattcatcttgagaatttcttcatcttcctaaactgaaactccttaccccaacctcccctttcctcacctcctggcaacctccgttctgctttctgtctctgtgggtttatctactctaggtatccatgtatattttttctgtgtcaaaaattgctttgaaaaacacatagtgcaaattgcaaagataaatgtgggctctcttataggagtgccacacattttacatttttctttgcttctgcttcttggagtgcatgctgttgtcatggaaagcaggcattctttggtagcccaggttctggaacggtgcctagaatagctgctcactgtgtttgccagattaactgatggatatatgaaaacagtatactgcgtgacaacacctttgttattccataggacatggacatcttccagcaacagatctcgagaagacagctggctaaaatccttatttgtccggaaagttgatccaagaaaagatgcccactccaatctcctagccaaaaaggaaacaagcaatctatacaaattacagtgtgagtgacaggtttgctatcttcatagttgactttttttcccctttgttcctaagtttatcgttgaattttcttttgtttcagttcacaatgttaaaccggaatgcctagaagcatacaacaaaatttggtgtgtataccaaactatcctttacttggggaaaaataatgactttatttgttagttaattccactaacacttgatagcatagagagagatctttcatccctctcttttgaagctgaacattcagaggctcttaaactgagcttcatgtgggattgccgaaggcgttttgattttaagcactcacacagctaaatcatcatataggctatcagactttagaatgttaccagactcttgtgtttggaggaactttgccaggctgtctagtccatctacttatccagtgctggagtcctttccacagaccttcctgactgcctgtcctgaagtaagttccatctctggacagctctgagtgttaggaataagaattcacatctctgagtccttcattgattcccctaagtaaaactgccctgtgagagtcctgtatgtatttgaacatagctgccatttcttcccaactcctctgttctccaggatccaagtcccttccgctgattctcctatgatttgcgatctaaacctgcttacagaatttgtaaactttaagacgaaaggggagaactaagcttaccagcttttaagttaacagaaatagtattttaatgacccatggtgagcaaatgtgaagaaaaaggtttttagttttgttttgtttttacctttaatatctactacgttcttaagaaagcaaacaattttgtccctataatcagcatactttttagaagaaaaaccttttgttttttattgttttgtttttgaagatagcttatgaaatgtaacaatagcattgaatttcttgctcattcc

SEQ ID NO: 11571 - DNA, 6000 bp, Homo sapiens
tttgtatacatgcatgtaaatgcatagaaaagggtcgggtggttggggaggagggagaaatttcactaggtattctgcatgtttccattttgctggatttctagagaagaatatgaagtataagcccagatgcaagatgttttcctttaaaggcaaagaacctaagaacagcctttgactagattaactcttgaagatagaggtgtgacagccaaatttttgttttaccattaatttaatgccatggtatatacatattttaaatcatatttatcacatgtgttttttcattcgcattttttgactcgcatttagatgcttcacgtgccttttaatgttggtgtcttcatgggaggcacatttgaactaacctagcaatttccagagcacagcatctgtactcccttctaacctgtttgagacacagcatttttaatttaattttttcataggtaatccattcacgtggttcaaaagtttttaaaaaggaccgggcacagtggctcatgccaataattccagcattttgggaggccaagatgggtggatcacgaggtcaggagttcaagaccagcctggccaacatggtgaaaccccatctctactaaaaatacaaaaattagccaggtgtggtgccgcacacctgtaatcccagctacttgggaggctgaggcaggagaattgtttgaacctgggagacagaggttgcagtgagctaatgtcgcaccattgcactccagcctcggtgacagagcgagactccttcaggaaaaaaaaaatatatatatatatacatatataaaatgttacacaaagaaaaatctatcccaccccttccctttatgcctggtttccagtgctcctcagccccgactggtagcttgttattgtctctttatgcatatacgagaaagtacaaatacacaatcttaattttcctcctttttaaaatataaaaggcagatgctatacccactgttctgcagcttgcattttctttttttgcctgatgaatatatcatggtgatttttccatatcagtatattaaatgtcttcattcttttctacagctgcagaataatccattgcataattgtaccatcatttatttagagttacagcacattttaaattccactgggaatttgaccctgagccaaacgtacctagctgcattacagtagcatttaatggatatctggtatttatacactattctaagtgctttaatcctgcattatctcagctcatttaattgcccagcagtcttaagaagtaggcatgattgttatcccaattttacagttgagaaaagaaaggcatagaggaagaaataagttgcccgtatcattctgaagttaactttcttaggtaaaattgtgaccacattaatttcgaaatgttagttgtttagcataggtgaagtcagcaaactttttcagtaaagggcctggcagaaaataggctttgccagttgccgcagccactcaactcttctagtatgaaagcagtcacagacattacgtaatgaatgacattacataaatgaatgagcatggctgggtgccaataaaactttatttacaaaagcaggtagctggccagatttgctagtccctgcaacaagtaattcagcagcaccttagtcttgaagtgccctatgaaagcatctaggcccgtggctgtgcggcagccggcccacaggcgtcttcttgttgcatttttttttttgccaacagggcccaggatttcagctctttaactgacttctttatacctgctcccacctgttattttgttcctgtttctgttatccttatccatgagtcattgggtaggagggtagtttaacatgctctgccttctctgtccttgaaaataaatgcacatattctctatactgttgcctataagaaattaaaaacaatacatgtgaagatagagtccagaattcaggtgcctttttttttccttttttttttttttttttttttttgagacagagttaagactctgtcgcccaggctggagtccactggtgcaatcttatctcactgcaacctccgcctcctgggttcaagtaattctcgtgcctcagcctcccttgtagctggggttgcaagcgtgcaataccatgcccagctaattttttttttctcttgtactttttagtagagaggggctttcaccatgttggccaggctggtctcaaattcctgacctcaaatgatctgcctgccttagcctcccaaagtcctagcattacaggcatgagccactgtgcgtggcttcaggtgcctttttgtattgagagcctggatttagcacacatgtccaccatttttcttgatcaggtttgacccacatgcagccaacgggcaaaatgtggtttcccttatccaccagggtgagcccttcctgaaatgtttatcaagagtttctttttctctcttcagcagcttgttggtgtagtcacctctcattgtggatttttaatcaatttgatctaaacatggaaaagcaaattttactttccacagatgggcaggatgtagtgaaagtccagagaaggttctcaccaaatgtgtgcagctcggaagaaaaaggttgtggtcctcatgtcccgttattcatttggtgtcttggggctgttgatgttacaagtcagcttcattgcttaatgtgattgtgagattgcatgttttctttgtgtgcatattttcaactaggctagtttgtgaaattagtaatgttttacctgaaagattgagaaatcaaaaacatcacagctataaaactggcatttggctgggtatggtggcttatgcctgtaatcccggcactttgggaggctgaggcaggaggatcacctgaggttaggagttggagaccagcctggccaacaaaaaatcagccaggcgtggtggcacgtgcctgtaatcctggctacttgggaggctgaggcaggagaattgcttaaactcaggaggtagaggttgcatgagttgagattgtgccactgcactccagcctgggcggtagagtgagactccatctcaaaaaccccaaaacctggcattatcaactgcagagtcaacctgtataattttaacaaaacagagcagtatttctgttctcaattttcagagttggcaggaagatcagtattcaaacactgcagcaagtcacacagtgttattccttgtcactcagaaagcctctctccagcaccaaggcctgactgagcctgcgtctcttctcttacaggcatgacagcaagcgctgtggcggctttgatcctcatgacgtcctccatcatgtcggtcgtggggtccctgtacctggcctacattctgtactttgtgctgaaggagttctgcatcatctgcatcgtcacgtacgtgctgaacttccttcttctcattatcaactacaaacgactagtttacttgaacgaggcctggaagcggcagctgcaacccaagcaggactgacgcccgacagactccaccctaacagtctcaagcccctttccattcagtttattttgcagcaggtttttattattattattattattattattcacaacagacactttccctaagaatctcaaactgatttttaaaaatccggtaaattagaaggggccctcgctattttctgtgtcagtcttcattttaaatatggatacaaaaaggatacgccgagccaatcaaagacaagctttaactttactttgaagtgtttctgaaatgataaaatgtagccctagccccctgccctcaattgtaaagtgagcaaccattgctagtaattctttaatgtgtataaattcaatttcaggtataacaaatgtgatcatgacatgaaaatattctagaatagatactgtattaaatattgccatgtttacaatatgtaatatgtttttagccgatggatttaaacatgtagattcaactagaatccatttgtgatatttgtaaataaaggtagaaatattagatccatttctgcagaacttactgtacagtttagttggagtgtagcactgaagaactgtcagctcagcgttgactgaggagatagtgaaaatagcctatacacagcatcttgtgaaaagtactggcagccgtggttgcagcaaataatagggcaaaaaaaataataatagggtggtcggttccctttcatctccctcttctgaaaggaaaaaattgaattggaacgttcaagtccagtttgtgttcagtcataaaactgggccagttgttaaccttacagaatgagtcatgtggccagaccttcaagtccaaggccttcagacactaaggatgggaaaatgggtatttttctttggagaaaagctggaaatataaacatggcatttttaggtaaagtttcttccactagttgaattttcatgcagatatttttccttaacgttggtgccagtcaagcaaagagtattatgatggaaaagaccagtccaagccccatcgctccggagtgggagccagtgttcttgctaattgtttctttctgcactaaccactcagatgtctaatttaattgttttgcagtcaaatactggatttgtaaccttcagggctgacatgctgcccagtttgcttcatcgggagaatagcaacaggtagacacatctcaaggctaaatctgctcatgtcgccactgctctcataatgacacacatgcagtaagaagacttttgtaaggggatttgagtacacccaaatgaaattgtgacaggatgtttgtatggttaacatctgatatcagaatgttaaaagtgccttctgtcttaaatctcaaaccaaatattttgtgtgttgaccttgggcagaagaagtgtccttccctcctttcttcaccgtcaggtagaaaacctgcactctgcagaagggtcctgtgtgatcacttaatcctctggttgagaagcagcagtaatgtttttgcttccaacctgattaatcattttatgttgaaaatagtcaatgagaccagtatctcttgagtgctttatttgccttctctttgaagggaggggacgggctctgctctgtaaactcaaatgtgtagagtcagcaacaattccgtagcttccaactgactcagaattgatgcaacgtaggtcttctggcccgaggcaggtatcaagtccaaatcataatgaacttttcaccagtttcaaccagtttcttaaaagagagcttaagtcaagatttcatcaagacttgtgttttcccatgaatgtgaatctttcaatggctgttggagtatgtatgtactgttcttgcattctgaagtagttaaagaactctagaaagtactgattggccatctggtgtctatggagaaagaagtcctcacgtttgagggctgtacagtgaggccatcttgtagcagcgcatccagctctaccaaggcagtcctctggttcttttttctaagctacagtggaaatggcctaatggttaaaactgtggtatacatgacatcggttgtgctaaacaagttcctcgtgtcccaatatccaatggtttttcatcctattttgtatcaatcaacagagtatagttaaagcttgtcttgatgttgcattcttgcaaatgtcttcaactcttacctgagaaaacatggcaaaatggtcagccagacccttccagtttttcctttgcttttctaagcctcggggaaaccactgtttcagttgtataaaaacttttgccacattcctatggcccagtcgaattaataccctttttctcactgagagaggaacacgtactgcctgtcataacagcattgtaatgccagtgtctcagtaacagaatcctggtgggtgttaattgggtgttttttgccctggagaattcagattcctttctatacctccgattctgcccagaagagggggggaatcaccagtgttacaaaattagaagattgttttgcctgttttagactgaatattt

SEQ ID NO: 11572 - DNA, 6000 bp, Homo sapiens
tgacacacaatacctaggcactgagcacagtcagcacagcttggtctctccctgtttacttatctcccgtgtaagctccccaccactgctacactgtgaattcttgaagcggggaggtagattcatgtctttttgtttcctcctttaaaaaatctgtagctgggcgcggtggctcactcctgtaatcccagcactttgggaggctgaggtgggcaaatcacctgaggtcaggagttcaagaccagcctgaccaacatggagaaaccctgtctctataaaaaaaaaaaaatacaaaaattagcctggtgtggtggcatgtgcctgtaatctcagccactcgggatgctgagacagaagaatcgcttgaacctgggaggcggaggttgtggtgagccgagatcatgccattgcactccagcctgggcgacaagagagaaactccgtccaaaaaacaaaacaaaacaaaataaaaaacaccctgcaggtaggaggccataatcctaagaggattaacgcaggaacagaaaaccaattactgcatgttttcacttataagcgggcactagacattgagtatgtgtggacatcaagatggggacaatggacactggggctactacaaggggggtgggggggaaatggattgaaaaactaccagccgggcacagtggctcactcttgtaatctcagcactttgggaggccgaggcaggcagatcacctgaggtcagaagttcgagacctgcctggccaacatggcgaaatcccatctctattaaaaatgcaaaaattagccaggcgtggtggccctgcctgtaatcccagctacttgggaggctgaggcaggagaatcggttgaacccaggaggtggaggttgcagtgaacccagatcgtgccactgcactccagcctgggcaacggcaagacttctctcaaaaaaaaaaaaaaaagaaagaaagaaagaaagaaaactacctattggttctattggttactatgctcattagtacctgggtgacagaatccgtaccccaaaccttagcatcacacaatatactcatgtaacaaacctgcacgtataccctctgtgtctaaaatgaaagttgaaattataacaaccaaaactccagtatcttttgcaatgctcagggttttatgagagtgaaggctttgcctcgcgaattctagcaagagtaaatgagttggccaaacctctgtagagagatgagtccctggtttcccttggcgaaactccaagtattttaactcctgttatggactcagatgagatgcgatacatttttaacagacaaacaaaggggacagagtcatgtcaaaggcatatgttatttgaaccatggttgagtgaaaaatgtatttgaaataaaaaatccttgcacagaaataccattggtctctttcctttcagtttgctcaaccaaccaaccaaagaaactcttttgataaagcttttgtagttaaactgagttttatgactgggaatggttttgggtgccatccaagataaatttcttcttttaaagtcaagaacagatttattctttggtgaccgaaatgggactggaacccagaccttatggcgagcagaccacacagccactgaagtgtagttttgttggtttcagaagcagctggtatataataaacgtttagttgattatgtttttgcatatataacatgctaggcaggtccttaaacttttagggtcattgactatgttgagaatctgatgaaacttacaggtcttttccccagaaaaatgtctatgtaacatgcagatacactttttcatctgattgagagctattcatgaactcctgaagtctagctagggtgtctctagggagaggagctggctagggacatggaatagagcttttcagtagaatcgaaggcccaggtaaggttagacaccaccaattggaaatgcctgcaggctttgagatgatgtggtttttccctgggtacacttgctcttgcctttgtccttgggttgagaaagaagaaggtgaaattgattcagagttggggattgctaggctggggcagtggaaaaatatgatatacatgtgcatgatccttaatagcaggccctattaggaatgtgtttgaaataaatgactaaccatgaactccagaaagaggagggaaggaactccagaggggatagagaggcatggacacctgggaaggagaaggaagttgttggctggagaatatgtttgtttggagttgagaatgggagaggtaaaaagctagggaacagtaataacaggctgggattttagtgcaggattgcaggagtggaaggctcctctgtgaatacagggttcaggatgaggccatgacagtgggtcactcattgagtagtgtccagtgtcatttttgaacacagaagctgcccagaatgcgtgcaggagctgagaggaggctcctggaggatgcatgataaagccaaaagttaatttgcatcagggacctctctggctttagagaaagcacagaaatctctctgaaattgaaatttgcctggaaacttctcgattactctgaggctgtttcctctactttgtttcctgtcttccactcccaaatatgcacacgcttgagagtcagcctcaagcacatacttagagccacttactgcttctcgggcaccctagcccaatgcctcagcctccctggcttcagtcctgcggctgagtgaatgttcaaaaattatttttgcagaagcttccattgattgtgctagctccatctgtagtgtggttataataacacccaactcaactggatactccatgagatgctcagtaacccaagtttcttcccacacagcctctctcttgcctaacatgtgtggctaaaaatcatcccttgggcctttttaactgttttgtgtccactttcaggtagattttacaaagcatgcgccctgaggacccgattgcacccaggcagagaattccaagggaatgaaataaaaagactatttttttgcatatacatttctatgttaaaaatcaaaacttaaaataatacacaggcaaaaacaaaacaagaaaccaagccccagaaaaaaccaaaacaaccgcaaaaacaaaaacaaaaactttaatgagatcaaaatgatgaggggaaaacgatcagctccatttagctttgctgcccgatttttattagttggcggcctgatttctattttagacccaaggaattaaatggatcaaccggggtgggggggcgttgaattccagtatttcgagttcctgggttttgggaagaggaagaggtagtggaaaaccaggagccaaatgaatatgcttcttataataaaatttgaacagagcagcgggtgggcctagaagcagtgactggggaggttagaattcttgcacgcagagaacccccccaagcccgctcacgcccggcctggctccgaaggtctcagaatccgagcctccaggccagattttccctctagccattcctggccacgcagcgcggagccgcgagcacacagaaaaggatgtcttcatcgccaaccgggatggaacgaacccgcccgctcagggagtactgagaactaaagggtccctccagcgccggccgcagccagcatgccttgactgcctccatcccgcgcggtccccactctccagaagcccccgccctgcccgggtgcgcgcgcgcacgagtcggcgaaccggggagctgtgcgctcggcagcctgcgggcggcggcggcggccgccgacagcctctcggggacagggtggcgaagagcggcggaggaggagctggcgccgccgccgctcccctcgggccgcgccccgccctccgccgccacctgcgcgtcccctccgggctcctcagctccggggctgtgtggctctcggtgccgcagcggcggtgtcaccgcgtccgccaattgggagactcggcgttttggctcccgggggcgcgggacgagccgcgcggccggatctggcgagcggagggtgattcggcacgcgtacctccccgccgcgctgcccgcgacgttttgggagggggtagagaactgctgtgacttttgaggtccgactccttccggccagcctcgcgacgcgccagctccgagacaggccggtgtgccctgaaggccccgaaggctctcggcgcggtttgggggcttggaacgtgtccgggagccggcggcgctgtgagcgctggtgagtttgccggcggggtggggtggactccgcgcggggggcggagaggacgtagcgctcggcccggcgcccgccccctagtgctgcccccactttgagagtaattgagacttgagcgtgactgcggagcctggaggatgcgggctccccgagcgggcttcccctctgcccggcgcgatggagcgggtcggtgagcggaacaaaggcgcctgcccgggggagcgggtcttccgctgaagagcgcgggtggcgcgccgcgacggccgcctgcgggccaaggtgggaggctgtgcggccccaggcgcggcgcgctccgccgtgggcgggcggcgatccctgagtccggcacctgtgcgccgctccctctgtgcctcccgggcagccccgcctgccggcctcggagtccgcggcgccggcggctagaggtccagaggcgaaccacttgctggtgcagaagagaaaccctcaaatccctggcctttcgcggagacgcctggacggggccgtgcgccgtggactgagcaggcgtctcggggagcacttctgcagagcgaggacttccatgtgagcgattccgttctccccaccaccaatccgacctcccagccgtctccgccgcccgagcatccttgaggtgggacgagcaggggcttggatccctgccggccgtctggtgtgtgaggcttgcacggcccctggctgccccgcgcctcgccggagcccgagggggcgcaggtccggggcgagggccggccgggctgtttgatggcttcactgagaagagtcaaagtgctgttggtgttgaacttgatcgcggtagccggcttcgtgctcttcctggccaagtgccggcccatcgcggtgcgcagcggagacgccttccacgagatccggccgcgcgccgaggtggccaacctcagcgcgcacagcgccagccccatccaggatgcggtcctgaagcgcctgtcgctgctggaggacatcgtgtaccggcagctgaatggtaaggacgcacgccggcgcctccggggctcgacgcgggcgggccgggcacagggtgagccccagggtccttgcgcgctgcgccctgtgcctgggagccggcacaccctggctcccgcgcgctccttcttacccttcctgccccgtttcgggcagatggccggggctgctggaaagaacaacttgcctgattcttttctgtgccccacctgcaaatttggttttatcctggaaacatgtcagtacagttggctcccggtccccgcgtgcggactggaaatcattccctggcgactccagcccgagcgcagaaactagtggaggggccacatgggactggaggcgcgcgggcagacgtgtaggaggaaatagtcttagagcccagcgtttggtggggtaccagtagggaacctgggagattggagggcttggatgtctgcagacaaagtcaaggccccaggtcgcggagctaatgcgcttaggtagtatatgggaggaatatgtcatctgtctatgaggcgagctgctcagctaagaatgaggactcctcccttcctgccgcctgtgtttctccttgggggctgcggaggggcgattgttaaagctcagggtgggcctgcgaagtttccagaatgtagcacagagagatgtggcatcccattagtgacagttgtctgaatctgtcccatctaaaatgttgtgctcagtacttcaggagaagagggagactttttatgtgctcttgtcacacctgggccaggtc

SEQ ID NO: 11573 - DNA, 6000 bp, Homo sapiens
cccaggctggagtggagtggcgcaatctcggctcactgcaagctccacctcctgggttcacgccattctcctgcctcagcctcccgagtagctgggactacaggcaccagtcaccatcaccacgcccagctgattttttgtatttttagtagagacggggtttcaccatgttagccaggatggtcttgatctcctgacctcatgatccgcccgccttggcctcccaaagtgctgggattacaggcgtgagccaccgtgcccagccaattttttattcctatatacattttcttgagctttgttttgggatgtatttaagatcattggaaagttggatcctttcaggtcttgtttttatgattcattaggtgggtccagagcagtgctcaatctaagactgattctttcccattcctgcggtgcttgagtactccacacagagccctataaattgtgagtttttccagtctgacttgtggtggcccccatctctacaaaaattaaagaggctgggcacagtggctcatgcctgtaatcctagcaggtctttgagaggccgaggtgggcagatcacctgaggtcagcagtttgagaccagcctggccaacatggtgaaacccagtctctactaaaaatacaaaaaagtagccgagtgtggtggcgggtgcctgtaataccagctactctgctgaggctcaggcaggagaatcgcttgaacctgggaggcggaggttgcagtgagccgagatcgcgccactgcactccaacctgggcaacgagcaacaggccatctcaaaaaataaaaatcagtaaataaataaagaaaagactacctcatccagaaatgcctttatagacacacccataaataaatgttcaaccaagtatctgtgcaccccatggtcccttcaagttgacacttgaaattacccatcactccagccttcagccgtgggtttgtttcatatatagatttctagaactccctctttgcatagtgccctcctttcttttttctgccccatttctctgccatttcagccatctcagcctgatctctgcctcctcagcccggtgggatctccctactgtgctcagactccagctctctgcactgcagttgggaaattatccccaggtagaggaactaggtgactttggggctcatctcacaagtttccttacacttagggatcagtcttttgcttcctgttgtcctctgcctgaaagtagttgccaagttgtactgttttatatatccacaacagcatgcgttaaaccaaagtctggatcagcagactgccagatttttttaacagctttattaatcaatacattttgtccatgtctacagttgtttatggtaggaggactaacctatagctggaaagattaattttcagctgctttatagtattttattatatgaattataccagtttgcccatccttgtgttgataaacattacccatgaagtgtgttcgaattgtctgtgatacaaataatgcttcagtgactatctacccagaatgggattgtgggtttataggatacatacttcttcacccttattttttactagatattgccaaattgctttccaaattgtgctgtttcatatatccacaacggcatgagttctgtttgttccacatccataccaagacttgatcttgttaaattaatttttctagtgtgtaaatgagtgcaaaatcctgttactttagtctttactagattactagtgaggttaaatgtatatgtgtatgtatatatatgcacatatgtgtatattattaggtatttgtgtttcccattcaatagcttttttgtatcaattgtcctttttaaaaattgggttatctttttgttattgattctttggagttctttttaaattctacttactaatccccttttggttatatgtattagagttgtttttcccagtcttggcttgtcttttagatgcatatcttgtcttttcccgtatagaagtattaactttttttggggggatggagtctcactctgttgcccaggctggagtgcagtggtgcgatctcggctcactgcaacctctgccttctgggttcaagcgattctccagcctcagcctcctgagtagttggtactacaggcacgtggcaccaggcaaatttttgtgttttttttttttttatcagagactgggttctatcatgttgcctaggctggtctcgaactcctgagctcaaagcgatccgcccaccttggcctccaaatgtgctagattatgtgtaagccaccatgcccggcccagaagtgctaacttttaatgtagtcatatttatctatattttcctaaatgatttgtgccctttgtgtgttcatctcttgaactctaaacacaggagtgccccgagggctcaggctatggacctctctatttacattaattctcagtcatcttgcttggtttcaggacatctgtaccctgacggcttttatgtgtagctcctccacttaactccagccacacacaatagtttaaagagcccctactgacctagacactatgtttcttcttcccctgttacccaggtttcttgagtagggagtctgcagtcactgcctccatttcttcaccttccagtcactgttcaacccagggcagcctggcttttgtcccactagtctactgatactgagatttttttcttaagcaacacagctcccccccaaccccccccccctttttttttcaagttaagtcttatgtgaaatcgcagtatattaaatagaagcagaattgctttgggactgggttggggaggatctggaacccaaactgcactttcttctcatctctctgtgttgccccagaggcatctatacctttccaacttttctatccccctaaacaccctaatctccagcgatactgaacaattccatctctggacttctgcacagtgctccttcatctgccttgaacctgccagacctctcagctccaggagcacttccctgtctaccttcccctttatcataacttttttttttgagacggagtcttgctctgtcgacagcccaggctggagtgtgcagtggcacgatctcggctcactgcaacctccacctcccaggttcaagcaattctcctgcctcagcctcccgagtagctgggactacaggcaggcgccaccacgcccggctaattttttttttttttttttttttttttttgagacggagtctcgctctgtcgcccaggctggagtgcagtggcgggatctcggctcactgcaagctccgcctcccgggttcacgccattctcctgcctcagcctcccaagtagctgggactacaggcgcccgccactacgcccggctaattttttgtatttttagtagagacggagtttcaccatattggtcaggctggtctcaaactcctgacctcagatgatccgcccacctcggccttccaaagtgctggaattcaggcacgagccaccgcgcctggccttcttatttttttttcctgttatcacactgataacactgaattgcaatttttttttctttttttgagacggagtctcggtctgtcgcccaggttggagtgcagtggcgcaatctcggctcactgcaacctccgcctcccgagttcacgccattctcctgcctcagcctcccaagttgctgggactacaggcggcacgcccggctaagtttttttttttttggtatttttattagagacggggtttcaccatgttagccaggatggtctcgatctcctgaccttgtgatccgcccaccccggcctcccaaagtgctgggattacaggcgtgagccaccgcgcccggcctgaattgcaatcttctacttacacatcttcctaactaaacagtttctaaagatcagagatcctatattttcccccttaatctctttaatgtacataaacaatggaatgaataaatcaatgaatgaatggctgaggaaactgaactacaccaaagtgtattggcagactaccagactttttaaacagctttattaagatataattcacataccatgcaaatcatagggtggtgcaatcaccaccacaatctaattttaaactatctttatggtgctacaaaaaagcctataaccatgaccagtcactttctattccccacccccaaacccactccctagccctaggcaaccactaatctaccttctcagaccgttaactttagcataggtataagtcgatcacagagccacaaaatccacccgatatctgggccatgatgtgaaatttggtaggtaatcgtcccacgttttcaatttgtaacatagaaatggaggggggagggactcacaaccgctagtagcgtttgtgaaaagtacctggtaacaggctgtgctggaggggaattcagcccccataaaagatcacggattaggaattacgtaagcataggtctcgggcccttttatcttggacgcgatccttccacgggatcgcctccggatggatgtggcgctgggagccacgcggaaaacctcaagagtcagaaacaggcgttaaaggcaggcggcattttccaaaccagttgggtctcgggcgctgccgggcggtagcgtctcccggagtcgcgcgcgcatgacgtagagggcgcgcgatgacgcgacgcgcggcgcggtgcacgctgggatatttaagtctcctccgcggcgcggagccgcgatgtctccggcggctgcggcggctggagcaggcgagcggcggcggcccatagcgagtgtcagggacggccggggccggggctgcggcgggccggccagggcggtgctcctgggcctgtcgctggttggcctcttactgtacctcgtgccggctgcggctgcactggcctggctgaccgtgggggctaccgcggcctggtggggactgagccgcgagccccgaggttcgcgccccttgtcctccttcgttcggaaggcgcgtcatcggcgccccttgtcctccttcgttcggaaggcgcgtcatcggcgaacactgttcgcttcgcctctggccaagtcgacagccaacggaaacctcctagagccgcggaccctgctcgaaggacctgaccctgcggaactgctactcatgggcagttacctgggcaagcccgggccgccgcagcccgccgccgctccggagggccaggacctgcgggataggcctggccgccgcccacctgcccgcccggcgccgcgctccccaccgccgcgctccccaccgccgcgctcccccccgccctccccgccgacccatcgcgctcaccacgtttacccctctctgcccactcctcttctccgaccctccaggaggccttccccacggtaagatgcgctgattttgtcagatcatcctctggctcggctggcttgaaatcgaggacttgacttttaaatccgatttgctttttcatcaagtcccaaggggattgtgtgtggttttgccctccttaacaccttggtgtgtgccagctgtctcctggcctctgactcttggaatgagatgttgtgttgccaaaacgattctcttctttccagttctaaaaactcctcgaattttagtgcagcctagatgtagtctagatttagattttccctctcaaactgttgaaatccattgttgagacagctgttaagcagctgtcactctctggccttagatggaataagggaaagttgccataaaaacaccgtgttctgtgttgcttagaaagagacttaagttctttggaaaatgtctgaactggtgggtttttaaccgtttaaaaatttgacattcttttttgctttggttccgtgatttgtctcgcattctctgcagggattgtgggactttaccaaatcggtttgtaataacacctagaagacgctatccgatccatcaggcccagtattcctgtctgggggtacttcccaccgtgtgctggaatggttatcacaagaaggc

SEQ ID NO: 11574 - DNA, 6000 bp, Homo sapiens
tggtgctgatgatcccggattccttggttttgtccctggctctgtcactgctgactcatgggctgccgacctaggagtctcctggtcagcgtgcgggtttctctcagcctcttggtgtgtcacagaagcagacagcttctctgtaaaccgtcatcctcaggggtgtgcccggcttctgggttctgtgttctggcatcctccgatattccaagaggaagcaggataggacgatcccagctccttgctctgcctactggtgacaagacctgtcctggcctgggaccaggggggcttctctgggagtcctggttggtcctgagacagggacaccctcccagtgaagccctacctcctctgtcctccatcacccagcccacagcaaggccaccctcctgactctccctccaattaacccaagctcctgggttgcgcccttgaggcccacaccgatgctcccaacttactttccagccctattccctcacctgtctggcttccgactcctcaagttgagttttccacagatacttcctccccacacacacacccgtttttgtccctgctactctccttttgcgagagctctctcctcttcataggtctctaagcttttactcacccttcaggtctcctctccacctgccacctcctccaggaatcctgcctggtgtgccccaggtagagttgatttttcactctccagtgctcacacagagcttgttttccctgcgtgggagctgtttatttaaattcaggctggcctgattacaccctgatgagctccatgccagccctgggcctggcccagtgcgctcagcatgtccttccagaaagaatgaaggaataaaaaaagacgaagagtaataaataggagagtaggggtagaggatgagccccagaatcagacattaggcagggtgtggataccagtcttgccattattctggtggccctggaatgtcacatcagttcccagagccttagttttctcatctctaagatgggaatgggctaggcatggtcacacctgcaatcccagcactttggaaggctgaggcaggaggatcacttcttgaggccaggagttcgagaccagcctgggcatcatcgggagaacctgtctctacaaaaaaataagaagttagctgggtgtggtggtgcacacctgtagtcccagctacaccagaggctgaaggtggaggttttcttgagcccaggagtttgaggcttcagtgagctacgactgtgccactgcactgtagcctgggtgacagagcgagacttcatgtcttaaaaacaaaaacaagagaacaacaatgatgcccctgcactgttttgcagtgagataaaatgacttcctgttattcaatgttatccgaaggcatttaggttagtgcctggccccgaagcaggtgctcaaaacatggtttactggctggcttgctccctgagaggccagggcagaggtgcctggcaggaggaggctgccctgaatggggagagggaggggtggggctggagaggattgactcctccatcagattagagggtcttcaggaattccaccgcccttaggtcctcttcctccctcgcctctgggaaattggagtaaaatccagtagagacaggactgccctgaagtgaggaggcgggagccggagggagtcggggaggtgggtgggaaggagggtttatggacctccctgtgaagtgggggaatggcctgtgaagggctggacagctgggtaggatggtgggaatgctgaaggtcacggtaaatacgggcttgctaattatttatttattagagatgaggtcttgctctgtcacccaggttggagtgcagtggcatgatcatggctcgctgtagcctccaactcctgggtttaagtgatcttcctgcctcagcctcccgaatagctgggatttacaggtgtatgcgaccatgcctggctaattaaaaaaaaaaatttgtttttgaaaaagggtctcactatgttgcccaggtaggtcttgaattcctggcctcaagtaatcctcctgcctcagcctcccaaagtgctgggattacaggcatgagccaccatgcctggccaggtgttttgaaactgacagacataaactgaaatcgatgcaccgatttggggtaaagtaatttaacaacggtcctctaagtcctgtcccctgtgtaagcctcctccccttcacacagtcatctcttctgagtctctctaactaagctctctcaccgagtcccctccctttgctcagcccctctccccatccttgccaccagaagtgccagaccctgggactccagccaggaggcatcagtatggtctttcttctcttccttagaagaaaccccagaggtggccaccgcccccacccacggcccacgtggtgcccaacctgggggcagcacccgctcagccagtctcgccagactggtcagccaggcctgccatcacccagcaccaggccgagggggtggatggtccgctggtgtgggcggtcaggctgagggccagggactctcctgttcagcctggtgccaggactccaatctgagctcaaggacttcagaaagaaataggatcttgttgcctaaagaaagaaaaaaattccatcctttactattttttattttttgagttggagtctcactctgcctcccaggctggagtgcagtggcgtgatctcggctcactgcaagctccgcctcccaggttcacgctgttctcctgcctcagcctcccaagtagctgggactacaggtgcccaccaccatgcccgactaattttttgtattttgagtagagatggggtttcaccatgttagccaggatggtctcaatctcctgacctcgtgatccgcccacctccgcctcccaaagtgctgggattacaggcgtgagccaccgtgcccggcctactgttttttattttttaagagacaggatcttggtctgtcgctcaggctggagtgcagtggtgtgatctcagctcactgcaacctctgcctcctgggttcaagcgattctcccacctcagtctcccgagcagctcccgaccacaggcacacgccaccatgcccagctaatttttagtatagacggggtttcaccatgttggccaggctggtctagaactcttggcccaagtgatccttccacctcagcttcctaaagtgctgggattacaggtgtgagccactgtgtccgccctaggaatcaatttaatatacactggcttccctggctttagtcttcctgttcccagaagacgtggagtacgggctctgggagctagactgctcagctcacagagatctttttggctgcaggacagtggtccatcactggccctggggctcagatgccagcgggagcttggggttagaagggagactttgtttttgcccctttgctagggactcccagggagctgaactcagggcaagctgcatgtgtgtgtgttacaactggggacttggggccaggcggggtagctcacgcctgcaatcccagcattttgggaggctgaggagggcagatcacttgaggctagaagttcgggaccagcctggccaacatgctgaaaccctgtctctactaaaactacaaaaattagctgggcgtagtggcgagcacctgtagttccagctactcgggaggctgaggcaggagaatcgcttgaacctgggaggcagaggttgcagtgaaccgagattgcaccactgcactatagcctgggtgacagcgacattccgtctcaaaaaaagagaacaaaacaaaacaaaacaaaacaactggggacttggccaagcccctggaactctggggacaggggtctgaaaagtcctagctcccacctgttatgatcaggatccgaactgcgcagcagctgctttgcgtacggaactttgctccctcctcttgttattaaactttttggctcacaaagcatttttacttccttctctcatttcatgtgtatctcagactggggagtgggccccagtgttctcattgtacaaaggaggaagttggggctcagagatggaattggcttctccaaggtcacagggctggtaggatggcttatggatacacagcttcccagcttttgtcctgagctttttggctcatgaagcattttcacatccccatctcatttcacgtctgtttttgtttttgatcctggagggggtgcaacatcctcatttttacaaaggaggaagctgtggctcagagatggttcctgggctggaaagatggtttatggggtgggcagagatgggtgagctgatctggtggtttttatccttgatagaaaccagcaggtgtggccaggcgcagtggctcacgcctgcaatcccagcactttgggaggccgaggcgggcagatcatctgaggctggaagtttgagaccagcctggccaacatgctgaaaccctgtctctactaaaactacaaaaattagctgggcgtagtggtgtgcgcctgtactcccagctactcgggaggttaagccatgagaattgcttgaacccgggaagtggagactgcagtgagcagagatcgtgttgtctcaaaacaaaaaacaaacaacaaaaacaacaaaaaacaacaacaaaaaacaaaaaaaagcacgtgatccaattctgtcagcacaaaatcacacagtgcatgttataaagaagaaaaagaaaataaatgagtgccaaccctgtactctctgaccccaaaaccaaggtgatgaatggcagatgtcttataaggtgttcctgtaaaagatcttcgggctttgggaagagggccagatgcaggcctagaggtaaatttccttgttttcctctgccttagggctatgggagctggagcggagaggagagaagcaccttgcctttgctggtgtttttcccgcagcaggtgggtgggactgagccaacggtctcttggcatcaacaaagcatcaacaaatctctctccagctccacttgtgctgagctactggctgatccccaaggacatccttctggcctctccttcacacctgggtcccctagccctgcgtgagctctgtgcttcttcccctgccctgtgtctgctctatgcctggagcctctgtacctgccctctcctcaacccccaacccctccctgctctcagctcccgatacgcgtggctatgcctgggagggaaggacagcttcttagggccacaggtggactgttgtagggcttgcatgctcccctcccccatgcctgcttctccaagtggcacttggctgtgtcccaggaaagcaagggcaggaagtggcagggcgggggccgggggccgggggggcaggaggcgggcggggggttggggggggcaggttctggccatctggccaagtcacgtgtctactcagaaagcttgttaaaggctacctggctgggaccacaggtaagaggcacctggggaaggaggcacccatgctggagtgcccacccgtcctgggcaaggccctggccttctctgggcttcagtgtactcctttgagccaaggcaataaaagtccctgccctgctgactggcaggaggctgtgatgaggtcatctccaggaaagcacttatcgccaatcatgatgttacttatctctggtgttattcagcccataggctctgtgtgtagagggagccttgtaaagaaagccccagggaggcgtggtctgggcagaaaccatctctgtttgctttggtgtgtgtgcctatgatgggggtcaaggtataggagtgtgatttgaaactggagaatgcttcgttctttccatcatcaaacatgtctttttttttctttttttttagatggagtctcgctctatcacccaggctggagtgcaatggcgcgatcttggctcaccgcaacctccatctcccaggttaaagcgattctcctgcctcagtctcctgagtagctgtgattacaggcgtgcgccatcacacccagct

SEQ ID NO: 11575 - DNA, 6000 bp, Homo sapiens
ggaaggaagtagggagagagggaaggaaagagggaggaagaaagggaaaggagggaaggaaggagggagagggaaggaaggaaggagggagggagggagaaagggaaagagggagggaaggaaggaggggggaaaggaaggagggagggagaaagggaagagataaagaccagggccagctcttaaccaaagggaaaagggcgaagcaagtctgtagggctcaagaagggaagcctacaacacctagttattgttacctggagacaaatgtgcaacgatctgatcccagctggggtgaacaaagagaaaatagaccagcaacccaacgcgttattggtggcctttggaaagacctgacccccagtcaccagtttagatcccttcccaggggaagtgaaactcctcctttttggttatggggcgagtccccttcattgctccactgccgccttctcatctattccagaaaacatcctgggtatgggctcgctctgtcaccgcaggctggagtgcagtggcgcgatcatagctcctggtgcaccaacacgcccagctaatttttataatttttttgtagagaccgggtcttgccatgttggccaggctggtcttgaactcctgggctcgatcctcctgcctcagcctcccaaagtgctggaattacaggtgtgagccactctgccgggcccccactttatttattgtccctagggtaagagcatgtcaaccttgatgctatcacacaaattatagactgagacgcatatagcattcttgcctgttctggagggctgcctctcattatcttgctggaacatgcatcctcttttcctatgacgggcaagccctgggtctggacaaaacagtgcagagatctacccctctcccagctgtgcaagaccagacttattggctgggtgccgtagctcacgcctgtaatcccaacactttgggaaactgaggcaggtggatcacctgaggtcaggagttcgagaccagcctggccaacatagtgaaacccagtctctactaaaaatacaaatattagctgggtgtggtggtaggtgcctgtgatcccagctactagggaggctgaggcaggagaatcgctggaacccaggaggcagaggcagaggtgagccgagatcatgctactgcactccagcccgggtgacagaatgagactccatctcaaaaaaaaaaaaaaaaaaaaagaccacgcttctgtctgtaagatcgttttgcatatgaggtcctttcacagaccatttccctccagcacctaccagtgcccaggcccgtgaaggaagcagggagctagaacagagcaggtaggctgggtgcgatggctcatgcctgtaatcccagcactttgggaggctaaggtgggaggatcacttgaacccaggcattcaagaacagcctgggcaacacagtgagaccccatcactacaaagttttaaaatgagccaagcacagtggcctgcacctgtagtcccacctacaggcgaggcagaggtggaaggatcacttgagcccgagagttggaggctgcagtgagctatgatcttgccgctgcactccagcataggtgacagagcaagaccctgtcaaaaaaaaacaaaaacaaacaaacaaaaaacaaaaaccagaacagactgggtgcagtgtaatcccggcactctgggaggccgagcaggcagattacttgaatccaggagtttgagaccagcctggccaacatagtgaaaccccgtctgtactaaaagtacaaaaaattagccgggcgtggtggcaggtgtatgtaatcccaactactcaggaggctgaagcaggagaattgcttgaacccgggaggcagagtttgcagtgagccgagatcgccgcaccgctctccagcctgggtgaccaagcaagaccccatctaaaaaaaaaaaatgagaaaaaaagaaagaaaaagaacagcaggtaagtcctgtccaggtgcatagtctggggctggagggaaacagatgcaggtttgttcccattgtgtgaggaggagccagtcagggggtcccagcaaggaagccaggctttggcctctgggttcaaatccagcttcacctctgtgagcctctgtcttcttaccggttaccgtgggaaggaaacgtggtcctgaatccagtgcacttggcattgctggatggaacaagggagggtggcggttgctcgcacaggcacaggtctgggcgtctgatggccctagcttcagtcctagtccggccacagagggaggcagggtgagctcctgacacggacgcctgcagaatctctcagaaccggtctctggagcatgtgctaccctccttgtccacgaggtggcagcagcgggcctagccgctcgtctccgcggccacctctttctggccaggccgggacaccgcggccaaggctaaaagagaaacctagccccaagctgagagtgggaccccagagccagggtcccaggcctagaggcgtccaggactgggggccaaggttctgaaatgccagacatataggaggtgggggaccgtcatgctcttccctggtgtctccagcaggtgggataaacaccgggttcaatgggaccaggcgcggtggcctcacgcctgtaatccctgcactttgggaggctgaggatggaggatcgcttaaggccaggagttcaagaccagcctgggcaacatagtgagaccttgtctctacaaaaaaaaaaaaatacaaaaattagctgggcgtggtggcatgcacctggggttccagctaactctggaggctgaggtgggaggatcgtttgagcctgggaggcagaggttgcagtgagctgagattgcaccactgcactccagcctgagtgaccgggtgagaccccatctcaaaaaaaattttaaaaaaggggaaagaacagcaggtaacctctatccaggtgcacagtctggggctgaagggaaactgttgcaggcttgttcccattgtgtgaggaggagccagtcagggggtcccagtgaggaagccaggctttggggtctgggttcaaattcagcttcacctctggaccgagtgagaccctgtctcaaaaaaaaaaaaaaaaagcaggcgaggaatagagacagagggtcagacagcaagagtcccagaggatgagacagatggacacagagacaaaggatgcgggatgtaggtgggcagggcagggacagagagacccctgcagaggccacgagggcagggcagatggaacaagtgaccaaagacaggtggaggagtggacggcacgagtgtcagaggctgcagacagcgagggcgctaaagggtgggagaaggaaggagagccctgctccaccccagccttgggggtctcatcaccccactgcacagatgaggctcctggcatcggggtgcagagaacggctcatagcacaggcagagggaccacagcccactcctgcccagcggtgctcctgtgcccagccctggggtggacaccgtggctgccatccacacagacatgaggaccgagtgagatagttccctgtggaggccaggatgctctggcacctgaggtcaataaagccacatcccacaagtgggtggactgccttgtgctattgaccattaaacagctgcccaaggccattgagctattaattaaataataattattattattttaaatttttttgttgtgttttttgggtttttttgtttttgttttgtttttttgagatggagtctcgctctgttgtccaggctgtagtgcagtggcacgatcttggctcactgcaaactccgccttctgggctcaagtgattctcctgcctcagcctcccaagtagctgggattacaggcacccaccatcacacccggcaaatttttgtatttttagtagagatggggtttcaccattttggccaggctggtctcaaactcccgacctaaataaggtgatccacctgccttggcctcccaaagtgctgggattacagatgtgagccaccacgcccggcctatttattgtttttacagacagacagggtcttgctgtcccccaggctggagtgcagtggcagagtcacggctcactgcagcctccaactcttgggctcaagaaatcctcccgttttggcctcccaaaacactgggactacaggtgtgtgccaccacacccagctaattaaaaaaatttttttagagatggggtctcgttctgttgtccaggctggtctcaaattcctgttctcaagcgatcctcctgcctcagcctccaaaaatgttaggattgcaggtgcaagccactgcacctggcctctatctccctgtttcttgctctctccccatctgtgtgtgtctctgacagtctgtggctctctgtatctttctgtgtgtctctctgtgtgtgtcttggtccatctcatgcccagctaatttttaaattttttgtagagatggggtttcaccatgttggccaggctggtcttgaactccagacctcaggtgattctcctgcttcagcctcccaaagtgttgggattacaggcatgagccaccgtgcctggcccatgggtatgaatttctgcctgtgtgtgtcttcttctttttttttttttttttgagatgaagtcttgctctgtcacccaggctggagtgcagtggcgctatcttggctcactgcaacctccacctcctgggttcaagcaattctcctgcctcagcctcccgagtagctgggattacaggcacccgccaccacacccagataatttttgtatttttggtagatatggggtttcaccatgttggtcaggctggttttgaacccctgacttcatgacctgcctgccttggcctcccaaagtgctgggattacaggcatgagccaccgcgcccggcccatgggtgtgaatttctgcctgtgtgtgtctttttagcgtatgtgtgtctccatatctgccatctgcaggagcacctcagtttcattatcttgctccctgtctattggagtgtatctctcttcctctctgtgtgactttttgtgtttatgtgtgtgtttagtgtgtgtccatattttcctgttctcttgtgtctctctgctgtgtctctctctttttctttctgttttttgagacggagtctccctctgtcacccaggctggagtgcagtggtgcgatctcggctcactgcaacctctgcttctgaggttcaaacgattctcctgcctcagcctcccgagtagctggaattacagacacatgccaccatgcccagctaattttgtatttttaatagagacggggtttcaccatgttggccaggctggtcttaaactcttgaccttacgtgatccacccgcctcggcctcccaaagtttttggattacaggtgtgagccacctcgcccggtcctatctctctttcttctctttctccctctcactttgtttctcttctctctctctctcccgcctccttcccccgtctcccctcccttccccccaccgccctcttcatagctgagcctgtccggcagtgcggcggatgtacggatgattcagtggctggcaggaagcccgccctgcccgcccgccagtgtcagtggtgttggcatcagcttgggcaggtgtgcgggctcaggatggggcggccgtggtgaggaaccctggactctcaggtaagcctttcccaggggtgcctcagtcctcaggctgtcccccatcccccaggagctcctggccccactgggtggggtgggaagaggcctggatgcctggcgccccctcccgcagccccactctcaccctggcaccaggctctgtggcacttcaggggtcagtttgtttctgggcttctggccactctcttgccctcgccttcccctgtccagcctgtgtagccttgggacatcccagggtggtcccatcattgccagagactggtgaagtaagtggccgagagccaaaacagtggctgccctggcc

SEQ ID NO: 11576 - DNA, 6000 bp, Homo sapiens
cctgaaacagaaggaggccagcgtgacctgcaaggtgtgaggaaggggagcgtagtaagaaatgtgggtggtgggagtgggttctgagggccggatcgtatgggccttatgagctgtgtaaggacttcagggctttgttgttgttgttgttgttgttgttgttgtttttgagacggagtctcactctgtcacccaggctggagtgcagtggcgtgatctcagctcactacaacctctgcctcccaggttcaagcgattctcctgcctcagcctccccaagtagctgggactacaggcacgcgtcaccatgcctggctaatttctgtatttttagtagagatggagtttcgctgtgttggccaggctggtcttgaactcctgacctcgtgatccacccgcctcggcctcccaaagtgatgggattacaggcgtgagccactgtgcctggccactttaggtttttgtacgaagtatgatgtgaagacatctcagggtttgttgttgttgttgttgttgtttgagatggagtctcactctgttctccagcactccaggctggagtctggagtgcagtggtgtgatctcagctcactgcaacctccgcttcctgggttcaaatgattctccagcctcagcctcctgagtagctgggattacaggcatgcgccactgcatccggctgatttttgtatttttagtagagacagggtttcaccatgttggccaggctggtctcaaacgcctgacctcaggtgatccacctgcctcggcctcccaaagtgctgggattacaggtgtgagccaccgtgcccagcccatctcagggttttgatcagggaggggacatgacctgacttacttttttttttttttgagatggaatctcgctctgtcgcccaggctggagtgcagtggcacaatgtcagctcactgcaagctctgccttccgggttcacaccattctcccacctcacctccctcctcctgtttctgggactacaggtgcctgccaccacgcctggctaatttcttgtattttttttttttaagtagagacggggtttcactgtgttagccaggatggtctcgatctcctgacctcgtgatccacccgccttggcctcccaaagtgctgggattacaggcatgggccaccgtgcccggacgatctgacttactttttaaagcatccccctgtctgctgtgtggggaatggcccgtccatcagaattctcttgcggtgattacgtaggtgcagatgtaccgctaacctcactcccagcgtcgtcgatttattaatagaaactgccatgagttatgcaatcagcttgagtctgcgttgagaaggacttcacatcatgggcattagatctcttctggaaaatgaggggaccggtcacttggggagttagaagggaggagggtgagggacagggagcgcgagtttcttggctgctgccttgtgatggataacagctagacagctaggggagctcctgtgtcaccatggcactcctgactggttccagtggggccctgactgtctgctgcctcatgactctgtgggacaagtccttccagaatctgtcagagcagatcctaaatgcctctctgtctggttctatgaaaatgtgacaggtggctcataagcttgacagagatcctgatatgactagcattaagtaaatattaaatgtgtttataagattaaatataaatagttttctctggggacaacagaattcactttgtcctttaatgtcatatcaaaaaagctggccaggtgcagtggctcacgcctgtcatcccagcactttgggaggccgaggcaggatcacgaggtcaggagtttgagaccagcctgaccaacatggtgaaactccatctctactaaaaatacagaaaattagccgggtgtggtggcacatgcctgtaatcccagctgctcaggagactgaggcaggagaattgcttgaatccgggaggcagaggttgcagtgagccgagatcgcaccactgcactccagcctgggtgacagagcgaggctctgtcccccggccccccccccccccgaaaaaaaaaaagtcatatcaaaaaagccaagttgaggccaggcacagtggctcacgcctgtaatcccagcactttgggaagccgaagcaggcagatcacctgaggtcaggagttcgagaccagcctggctgacatggtgaaaccccgtctctactaaaaatacaaaattagccaggtgtcgtggcgggcacccgtagtcccaggtaccctggaggctgaggcaagagaatcgcttgaacccaggaggcggaggttgcagtgagtcgagatggtgccattgcactctagccagggtgacagagagagactctatctcaaaaaaataaaataaaaaagaaagaaaaaagctaaattgagatgaactcaagccattggaaaagcagctcagattagtgagaaagcaaagacccaagcttgcgggcctgttctgaatggcctgttcccagcaggttgtgtagcagtagaccgatgcccacaaccctcggatgccctggcttcccagaccagccccatggtttcctggtgacagtgacagccatcagcagtcagctagaacatagtctctcattgcctaattgctgacacatgactaaggctttcctgattgagtctgggtgctctggttgtggtgaaaaacccagtcggtcatatccatgattgcaaaatggaatagtgtgaatttcagggctgagcccagcctccttggtaagcagcagaagctgctgtttcagggactctcacttggacctttgttgactcatgtcacgtctgcctaccaggtgtcgttggtggaaggaccagttgagcatcttatgagggaactaggctggtgacatgggggttcccccacctccctcccggacggggcggctggccgggcggggggctgacccccccacctccctcccggacggggcggctggcggggcagaggggctcctcactgcccagtaggggcggccgggcagaggtgcccctcacctcccggatggggtggctggccgggcggggggctgacccccccacctccctcccggacggggcagctggccgggcggggggctgacccccccacctccctcccggacggggcagctggccgggcggggggctgacccccccacctccctcccggacggggcggctggccgggcggggggctgacccccccacctccctcccggacggggcggctggccgggcggggggctgacccccccacctccctcccggatggggcggctggccgggcaaaggggctcctcacttcccagtaggggcggctgggcagaggcgcccctcacctcccggacggggcagctggccgggcggggggctgacccccccacctccctcccggacggagcggctggccgggcgggggctgacccccacctccctcccggacggggtggctgctgggcggagacgctcctcacttcccagatggggtggctgctggacggaggggctcctcacttctcagacggggcggttgccaggcagagggtctcctcacttctcagacggggcggccgggcagagacgctcctcacctcccagatggggtcgcggccgggcagaggcgctcctcacatcccagacggggcggcggggcagaggcgctccccacatctcagacgatgggcggccaggcagagacgctcctcacttcctagatgggatggcggtggagaagaggcgctcctcacttcctagatgggatggcggccgggcagagacgctcctcactttccagactgggcagccaggcagaggggctcctaacatcccagacgatgggcagccaggcagagacgctcctcacttcccagacggggtggcggccgggcagaggctgcaatctcggctctttgggaggccaaggcaggcggctgggaggtggttgtagcgagccgagatcaagccactgcactccagcctgggcaccattgagcactgagggaacgagactccgtctgcaatcccggcacctcgggaggccgaggctggaggatcactcgcggttaggagctggagaccagcccggccaacacagcgaaaccccgtttccaccaaaaaaatacgagaaccagtcaggcgtggcggcgcgcgcctgcaatcgcaggcactcggcaggctgaggcaggagaatcaggcagggaggttgcagtgagccgagatggcagcagtacagtccagcttcggctgggcatcagagggagaccgtggaaagagggagggggagggggagggggagggaccagactttgtctcttaaaaaaaaaaaaaaaagactcccaggcataggaaagcaggcattcaccataaatctcattgttaacaggaactaccttcatagcccaaggttttaggaatacagagacactcttgccagtcaggatagtccaaggctcgtgaatatcaggagccactcaagggccaggcctggagacttggaacatgcagggtttagggcaacccccgccagccacacagctggggaaagggtttgctgcgaaatggtccactcttgcgtgcacttcctcccgcctgccccccgtgcggtgtccttgtgggattagaggatgttccagcacactgagagtcagtggctgtcattttctctgtcttccagggacccagtcccagctgctgccttagcttgcaccccaggaccaccctgggctggtgctgacaccactgggggctgtctgttatgtcagccccagtccaagactgtggctgtcttggcaggaacctggctgagtgagccccttctcctaccccgtgcagtgaccatttcctgcagccccaggggcaaggcccagcatttaggtgggcaccccagccagcctcaggggcaccctgctaccctctgctgacatctgctgtttctgtctcctaacagtttcatgatcaacatgggagactcccacgtggacaccagctccaccgtgtccgaggcggtggccgaagaagtatctcttttcagcatgacggacatgattctgttttcgctcatcgtgggtctcctaacctactggttcctcttcagaaagaaaaaagaagaagtccccgagttcaccaaaattcagacattgtaagtgccgcctctcagcctcctctctctgtccctcttctgtcaccactccaagcagtgtcctgcatgcgggcctcaggctgaaagaagcaaggctccttgtagcattttggggtgactcttgggttttgccttcttgctagattgtgcttgagctctcccttaatcatctcttatgtggggtttataaggcccttttctatctgctgtttatatgaccttcacaggaagcactgcgaaaatgacaccagtttacagattaagaaccgggggctcaagaatgttaacgggcctgccagggtcattagccagcaatagcagcgctagagctggaacccttttttccatttatttatttatttatttatttggagacatggtctcactgtattgcccaggctggagtgcaatggcggtggcacgatcaaggttcactgtaatctccacctcccaggctcaggcagtcttcccacctcagcctcccgagtagctgggactaaaggtgtgcaccactatgcccagctaatttttttttttttttttttgaagcagaatcttgttctttcaaccagtctggagtacagcggtgcgatctcggctcactgcaacctctgcctcccaggctcaagcaattcttctgcctcagcctcctgagtagcttggattacaggtgcccgccaccacgcctggctattttttgtatttttagtagagacagggtctcaccatgttggccaggctggtctcaaactcctgacctcaagtgatccgcccacctcggcctcccaaagtgctgggattacaggtgtgagccgttgcgccc

SEQ ID NO: 11577 - DNA, 6000 bp, Homo sapiens
ctcatagtgtctacggtgtcacttggtgtgttgtaactctccctgccatagccttttgaaagcctcctatgataaccaaactaaacagatacactgacgtttcaatatcactgttcgttcgtgctgacattggattcaattctattcactcattcatttattctttcattcaggaaatatcttttcagcacctgctgtataccaatcatgtagctagatgtgttctcatatgttatccaaagaatgagtgttcatggtaggatacagaatgatttctagaatagctcccatttaaagacttcttcaattaatctcactctcatttcctcacgcaccactaccaccactaaacctgttgatattactttctaaatatgtcttaaatccatcgttttttctccacttttttctgcatcctttttaggccatattaccattacagtcaagcataattgccttactggtttctccacctgaattcttatctctcttcaacccattaaccatgctgctgttggagactttttcttttcaatgtaactcagatccaatcgtgaatctttccagattaaaatacttcaaagacttcttgttgttcctgggataaatccttacaaactactgtgatatctggcccatctctaaaccttctgcatcatctcttattttccctgttctctgtcatccaggggcattggccttctgctttctgctttcagttatttaaacctgctgtgctcttagctgtccctggcaggctcattgcagttgctgctcccttacctttgaatgctttccttaattctttgccagttaaagctgactcatttttagatattggtttatttagctcaatgtacataaagctacattagctaaataaactaatatctaaaaatcttgtatgtatatgtacatgggaatgtatgtatacatatttgtgtgtatatgtgtatgtatgtgtatatgtgtgtatgtgtgtatatacatatatgtacatacgtatatacatacatatgcacacacaaatatatatacatacattcccatatacatatatccatacatatccatatatttacatacatacattatatatccatatacatacacacacatatatatatatgcgtgcatctattagggaagcctctctgatctctcagtctagcttatcacattgcaacttttttcccttcactaaacaataatatacttgagagcacaaattttggctctttaccactttttccccaaaggagtagcacaaaacatatatgtaaatagaattgcaatatatcttgcttttgaatgaaaaatgattaactggtaacccaaccatcttaaaagggaagaatgctgctttgggactatactgtttcttgcaaattcttgtcaaggcttttataattaatgaagatgacaatagaatggaggaaataaataaggatactaatttagcaataattttaggcttcaaagatttgaaacattactccattaaattattttaatagcatatatttccattaatcttcattatttttgaagaccaaacacagagtaagcattcttccctaaagtcagctttttcaaacatgtataatgttattttacttttaaattggcagataaaattgtgagtatttattgtataaaacatgatgtgttttgaagtatacatagattgtagaatgactaaatctagctagttaacatataaattacctcacatagttatcatgtatgtggtacaaacacttaaaattctctctcttagcattgtttgagaaaacaaatatatatattaaagtcagttgtgagcagcaatggcaataaaaactttaccttaatctgatgtttagaataaggacatttcacatatgctagattagagaaaagcaagttaagctgagaagattaatagtaaacctttgtcatagctctcctgtagaaaaatgctcctaatgaaggatgtgtttgggtgaaattgtttattccatgaaaacaaacaagcaagtaaacaaaaaaccttggtaataagagtgcactaatagaatcacttacaaattagccctcaagtatttttcagagcctgaatttatagtttaggcaagctaataatgatacaagggcattttttcaaatatatttttcctaaacacaaggtagcaaggttaatgtgtaagcatcttgttgaataatactcattgttttcaagtgggcagaggggtttatgccagaatttctctagaaggccacaaactgttccttcccagttgcgtttcagagccaggggttcaaaaacagttcaccattaacttttacacaatggactattaattttaaaagtcctaaacacactcagcattacatacacaaggatgaagtaaatgtcattaataatacttcaagcacattggatgatggcaatggaatagagagaattatctgaaagaggaatagcactcagaagacttcagagaaacaggacatgggaagtgctgggtaggagtgaaaacatgaatcctactactgcctgtatattgatgatgctttgcatatgtacagatgagcttaattacttgttttgagaaaaagatgttcacacagaaatgggaaattctatgatactgtcttgtgaaggacattctggcaacagctggaaacagctactattagcaacaggattgttggttcaactttaatggcttaaagttaggccagacaaccaattggggaaaaaaaaaaagtcctaagtttcaatggacattctgtgatgaaatgttcaggtttgaagacagttggtgaagaaaacttctagggattccctaaatggagggagtcaatggtcttgtctcagtgatttaccacagagccatcgtgctttttagcacaatctaccacaacttttccctctccctcaccacctatccctataagctcatgcccagcagggagtaaacaatttaatgataatgcatatatgattcgtggaaaggaaatacaggatttcctgttcttatgggacataatccatatttgaagataacagtgcttacaatgtcagaggcagtctatgatatttactgtgttcctagaaaatatgcatagctgtgttcactgaatttttaacatgccttcttctttgataaaataatttgtttaaaagttcctagttcaaataatagagaaaccttttacacatagggaacaacatttttttccttaattaaaaagttcacattctacaatatttggaaatatgtgaccctacttttcacgtaaagaccatctgacctaaagggccaactccttgccacctgattgtccctttctctgtcacatatcagacctctgactggctgagaggtagccatcagggctggccttccaggatctggaagatcaaaatctgctcatacaaactggcaaggagaacgtgaaaagcataaatgcaagaaatgagaaatctccgtggctggagtggtggcttatggatcctctctctttttcctgtcttagggacataatgcttctgggaatgtcctggtgtcatagcaatactctttagggaccatttctgtgctttctgtaactttgtttaagcaacaaaaaagcaaaaaagctttggacttgctcaaagggtggctaatctgatacagataaagtgtggatgaaactcatttttagcctgtaactatgttgtaggatggaaaagaaaacttgcttgtgggtcaaaattttgtgggttagactctcaaatgaatcagttattcaccatgtgtccattgtcaaaacttatccttttagttgcagtttcttctctggaaagtgagcctaaaatattaatttgaaagcttattttgggattagaaaaggagagtgaattagatggtatctacgtcgtaaagggtcaggcacgtgagcagtgctcagtacataggacctattattaaaatatgatgaaaatactggttatggtgatttgacaaaacaaccttcttttgtggatagtggttactacttgatacagaatagtttcatttaaagagtggtaactctagtctatcatttccctttaatgtgattctgtaaaagaaattttaattgaaaatatttaactatcaggagagaaatatgacttttccagtttctctgttcacttcgttttagtatagaattagagattcttaacatataaatcctagaaagtaatttagaaatcttgtcattatatcttcagagtaataactttcatcacagggtctgtttgggctgagagtagagctttattcatgtttaccagaagtcccaagcaaaaattttttaaaccaagtacattctacaacccttcaaaaagattcaaaaaacaataatttaaaccaaagaactctggcagtgcatgacattttctgcctcattaaatgaggcaaacaaaaaatgaccaaatgactactgaaaacatagaggagaaaaaatactaagaaagtttacagagactttccagtaacaaaagttactggaacaaaaatctgttttgttgactcaatagtaatcaatattcacttttatgttgttttatgcttaagacaggaaaacctgagccttcctctttactatcagagcaaatggtaatcatgaagtgaagcaaattgattattgattactgattacttgaatttctatgttttataagtagagcaaccatctgttaacaggaataacaggttttagcagggaaaggattaagggttttattttcctcaactgaggcccaaaatgagtgagatttttcaagttaactttcattccatttggctcaggtgtcagggatctatatttaacttgtgttaggcatgcgtccgaagagctggaaggctgaggatgtcaatggctttcagatgtcaggataaccttaaggatagatgaagggttgagagcctgtgcctcatttctgagttctcagctgctatgccgtggaaatcctgtttactttctgcatctgctcctgcaagactctggagccagtcttgaggtcctacatctccgaaagcaagctcttctagaagttggtgagcagaatgctttttgtttagaagtgtggctataaatgtctttgtagttgatgcactctcatctagtaagtaactattatttttgggctctctagaaaggtaattattatctgatataatagtttagtctgtgatgcttcttttaacatatttgtaagttttaaccaaatggttaaagaaatttgctttttaacccttaaacctcacatatccacaagtctctaaattccataggatgctatggatttctagttgcctagttcatgtcttttacttagaaaacgtcagaaaacccaaacttctcgtgacttcaaaaagtgtaattgtacctgaaacttcttttccttcagatttcttatttatgttttctgataggtttttaagattaatcttttcagaaggatgctctaaaaatctggccaatttgattatcctcttccaacttggaaaaaatatgtatttaaaatgagactagaatttgaatgaccttctttcatggaactctgaaaatgttttttggcttgctgtcacaactgacaaatatatttaagaaataacctaaaagaccaatcttaacaatttgactcctagacagaagaaaacaaaaatctttttatacataaaacttactaatcattagtgatcatagaaattttcttgagtgtgggtgccacatgtcttatttgtggggtgggggcagattttgttacatagcagaatttttattatatggtgtgtttcataatatggctacataagatcagacaacaccgccaggaatgacagagtcgttacttatacagaaagtcaacttaagttatgcatatttcgagacacaattaaggttgatacaaaaaaagaaaagcagttccttctgtttctccatgctattctgctattctacaagccctggaaaagaatt

SEQ ID NO: 11578 - DNA, 6000 bp, Homo sapiens
caagaaggaattgtgattgcattaggactttgagtgggttatctgaagacttctgaagcttgaaagaaacgagggaacctttttcctatgtcttcacaactttaatcaaatccttattctccttcatttctcagtctttaactcctgcctgataaatttttatgaacaggtaccttattcactttgcttaacacctaacaataatcacttgatacgtagtaattatacagttgattcaccaccaacactttgagtttacataagacagccgtttctttccacaagtctctataaacacattgggagcaaggtccagttatcagtggtcttggtgtctttccagggcctaacagagtgttttgcatatgctagacactcagcatgatgtaagtacttgctgaatgaatgattgcttcttagtaatagctacttccttgtacagttcttcattaccagtggcccacctttgtgagttactggggtctttgtacagagcccaatactcgtttattcaaataatcctagaatcacttgtgtgccaggcacacaagttgtatgggggagatagacagatgaataagcaaagaccaccagagagctgtatcctagagcttggcatttctagtagctttttccagtgcaaacattctcaaatctgtactagtttccattgctgtactgaggtgtttggttgccacaattaagcaagacagctttttcccaatttgcttgaaaaaaatactgtaattagtctctccctttcataaaattttcttaagaaattgctacttctgataatactgacagaaggtaacataataaatactaaactaatactaatggaaaaacttagaactaaccatgtttaacttgagggctttaaaaatggttacttgtgcttaaactctgatttttatattgtacatttatatatgctatttgtgtatatttgaatatatgtatgtacacataggcatttttttggttagtaaaattattctggctgggcgcagttgctcatgactataatcccagcttgtaatttcagcacttttggaggccaaggcagcaagattgcttgaggccaggagttcgagaccagcctggccaacatggtgaaaccatgtctctaaaagaaagaaaagaagaaagggaataagaattgtgggggtggaaggaggagggctggttcacacctgtaatctcagtactttgggaggctgacgctggtggattgcttgagcccaggagttcgagaccagcctaggcaacatgagaaaaccccgtctctacaaaaaatacaaaaattagctgaacatagtgacgtgtgcttatggtcccagctactcaggaggctgaggtgggaggatcgcttgagcctggaaggtcaaggctgcagtgagccatgattgtgtcattgcactctagcctgggcaacagagtaagacttgtttcaaaaaaaaaagaaagaaaaagaaaaaattattcctatattatatgactagattaaatatacaaataacattgttttctaaagaacattgtgccctcccactggaattcatgcaacaatcacattctaagccagcttcctagcattttggtcataattgtctttctgatcctgaaagcttggaaacacaacttcaccatcccagcagatgtttgattctgcaaaggttgatggaactgtattcagaaataaaaattattctcaaccttgccccttcatcatgctctgaacaaaaaagtaaaccttactgaagtagtctgctctattgcctcatagtaggcattatagaaggcagagaaaatacatttgagtcctgctttgagagtgaatatcagacccttgaggaaattaaagctgaataagatgcaagctttttatagtttgccatatacagaaaaagaacatggccttttaatttggaatgaaaggcctggcgactgtttttcttataatagcattaatagaaataggttgtcgttacttgaaaaatgtttgcattcgtcttatatgaacagtagtagtaataaccaacaagtgctgtagatttccctgaaaatctacatcttgaatcaacaaggaagtaattgggtcatgttgaatcaacaaggaagtaattaagcagaataatttcagggaccattgttctcatcttttcatttgactgactcattggagatgagctcatttactttttataatttcctagtgtgcctagtacataggaatgagatcagtttgttttttcttatttaacattcattcaatgaatgttctttgaactcctgtgatgtgccaagcagtgagctgggtcactgaatgctaagaagtagttaacacttggcatagcatttgttgtgttctagacatgttttaagcacttgacattatattatctcattgaacccatagaacaaccctgcaaggttggcactgttattttttccatttcacagatgaagaaaacgaggcacagggaagttctgaatctggcccaaggtcagtgagctagtaagtgaggagatggggattagaattcaagcaaccttgctaagagttgactctcaaccattcccctgtcctgtactgcttctttccctacacctttgctttttatgagccaccttcacccctgctgcatgagcatttgaggctgaatttgtggtgtttgtagctaactgatgattgatgagtgggcccttgctgtgtgagtgcctgacacatacagagtgcttgatgtatatgtgttgaaagaacgattattgacaaaaagaagattgaaggtgtgattgtaagagactttaacattatcttggttgtttttttaattgtgaagaaaaataccgatggctaaagattttagttgctctatgacccagtcagtaataaccaaatgtgtgtgcacctgtgctctgaggtcacacacacctgcatgtatatacatttgtactgtacagagaggaaacaagggagagactttccctctttgcattgacatttcatcattagatgtgttgccagttggcaccacccttcctgctctgttctgctattgtcccctcatgatttgtcctcttgtgtgtcaccccctagtctgactgacagtactccacaagcttgcctgccatgggctgtcgggatgtccacgcagccacagtcctttccttcctgtgtggaatcgcctcagtagcaggcctctttgcagggactctgcttcccaactggagaaaattacgattgatcacattcaacagaaacgagaagaacctgactgtttacacaggcctgtgggtgaaatgtgcccggtatgacgggagcagtgactgcctgatgtacgacactacttggtactcatcagttgaccagctggacctgcgtgtcctccagtttgccctacccctcagcatgctgatcgccatgggtgccctgctgctctgcctgattggaatgtgcaacactgccttcaggtcctcggtgcccaacatcaaactggccaagtgtctggtcaatagtgcaggttgccacctggtggctgggctgctatttttcctggcaggtactgtgagcctctccccatctatctgggtcatcttttataacatccatctgaacaagaagtttgagccagtcttttcatttgactatgcagtgtatgtcactattgctagtgctgggggcctgtttatgacttcccttatactatttatttggtattgtacatgcaaatctttgccttctcctttctggcaaccattgtactcccatccacccagtatgcatacttactcacagccctattcagcacgctctcgcctctctgccattgaaattgacattccagtagtttcacacaccacttaatggggaaatagttaattgttaaagaaaacttcttgtagcctcacattccccttgtgcaaagagctcttttggacctacatacattttcctttgtttttgaccaatcaatgaagccaaatttatatgtcctagtagaatgaagtgctgctagtttttatgagaagtatattatattaaatgtgaattttttaaattttgcttcttatactggaaggaattttagccttcatattgatatctaattaattatttaagtggaagaggcctgcatcacaattgaggtaatgtagagcaacatgttaaagaatgatggttagcagaagctgttgtatacaatcttcatgaaaatttcagtgtgtatttttctttttctataatacctttaactgcaaagaaaaggcagtttcaaatataagaaatttatttcaggtaagggtaatattttaatagtagtcaataatctagcttaaggctgtaactcttctatcggggctaattgtatgaataggtgtcagtatgttgaagattactttcttttgtgactttcttctacctcatgccactgtttaaaagtaaaacgtattttaacgatgttagaataagactaccattctaaatatcacctacttatgaataacatgtaataatttttaacattaatgattccataaattgtattattgggattagaatgtgctttatgacaggttagtgtttcctctgaggcagaaaactcttttttggagatatcttccatcaagcagtactcgtgcccatatacaatctcttagtggctaggagaaataaataaaagggccataatggtttgttctctttcagacataatttagtaggggacaagaagtctgttcttcagtgagtacactagagatttactctggtgactgccttttgagttatgggtgaagtaaggtatggctttaccataaccttgattcattcacccttgattcatttctcgcccccgtcactgattatttccttgagcatatatctctgcctaacactttagtaggtgctatagaggatacatgaaaagtatgagatctggttccatccagtaagacattttaatagagaagatcaaaatgttacctggcagttggggaataatctgacttcgttggcagttggccttaacttcttaatcattgatccaggaatatttcaaccagagacacaactttctggcagacagacaaattgtacaacaccaacaatatcctggaccttgaaattctgtttacttcagtccattgtatcctttaaggcacctgtgctagcctagattttgtaataacactgatttatgagaatggacaaaagtggtagggaaattgttccctctccacttctgaaagtatgatgatgtattaaggatggaggagttattaaaaatgtctcttctgatgaggtaacaattagatgaaaccatgttaaagctgagatgaacacttagaaattcagggatattgggtctttagccttatgaatttgagctgcttatttaattggtgtaatttactacatattagtactatattcgtaaggattttttattaaccattacagattttacaaacagctagttatatggtaaacagattattatgcctttttgcaattctgaatatgattctagtatttgtgtagatgtatttggtactttttcccctaattccaacactagtttatatatatagcgaataaatctagttgtataaatttttaaatgccgtcagtagaaagcacacaaggttatgatttttttaattactggcttctgatttctttcacttctgatccttttcctttttctcagatgtagctgagtcttgatcattttaagacaacgatgggtagaattttgagattaatgttaattttccctttttgttaatttcagtcccctctcactatgcttttgtccagaaggatcaagaattctaccatcccttgggtctttgtgtataaacaatgttaaataaaggtagactcagtctttaagatattagacagtttttttagtccatgggattgtaaatataaacattaactttcctataagaatattttggctttgtaatctatagcctcaaattggtatt

SEQ ID NO: 11579 - DNA, 6000 bp, Homo sapiens
tatcaaaacttacacatacaaacagactgtatatggggtcattcccagtagagagaaatgtaaacaaacataaaggtgtggtattaaatcataactgcataaaactaatggtggttcatactgttctactgtaataatttcatagccacctcctgttgctattttggtgagctcaggtttgcaagtatctgcttaaaacagtgtgtgatgctacgtccaggggcagtggctcacgcctgtaatcccagcactttgggaggccgaggcaggcagatcacacagtcaggagatggagactatcctggataacacggtgaaaccccgtctctactaaaaatacaaaaattagccgggtttggtggtggcacgcgcctgtagtcccagctactgtggaggctgaggcagaagaatcgcttgaacctgggaggcggaggttgcagtgagccaagatcgcgccattgcactccagcctgggcgacagagggagactccgtctcaaaaaacaaaaacaaaaaacaataaagcactgtgtgatgctaataatctctgcgtgaacagttcatctctccagtaaaccgcatatcccagtaaaaagagatctgtcacagttcttgcatattttttattgcatccagtgcaatacaggaaaccttgaataacaccatgtgaagtgccactagcaatgctggaagcgctcccaagaagcagaaaaaagtcatgacattaaaagaaaaagttaaattgcttgatatataccatagattgaggtctgcacttatggttgccagccatttctgacatacaattcatcttggaaacagatgacataaacttatggcattgataaatatagtacagtactgtaaatatgttttctcttccttatgattttcttaacattttcttttctgtatcttactttatcataagaacacagtatataatacacatacaatatgtgttaatcaactgtttacctaattataaggcttctgatcaatagtgggtgaatcctaagctctacttactgaaatggaaagatcgaggaggcaaaaaaaagagaaagtatagaaaatttgaataatataatcaactgaacaagataatgcagtttttagtttatcctttttgcacagtagttatgtttttggggagtcagaagttatatatgaatttttaactggcatccctaacccttgcattctttaagggtcagctgtatgtgcatttttttccctttttacacagaattttgcctactttgtcagatgtttttctatcaactaagatgctggcttttgtgttgcagaattcattgatttctatttttttattattattattattttggagacagagtctggctctgtcgcccaggatggagggcagtggcgcgctcttggctcactgcaacctccgcctcccaggttcaagcgattctcctgcctcagcctccccagtagctgggactacaggtgcccgccaccacacccggctaattttttgtatttttagtaaagacggggtttcactgtgttagccaggatggtctagaactcctgacatcatgatccacccacctcggcctcccaaagtgctgggattacaggcgtgagccaccacacccggctattattattattttaaaatcaggaatgggtgttgaatttgtcaaatgtttttcagcttatgaacaatggtcatttttttcctccttatatcttatagtatatcattaatactttaaattataaaatataacattttatctggactttcgattgattttctgttctcagtaatcaacaattataaacatttaaaaacattccttatggtttgctttttctctccagatacaaacacattaagtttctctttgatttttttttttttttttgagacggtatctcgctctgtcacccaagctggagtgcagtggcgcaatctcggctcactgcaagttccacctccctgtttcatgccattctcctgcctcagcctcccgtctctggtattttttatgtaacatgtttcagaaattcagaaaaatgctaaagactattatgctttctaaactgactttcagagaatggactttccatgaatgtatttgcttttctaattccttgaacagtatgtttaagcttgaaattttggttttaagactatctgctatcttaccattgcatttcaataattagacataccagataccatttaaaaacgttaaagaattcttttctttttatagttttaatcgtcacacaatgatgtacctaactttgagactccaaggtaaggtgggaaatgaaagacaatttctggtgttgttttgggggaccatgggtagtcgcaatggccagatcaggtttgtacatctctctaggcctctaagcatgtgagagctgtttgggttgaagatgtatcttgtcccagacttttcattgttctcagtaatttagaacttgaaatttgagtaactataatttgaaaactgagccacttgtgcaactgaattcaagactgtaaaaaccttgttttcttatctaatgatgtaaagcagcttccaaatcttttgtcatcagttctccccctccccactcctttctcacttccgtttgagagaaaaatgctttagcattatttgcaagcaagtcttattttcaacattttagtaaagactagagtataatacaaagtgaaaattcagtacactccatacaggtatttcttctcctttaatttatttttcctcatttaccaattctctccatctcttttgacctcaaaattctctatctgcttgccaaaaattgtccctagctgcctccttccatttctagctgtgtgtgaggtagtccacagaagcaatacactgaatagtgcagttgctgtgttgatcatccctatggctataggtggttattatattttgtgtgccctgaaaggcttaggtgatgtgttccatatacaattttaaggcatttaccccacgtttttctaaacaaaaaatttttaaagcaattatttaagagtggatatatgttctctttcactttacaaaaaattttggagggaatctgagagaagtcatggttagagattagtaaagttggaaagtactgcaaattacctaacccagctcatttacaagtgagaaaatctgggcacagagcggttaaatcacttgcagagtaacatataagaaaaagaaacacatgaaggaaggataaaggaaaggtctgcatgaagtgtagtgatctagattggtggccagaaatataagtgtgattttattttcagttcatggctatttttaccacaagaggaacactgatcagcctaaattggtcagggaaacagagaaaagttttgtcctcaaaacatagctcactgtccagcttgttgtaaaaaaaataaaataaaggttaactgtcattattctcactgttattgctttattccacttctcaaggcctaaccacaccactatgtcttggcttctctttcacccatcgtctgccattttgagcattgattctccaatgctttgtggaccctttctactctctttaggctcaattaattcctttattttttaattaattcattggcagaatgttttctcacatttttataagagtgttggctcttgaaagaggtatttattacacatgttctttaactccaaaggaaaccagaaaaaaacaaacggggacaagaaatcaattttcaattttacagggatattaacagatgaagtatggttagaaaaaaatttcctgaagcaaaataaccacgctgccattcaatccttgccattaatgcagtttgtcataataccaaattaaatccatttttaaaaagttctgtgttttttaaaacacatattttccctaaatttaagcaaaaggagaagctctattcaaagcaataaattctacttactatttgtatggcactgtggtgggccctgaaaaggatactaaaatgagtaagtacctgccttcagtagctgagtgtgtcttgtttttctttcagaaagtttttgcacagaaagaagtctggggtctgtgagacaatcacacaaatttcaacatttctgcctcttcttcaccagcaggaatatgaggcatctgacaccgttagtgagtttcacacattaattcaacagatatttattgagtgcttactacagacctagtgcaggtcactaacaaatcacaaaatccctgcccctatagaatttgtactctagttgggggataataaatggagaataagcacatgagtaaattatgtaagtaatatagagagaaacaaagcagaggaggagcataagaaattcttggtttggtgaggttgcaacttcaagcagggtttcaaatagggttgccagggagggtctcattagaaggggacctgaagtatgcgctgagtgaaataaaagtgttagccaggaagatacatttggcaaagcactccaagtagacgggacagcaagtgccaaggcctcagttgggagtgtacctggctttttaaaatatgaactaagagctaggaggccagtgtggctgcaactggctaactagggagaaagcaataggagaaaatttaaacctttaagggctagagactgggctttactctgatgaaaatccctggaggcttttgttgagcagaggagtgaaatgatccgatttacagtttagattgttaaaagaaaaactttaaacaagttaaatctaataaagtttatttgcacgagcgcacgtgcacacacacacacgatttatgaggcattcatcaggcagcagcacttaacagggagaggttcagagagctctacccagcactgtgggcaggcagtatttatagacagaaaaaggaagtgccccacagaaacagcttgattgcttacagttgggctagtcttatttgggcaggacattatgacgtatttgccttatatgcacatagtctgatcagttggcagcctgtgattggctgaagctcagctacttgtcacaagaatatactctcagttgcagttaatttacatactaagttaggttgcagttccctacatagcaactcagagtagggaggaaattttaggccaaatttaatttaaattatgttggagcatgaccaaagttggtcatgaccagaagctgaacacagatatggaagctaacacaatatccagtggagagagattgtggtagagtacatggggcgaaatggttgatttctgcatttttgttggtgacgccatcaggatttgctgaagaaccaaacgtgtgacaggaaaggacaacacaaggagctgccagctttggaaaccagttctactctcagtattaccttcgcaaaagatagagctttgtaaatttctagattcctcgttcttattatcctagactatttaaccagaatctccagggtcgtggtcctggaaacaatacgtttaaaactcttcccaaggatccttcagcagccaacttgactttggctaaggagtccgccagctctgggctcacttgggttgtttgcaaggaagagcccatgcccagagtataaattgggagaacagcgctgtgcaaagagcgtgggttggtgagctagtggatggcgagattaatctcactctgatccctaaagcagggtgcagtaatactctaaatgcctcaaatgggttgggaaccatggaaggaatcccggaggagcccgatcttaacgaagcttttctcaggcctttggtaggaggacagaaacgaagttgaatgaaaaagacagtggagtgggactgagaaatgacaacggcccaccacagacctctctctttcaaggcctgtgtcgtcaggacgcaggccagaagaagccacgacgaggcgcaggcgcgactccacgagggccacgcccctcctagagaaggaccgacccgttttccgcccgcagcggagcttgggtttccgggaggacctgattgtgcaa

SEQ ID NO: 11580 - DNA, 6000 bp, Homo sapiens
accaaggctaggatgaggagctcagactcttccagtggaagcagtgctaggacggaagacagccgcccctgaagaggggacattgacatacagttgatctgcctgggaaggtgtaatagagatgaacttgtgtcatcgcatctttcacacaagccacaaagaaagctaatcctgattcctggtgagaagaaaccaaactcgaggaatgttttatatcacaggacggtcacagcctgtactggggcacgagccagggctgagtagagtgctgcccctgcactcactgacttgatcctctcatttactctgtggagcagtccctgttgggatcctgctgctttgggaaattgctctgttaagcttgcagagctatgaaattgtggccctatttcaaacccatgagggcctgattctacagactgaccactgggctcttttacttcagcaggacttgggctggggctgcagggatttcaccaaggaatgtcaggcaggaggtggccattgtgaaacctgtcccatcttgcctgtacctcctggctgaaagtgggatgcaggacttagattgccaagcttaggaattatttgtggctctgctgttcacaattttggagaatgttaaggaatactcaagaagttgtgagagtaagggccctcacatatatcagaacatgaaagcattccagttaggaccttgtgatattgaaactagaataagcaacccagtggatagactgtgaaagagaatccacatatagacctatgtgtaagaatttatgatcaaggtggcattttgaaacagtagggaaggagcccagcagcaaatggtctggggaatcctggccctccacctgagacgttacacggctctttttttgagacggagttttgctcttgtgcccaggctggagtgcaatggtgggatctcggctcaccacaacctccgcccctgggtttaagcggttctcctgcctcagcctcccaagtaggtggcattacaggcatgcgccaccacacccagctaattttgtatatttagtagagatgggatttctccatgttggtcaggttggtctcgaactcctgacctcaagtgatccacctgcctcggcctcccaaagtgctgggattacaggcatgagccactgcacccagctacacagcctttttttttttctttttttgagacagagtctcgctctgtcacccaggctggagtgcagtggcgcgatctctgctcaccgcaagctccgcctcccgggttcacgccattctcctgcctcagcctcctgagtagctgggactacaggcgcccgccaccacacccagctaatttttttcgtatttttagtagagacagggtttcatcgtgttagccaggacagtctcgatctcctaacctcatgatctgcctgcctcggcctcccaaagtgttgggattacaggcatgagccaccatgcccggcctacacagcctttttaacaccacctccaaagtaaagttcttcatggactaggaagaaactctttatagagttatgcataaaaacaaagccataaaaatattttcataatcttagccttcctaaggaatacacaaacagaaatgataatgttaaagatcaagcctcatgagaattcaaacagggaggggaacagaaggagctggccaaaggagaactttgtgttctatgttgtttgaatcttacacaatgagaatttaggggataatgtgacttaaaaaattgaaaaaaaaaatgaaaatggtgggtagtcaactttgcaccatggcttttaaatccctcaataaattctgggctccccatattggggtgaataaaagacacacttcctccagggctcagcatccacctgtgaaaatgcccccaggactgtcgagaacccagctgggaggccacttggatgattatccaagaagtaagggcgcagtactttggggcagcttcctgaaggtggtgggatttgatctccttcttacaaagtgggatttcagcaggtggtgtagggaagtttaaattttttccctgaaggtttgataatctgagtctatgaaacaaacataaaacattaacaggaaaaaaaaccgacttaaaaatgttactacgtgcacacatgtgcacaagtcatacaaaatatataaaaaaataaatggccagatggttgacacttttatacccatcttgaaattacagaaataacgggaggcctggagcgcagcaagacagattaggggaaggggagaggagagacttggctagcaaaggtcttgttctgcaggtgacatctcacagctggtactctgcggagcctgtggtaggcaagtccttcagacccttaaaggggtccgcctctcagtttgtctttcctagatccagacacggggactgcagagaaaggctgtgtgcatccgctgtctactccactgtctcctctgcagaggcggatttccctgactgaagaccatgttgcaggcccacagctgcctacagaaccgtcccaaaatatggcaaagaaacctattctgaggttaaatattttggtttctttcagtgggaggcaagggtcttccggactagggaggtagatgtgcagcagcctcaggtgctctaggtgctttgtagctacgctggccaggccacctgaggtaggtcccctttgcaccagtctcacaccctgctgggggatggtagtggagacagcagtaaaagcaggtctgaggcaggtgtggagattagtacaggtggcctgggcgaagggcaaagggtgaagagaatgttgggagccatgggtgactggctgcgggcataggcaccatgaaggctactatgggctgcagggtgtggatgaggggacagagtttgccccagagaccaagttggtttgtgtcaaacaccacaggatttttattttgtatttttttttaatttttaatttttaaatttttttttgagatagggtctcacttttacccatgctggagtgtagtggcgtgatcttgggtcactgcagcctccacctcccaggctcaagtgatccttccgcctcaacctcccgagtaactgggactacaggcgaaagccaccacacccggctaatgtttattttttgtaaaggcagggtctcactatgttgcccaggctggtctcaaactcctgggctcaagtgatccacccacctcagcctccggaagtactgggattatagtcatgagccaccacatccagccagcaccacaggattaagcagacatgatgagtctttgacacaggggcaaaccaggacccagagaggtgacttgggacagggctgtctcttcagtccttaccacaccgtggacgagatcaaccttaagacagcaccctgggctctcactggaccctggattctggctcacagcacacaaagcaaactgatccctggaaagggtcacttgttgctgcctagcagcattctggtaggttggcatcctcaaagtgacataagcagtgaagcaattcagagcaacatttatttatcaagacagggtctcactctgtcacccagactggagtgcagtggtgtaatcacagttcactgcaacttctgcctcctgggcttaagcgatccttcaacctcagcctcccaaatagttgaaactacaggtgcccaccaccactcctggctaattctttctttcttgcttgcttgcttgcttgcttgcttgcttgcttgcttgcttgcttgctttctttctttctttctttctttctttctttctttctttctctttctttttctttctttctttcttcttctttctttctctctctttttctctgtctctctctctctccctccctccctctctctctctttttctttctttctttcttttttttttttttttgtagcgatagggtctcaccatgttgcccaggctggtcttgaactcctggactcatcctaaagtgctggcctctcattccctgtctgtgcacacctcacggcaagggccagcctgtttcctcccggtcacctccaaatcttgctgcttttaattcaactcagaggtatgcacttgaggtaggagggcaggggaagtggggatggcaggacatggatggcccttgaggcattggctctgggtgtcatgggctgtgagagtcaagaagggcagtggcctgcctgacttgggttcgaaagggtcactctggccactgcggtgagaactgaaactagccaggccaattctccattgttcctgctcttccaggtaggagaatattagattaggtctggagtcagaaggtagcaggggctgggggttgcagggggatgttgagaagaagtggtcctttggtcagggtgggaagccaacaggatttcctggtgcattggaggtgaaagggaagaggcgctggtggttgtgctttgggcctgagcagccagaagccgttgccatcacctatgacaagggagacagcgcctggggcagagcccagtatggggtgcattcagggtagatcaggaggtatgagtgggcagtgggcgagccaggctgggggttgtgggggaggcctgggttgcaggtttaagcgtgggacccacgtcagattggtggtgggtcatgcatgctggggtggctctcaggtcctccctgctggcttcccactcccaggggctttctcctcccagattccttagctgggtgaggggcaggacagagccctttcctagggaagcccggcaccccctgctgtccagggaaggggagtccttctagcccctgacagcttctctgcccctcccctggcctccccaggcctagccagggttgagttctcacccacctgtgccgccctgccttgttacctggaagcacagccttggggactgagcaggccctcactgtcactttaagaagggaatcagccactttgtgctcaccacctctggggaaggtgtgagaggagagaaggaagtggctgtttggctgctgacaacatgaagacttcctgcgatgagaacagaggcacaggtgccggccctgcagcccccagaacccggactggagggggccatggggcgccggaccctggccctgccctgggtgctgctgaccctgcgtgtcactgcaggtgagtgccggcaccagagaggggcaggggctgcagggagggtgatgtaggacgacagcccacccaccttgctgctgttccacagggaccccggaggtgtgagtacaagttcggatggaggccaccgagctctcgtccttcaccatccgttgtgggttcctggagtctggctccatctccctggtgactgtgagcagggggggccccgatggtgctggggggaccacgctggctgtgttgcacccggaacttggcatccagcaatgggcccctgctcgccaggcccgctgggaaacccagagcagcatctctctcatcctggaaggctctggggccagcagcccctgcgccaacaccaccttctgctgcaagtttgcgtccttccctgagggctcctgggaggcctgtgggagcctcccgcccagctcagacccaggtggggccggggtgaggggtccaggagggcagggaggggctcgggaactggccatccatctgattcttgcctctgtgcccagggctctctgtcccgccgactcctgcccccattctgcgggcagacctggccgggatcttgggggtctcaggagtccttctctttgactgtggctacctccttcatctgctgtgccgacagaagcaccggtgagacctgggccctgtccacgtccccctgacactgggctggccacatgccgtgcagagctctgaccatccttgctctctcccagccctgcccctaggctccagccatcccacaccagctcctaggcactgagagcacgagcatgggtgaggaggggggctgctttggggatgaggtggcaggggtagggggggccagggctgggcccaagctgta

SEQ ID NO: 11581 - DNA, 6000 bp, Homo sapiens
ggtcgaggcttcagtgagccatgactgtgccgctacactccagcctgggcaacagagcaaaactccatcttaaacaaacaaaaaagttcttccttggctacattcactcattgattcatctggtactcactggtgcctccttcctgccgatgacccctactgggtgctaggaccggaagcctgacagagctctgaacagttcaagtcaatgaggctgttatggggacagtgctccctcctacctgctgagcaggtcaccctccaccctcctccctcctagatgcacccacctgcccaaagcagtgccgccggacaggcaccttgcagagcaacttctgtgccagcagccttggtaagaatacccccaaccccattccagctcctcgaaccacctcctgcttctgtttccagtcctgccatctggaacctcccatctcctcatctctcactcccattctcccacagtggtgactgcgacagtgaagtccatggttcgggagccaggggagggccttgccgtgactgtcagtcttattggtgcttataaaactggaggactggacctgccttctccacccactggtgcctccctgaagttttacgtgccttgcaagcagtgcccccccatgaagaaaggtaacagagatgtggggaaatggggatgggtcaagctaagccacacagaaatgatcaaggtgtggaatcttgagacctgctgacaggtctcaagaataagagatctcaacccctccctccttcttccaggagtcagttatctgctgatgggccaggtagaagagaacagaggccccgtccttcctccagagagctttgtggttctccaccggcccaaccaggaccagatcctcaccaacctaagcaagaggaagtgcccctctcaacctgtgcgggctgctgcgtcccaggactgagacgcaggccagccccggcccctagccctcaggccttctttcttatccaaataaatgtttcttaatgaggaatgggtcagatctccatgcttatggtattggggtccatcttgaggatttcttttcattaattaattaactcaacacatatttactatacagaataatcgtttaagaatgtggccaggggtggctgctcacagctgtaatcccagcactatgggaggctgagtcaggaggattgctgaggccaagagtttaagaccagcctgggcaacatggcaaaaccccctctccacaaaaaaaaatacaaaaattagccaggcgtggtggtgcacacctgtagtcccagctactcaggttgaggtgtgaggatcgcttgatcccggggaggtaagactgcggtgagctgtgactatgccactgtactccacctgggggaacacagtgagaccctgtctcaaaaaaaaaaaaaagaatgtaagtcacaggccaggtgcagtggctgatgcctgtaatcccagcactttgagaggctaaggtgggaggatcacttgaggtcagaagtttgagatcagtctgggcaacatggccagattctgtctttacaaaaaataattagctgggcatggtggtactcatctgtggtcccagctactcaggaggctgatgtgggaggcttgcttgagcccaggactctgaggctgcagtgagctatgatcacaccactgtactccagcctgggcaaaagagtaagactctgtctctaaaaaagtaaaaagaaaagatgtcatgtcttggcggggcgcggtggctcatgcctgtaatcccagcactttgagacgccaaggcaggcagattacttgaggtcaggagtttgagaccagcctggccaacatggtgaaaccccgtctctactaaaaatacaaaaaaattagctgggcgtggtggcgggcacctgttactcaggaggctgaggcaaaagaattgcttgaactcaagaggtggagattgcagtgagctgagattgtgccactgcacttcagcctgggcaacagagtgagactccgtctgaaaaaaataacataaaataaaaaagaaaagaaaatatgtcacatctttttttttttttttttttttttttttttttttttgagacggagtttcactcttgttgcccaggctggggtgcaatggcgcaatctcggctcactgcaaactccgcctcctgggttcaaatgattctcctgcctcagcctcccgattagctggaattacaggtgcgcaccaccacacccagctaattttgtatttttagtagagatggggtttctccatgttggtcatgctgctctcgaactcccaatctcaggtgatgcacaccccttggcctcccaaagtgctgggattgcaggcgtgagccaccatgcccggccgattatgtcacatcttgtccctcctttactcaaaactttcctgtagtttcctaagtcttaccaagggttcaaggccctatatcatctgcattctctctcctgcctcgtagcttcatgtctattatctcctatgtatcatctgttccagtcacattggcaacttcagtttgttgcccatttctttttttttttttttttttttgagatggagtctcgctctgtcacccaggctggagcacagtggcatgatctggctggactgcagtgcagtggcgatatctcggctccctgcaacctccgcctcccagattcaagcgattctcctgcctcagcctcccgagtaggtgggactacaggcatgtgccaccacgcccggctaattttgtatttttagtagagacggggtttcaccatgttggtcaggctggtctcgaattcctgaccttgtgatctgcccgcctcggcctcccaaagtgctggaattacaggggtgaaccaccgcacccggccttgttgcccatttctagtacacttctgttttaggcctttgctatttcctctatccagaattctctcccatagacatatctcatggttcacttcctaaatccagtcagatctctgctcaaagttcatcctagtcactcattcatttgttcattccaaatggtaggcactgtcataagtcctaaagatacaacagaaaactaaacaaagtccctgctcttgtgaaaaggaaaaaacattctactggaggagagagaaacaataaaataggaggtcatgtatcactataagtgctattaaaaaaacaaatacagggcagggagcggtggctcacgcctgtaatcccagcactttgggaggctgaggcgggcggatcacaaggtcaggagatccagaccatcctggctaacatggtgaaacatcatctctactaaaaatacaaaaaattagccgggtttggtggtgggtgcctgtagtcccagctactcgggaggctgaggcaggagaatggtgtgaacccgggaggtggagcttgcagtgagctgagatcgcgccactgcagtccgagattgcgccactgcagtctggcctgggtgaaagagcgagactccatctcaaaaaataaaccaaaccaaacaaaacaaaaaaaacaaatacaattagccgggtgtgaagtcgcgcgcctgtagtcccagctactcagaaggctgaggtgggaggattggttgagcgcaaccaagcaggtggagactgcagtgagctatgattgtaccactgccctccagcctgtgtgacagcacaagactgtctcaaaaaaaaaaaaaaaaaaaaagaaaaagaaaaagaaaatgtaaaagagaacacggggattctacacaagatgttcagaggagactttcagataagatcaactttgtctttgctccattgctaactgggtgccctcagagacccagattcttcaccttatccaggctgtaaaaggagttgaagattcgatgcaattaaagtggcagggtttagcaaatccttttttaaaatatataattactcaaacaacatgggtttgaaatcagcaaatcttaattccctgtgcaaatgtgagtgatttcccacgtccctcacaggaaggtgagaaacaggaggcaagacttagtctggagtcccagatgggaggaacctccaacccatagaaaacagactttgagcctggggaaggaacagtggctctcatgcactttgggaggcttaagtgggaggatcgcttgggcccaggagttcgagaacagcctgcagaacatagcgagatcgtctctacaaaaaattacaaaaagccaggcatggtgatgcacgcctgtaatcccagctactcgggaggctgaggcaggagaatcgcttgaacccaggagttggaggctgcagtgagcaatgatagcgccactgcactccagcctgggcgacagagtgagactctgtctctaaaaaagcaaaaaagagggcgggcacggtggctcacgcctgtaattacaggactttgggaggctgaggcaagtggatcgcctgaggtcaggagttcgagaccagcctgaccaacatggtgaaaccccgtctctactaaaaatacaaagaattacccgggcgtgatggcgcacgcctataatcccagctactcgggaggctgagacaggagaatcgcttgaaccctggaggcggtggttgcagtgagccgagatcgtgccattgcactccagcctgggtgacagagcgagacttcgtctcaaaaaaaaaaaaaaaaaagcaaagaaaacaggcttggttcctgcagaggcttctagagcctggaatgaagaggaggaaaagggcttcccggtgggagattgacttggaccatctcaagaatagggaggaaagaacaaagcccagttcgaaaccccgcccccggttctctgagttacttcagggctcgagttcgagccagtacaactgttacgtcaccggaatccagccaatcgcagacgacagaaggagggcgttgtttggtctttcagcacaccaatcggcgtatagttacggcagaaacaaagacgtcctagccaatgacagaggccgtacggcggaagtatagaaaaggactctctggaacatggcaacattaatctgaccacaagctgactggcaggtgctttaaccacaaggtgggcatcctaacgcgagcgaccgttttgaggcagaagcccgatggggcccgtgtccgagcttagggaggggccggagacgcaaacacaggtctcccaggaagcaggcggcgtcacaggtcgctctgcaggcgcccgctgcagcgggcggagtctggctggagagaggaggcgggcgtccgggaacgcccggaaggggcgaggccagcggcggggcggggcttatggagatcgtgagctgggcgtgaggagaaggccgggttgggagctgcgaggggccgggtttagcggggtgggcgtggccgtcgaggtggggctcggcgggtccgaaggaacctggggcagagctggaagaggaaaggtcttgggggccctgggcctgggtctgcgggagccccatctagcggggttccaaggcggcggcggcatcagtcgaggccctgctccgggagctcatcttgtcccctttcgcccctcacgccccccagctctgactccaggccctgtcccctgagctctgccctcggatgtccgaccgcccagagcctgcatgcgccgtggggcgccccaggaccaggagctggtgggtccggggccccctgggcgggggtcccggggcgcccctcctcccttgggacccgttgtcccggtcctggtctttcccccggatctagtattcagggcggaccagcggagcggaccccgacagctgctgaccctctataaccccacaggaactgcgcttcgcttccgaggtaaagggatcggcgcctcgtgggggctggtggccggacactggggggttgtgttggctggaggagtcagatgggtagggttgcacgtccagctttggtggactgggaaagtcatgtccagcctccggggcagaaggcagaggggacttaaatgacccacatggcagggcttgtc

SEQ ID NO: 11582 - DNA, 6000 bp, Homo sapiens
tacccatattttggagaattggacaattttttttttactttagtggatttaataaactatatgtggatgtcagggaaaggagaatccactagtgttaggaagataggaaagaatgaactcccaaaagcactttacaattttctgcaagttaaattagttagtattatcacatccctcatgtggctacttactgctttttaggcaaaataaaatgggccagaaaagaaatttaggaattctgggctcaaatattaattatttagttaccttatttggggctaagctgtatttcatttaaaggcgtcaggaacaaacatcatcttggtcagttcctccatctgatgactgggggcttgattttgaaagcttgggtggcaaattggtcatatacttggaaactgtgagatttcatcccctaaagggagagcctgagtgtcgaaaagtgaccaaatgcctgtggattgttttttttttttttttccttgtttttcattctaagtaatattaattatgtgtccaggtgccctaggtatttcttggtactgggccatttatcttgagaacttacctgcctctcacaccgtgctctgggaggtcatagccattactgtattatctttgtaggtgccagtggaaatctaggtcctaaaacctataaaatattttgtaaatattttatgcagcgcacatctttgtagatccactctgccagtgggtactcctgggtttttacaatggtggggctaaaaatcaatctgaaacaatacaaaagaaacaaaatagtctttggaaataaatacaatttgcttttattctgtgtctatacttgctcaagaaaaataaagtgcactttaaaaagttttttttaggtctctgctgtttcactcaacgcagataacttttgatcagtggtttattttgaatgaatttctttttacaaagtaacgttttatggtgctggtgaaagttattctaaactcctcccttcccaccaccccctgcagagagcaacaaggtttatgtaacccaaaactttggtgggagaactcaactgtatttaaatagaggttaacctctgggccatccaatatagtgtgtctgtactaagtcaggttagcatgtaaataatataaatataaccagaaatgtaacaacggtatttaatagtcatcagatttatttctaaaatattgccatggattcagaatactgaattccaaccagatgtatttcgggagtattacacaggtcatatatatttcacttttttggttcaaacccaggggatctacacgataattagattgagaacatctgcatcaaatccaaaccatttccctgatccttccttgagccttccccatgggagggatttctttttttttttaagcccctgcacattttgtctagccacctttagcgcaattcctaggtctcgcctgcctgccaccgcagaaatagacatgccaggggaaggcggaagcacccccccccccacccccgccgcctccccgagtgtgcaggcatccttagaagtcgcatttccccgggacaggaatgtccctcggtggcaatgccgcttcccgccagaagcctgactccgggacagggcgtggcaggcgcgggggcctgggcgcgccggtgggcacgtgcgcggggacccgaggacccgaggacccgagtgtcggggcgccgctgccctctaccgggcggcgcggtcggagctacagcgcggcggccggccgactgagcgcgcgggccggggcgccccacacggaggcagcccttggccacccgagatccacagtgccctgctgtgcgcggcgtcaccgcatctagggtggaggctcgcaacgtgccccccgacgccagcgcgctcccacccaccggcgagtcaaggttgcgttggggagacagtgaaccccgttcccgacatcaggggcctccccttggggaaactgaggcccctggccagctgcgcaagacctggggacacgcgtgttctctaaatcttgggactttcatttccagcctcttcctccaaaaatgccgaattcactgcgccaaccctcgaactcacttgaaaagcaattgttttccacttgcgcgttttattttgtatcctatgcagattctatttacatatgcattttgagattaaggaatttggggacttgttttaactaattactcgttcagtgaagtacgggagagtcaaagaacagtattcctactggaaactccaagtcacacgtgtgtataatcaatgaaagatgacgatcataaaacgtgtgctttcgccagctttccgcgaggagagaaatcaaaagagaatttattttttggtttgcattttagcatttctgtaaacttgggaccacgctttccgttttcagtgagtgcacccacactttccaactttctgcgcccaaagttgcaacaaaccaaggtgtctgaaccacaggaagtttcttgggctgttccgctgaagcggcgcggggggacacagaactgggctcccagacttttcctgtcgtggcctaaactggaacggcttgggcgaatgggggctgccgggacccccagcgctaccgccgttggggtgcgttcgggtgcgacgctggcaccgccgctgtccgggtgtggggcatccacgcgcgcggccccctgagagggtcagggctgtttccccctcaactccactcctccaaacatgccacgctgttcctggtcgtgtcggtgtcccggtcctcgctgggcgcagagggatcagagtgttgccgtccaccgtcggggcgcctcccacgcacgctgctgcggggggcctgggccacgcaggggtcgggtgtggggggtcccgggcaggtggtagcggcgtctccgcgctctgtacactaaccactacaggggcgctccgacgttccccccaaccggagtcttgaaggcgctgcgctcggccaccgcgggcgatcgcgatcccagcgggagaccccccccacccccgcagccctccccaggtgcgcggtgccgggggaccccgggcgctgccctccagcgccccctcggggccgggtctgtggccggcgcgaccgcggactttggggggggttgtcccgaggggcgggggtcgccggtcggcccgcggaggggagggggagggcggcggtgggggggttgggggagcaggggccggggccgcgcgcgcgaggccgggccgcggccgccgcgccctggggctgcgactccggctccggctcgggctcgccatggctgcggcggtgccgtgaggaggagtccgcgtcctcggtggcggcggcggcggccggctccaggccgggttttggcgccgcccgcctgctgcctcctggcggctcctgaactccagccccctctctatcagccgctcactccgtctcaatatgtctcaagatggcggccaatgtgggatcgatgtttcaatattggaagcgctttgatttacagcagctgcaggtcaggctcctccgcgctcggcctcgcgcccgggggtgggggctgcgggcggtcgcggcctccgccgggggccccgggctggcccagccgccggggggcccgcggcggcggggaggaggggggtgccgggcaccgcggggccgagtcggggccgagtccctcccgctccccggcccccattgatcactcgcttgatcggaaattgatcctctttgttcaattcatcgatcagcccaagatggcgccgggagccgccgccgccaccactgcccccggtgtctgcccccaccccgggcgcccccccgggccccgcgccgccgccgccgccagcgccgccgccgccgttgccgccgcgggaccggggagggggcggccccggcggcccgcggggtgcgcgcgcgagcggggagcggggagcgggcggcggggggcgggcggcggcgggcgccgggagggggccgcggcccggcggtggcgcccgcccgcccgctcgccccgcgcccccggcccgccgtattcccggggaaagtttgtggggagttgctgcggggggtgaagcgcctgcctctccaggaggagccgccgccactgccgccggcgcggcggagctggggctggtggcgctgtggtgccgccggctcgggggagggtcagagcggccaccggcggcggcggcggcggcgcggcccggctccggccaggcgggcgggtggccgggcaggcgcccgcgctcgctacccccggccggccccggccgccgcccccggctgtcaccggcccgggccgcgccgccgctccggcaccccgcgtgtggctcccggcgcggacccccgggtttgtttacgtcccggggagcgccccggggccacccgcgcacctcgcggccgccgcgctcttttgtgtgcctgtgtcggtgacgcggacctgttcctccgtggcggacccccgcgggggctctttggggaaacttggcgaggggcggcgggggtgccccgcgcgcagtgtcgctgggtcccggtgtcccggaccgccgggtgcgggcgcgggaggaggaggctgcaactttcccctaggcaggccccaagctgttcccccgggtgcccgggcagtgtacgctgcctccccgccgccggtccgagccgcgatcgccgcgcgcctgggggctccggcggcccccggtgacctgcggcgccgggtcccttccttgcgtcccctcggggcttctgccctctctgcagggcccgccatggagcgcgcggcgggtgcgctcggagatgccttctcgggccgggttctcgaaagcagagccccgggggcccgttgggaccgtggcatgccgggcggtggtccgcgcgcggagtccccggcgccgcggggggaccgtgccggggctccccggcccgcgcccgagtcgccgccgtgcccaaggggcgagtgcctgcctgccaccccccgcccggaggagcggcgcacccttagggtccgccccgcacgtgccagctcggcgcccgcggcgccgggacagccccgggactctgccaggtggatgttgtgcgtagccggagccaggttgaaggtgagcggcgtgtgggccagaagtcccgaggttgcaggcgcggagggaaccggggatgtcggggggtgcccgggtcccgcggcttagaatgctctagggcggcctggtgctctgggaggggataggagggttcctcagggcccctggggaactgcagctactcccaactgctaaggtgtgcgtgaagataaacttggctgaactttcctaacctggaggactggtgacagtgacctaccgcaatacctttgggagcaaagctcgagatgcaggcttgtatcaaacgaagcgggttggattaaaacatatttaaatggaatctgacaactttaattgtatatgcttgttttctgctcttgcctactaagaacgataaagccgagtcatagtcgttatgaaatttcctgaaatttctcgcttaactaggaagaagactatgcgaaatatgtatttccgataagattaaaacttaaaggagtttaagtatttattgactaaaatagattactccaaagtgtctattgtgtaaattagattcctggatgtaatgaacacagccgaatggcatttttgataaattggtctaccctgttttagtaaaaatagctcccttttaccataatttaattcctgtgcttactgtaaaacccgttgtggagttttaaggacaaacattattattatttttctctcttgtcttcctaaatgtgacatcctagcttaatatcaatgaagtgtcttttttaaagcatcctggcaaaattgcctggaaaatggatttggtttctagagttactagattttaagaactctaaaccttcctgtcccccatattagctacttcttcaggggatcagggctccagggttccatcgaaagtttccatgtcagtttacttgcactttatgtggatattaagaagaaatcaaaac

SEQ ID NO: 11583 - DNA, 6000 bp, Homo sapiens
ctatagaagaaaaggaaaaactgggttttaatgtacccatggcaatttttttcttcaccaatttttcaacttaagtatcaaaatgtttcttttcctcacactctgtagtctttataatacacataataaagtgcaaagaagaaggcacactttgttcttaagctttagcattgcaaaaactcatctaaaagacagtggattttaaatcttcttactcacatgtcctcactataccccagctgatttttcataagtatcacaaaagaccacagaacattcatgttgctccttttggaggaacagaattaagcattctctcctttgtgcatccacagagcattgcacacatttttattgtaaatcaaatctactgtgcatcattgtcctcagctatttactcctttgataactgaaaacttggtgagcagatattttatcttatttattgctgactttccagtgtctatgataatgcctgccaaaaagtaggtgttggatcaatatttcataaatgatgaaaaacagataaagaagctaaagaataaagatctctttactaaggaaaagtagctttatccataaaagcttctacatataattataccaagaaacaatctgtattttcacataaagaaatctcaaattataagtgtccacaggaattggatatataagatatgagaattcttacaattgtttgattttaacggcctaaactaggttttaatcccaccccaccatttatttgttgtgtggtatcaggcagatgggtctcaataaccttacattaaaaagtggagattaatgtacctcaccaacctatctcacaagttcattaatattaaattaataatgaataagaaaaggctttgaaaactataaagcactaagaagatactattattacttacttattatcctgcaaatagcccatactaaatagcatattaatgaaatatcataatcatttccacagacttaagaaaaagtcaatattatgctaaagaaacgataaatttctatattctctattgtgtttcccatactattgcttcctacagaccaggagaaacaacatttgaatatgctcaccactataaacactctcatttgcaaaagctttcagaagaaatctaattcaaaatgtggttgtttctagcatatggctatgtaaatgatgaaataagaaaacattttctaattaaacacaaatataaattttaagacacccaccaggataatttcaaaaagtggcattatattaagactcccccagaaagaatgcctcatctttaatatttccaaacctctagttaacttaaagaaggatataggtacctctctgctctgctggagaaagcagacctaacgaattaattgacagaagtaatggtttctccattctcagctaagtgatttatggaaacatacagaaatgcaattggactttgtacctaggtttttccttcattctggacatacaggggcaatagatttctattttcattttattcggaggggtatatgctcccaaatgagcatgcatacggaattgtaaccatctgtttacttctgtttcccctccagactgaaattttactaaagaaatcaaccatatctaagtcatctgttttccctctagctattaacccagtaattggcatgtagaaagtgctcaataaatgttgactggataaattgaagaataaagcacagatataatagattaacttttctcttaaagtctaacattcctttgtattagcctgaattttaatctctggattttagtaatatatgtaacacaaatttgatgttagtaaatacttatacacattaaaacagatttactgaaattagaaattaagcagatagaattacttaagtaacatgtaaaaggatgcatacaggattctactaatacaattcatttatcagttcattcaaaacatttcttgagcacatactacattataatgataatgcccagaagataggatgcaaagccaggcaggcctcacgctctcaaggaggttagtgcctggtgaaggaaaggatcaaggaaatgcctgacagaaacaagtgctggagccatgggaccactgtgaaggggcagctaagtacatgtggagggaggggttatatgaaagtcttgtatgaaagacttcccagaggggagattcttgaactgaggtttgaaaagacagtaaaacataatttaaaacaaagaaagaagtattccaggcagagtgatgcaaccatagctctaccaatagggagaaggttgcctgcaggaaaatggcagacggtgaggtaaacatagaaggatctccatatatcaaatttgcaacttggtgttggaaatgattatatttcaaagacactggtatagatttaaaagaaaaatatctaggtctttgtgttactgattgcattaatccgttctcatgctgctaatagagacatatccaagactgagtaatttacaaagaaaaagagatttaatggactcacagctccacatggctggaaaggcctcacaatcatggcagatggcaaaaggcacatcttacatttaggcaggcaagagagaatgagactcaagcaaaagacatttcccctataaaaacatcagatctcctgagacttatttcactaccatgagcatgggggaaactgcccccatgatttaattatctcccaccaggtccctcccacaacacatgggaattatcggagctacaattcaagatgagatttgggcggggacacagccaaaccatatcagtgatgtaataaaattgttttttcattgttagtaatggaaggtaagttattctcagggaaaaataaaacagccaaatgttaatcttgtgaactttagttacgaatgataacacacaggtacatctacagcaagttaaacttaatcttctctgaatactgcaaaactcaagtcactttatgcaaaggagactatggagagaagtatgaatgaaaatgggaaacagctaataccactacatctagcttacttaacattttataatttttgtctctaaatcctgtctcctgggaacctgttgaatcgcaatctaactcatttggttgtaagtgaacagtattattcatttattggccttttatgttgcctctctaacaggcaaaaaaaaaaagccatgaacagttgaaagatttaaaagttgttttccttttttccctataactaaatttcaaagctaatgaaaatataacaaataaaattacaaggtataaacaagcaaagatttgaaataacagaaaacttctggaaacacattcattaaaataataaatgtttaaccttttaacgattaaatttctcagcctgcccaatgcctaggccaagaattatcaaggacatatccttcgcccactttttgatggggttgtttgtttttttcttgtaaatttgtttgagttcattgtagattctggatattagctgtctgtcagatgagtagattgcaaaaattttctcccattctgtaggttgcctgttcgctctgatggtagtttcttttgctgtgcagaagctctttagtttaattagatcccatttgtcaattttggcttttgttgccattgcttttggtgttttagacatggatatgaacagacaattctcaaaagaagacatttatgcagccaaaagacacatgaaaaaatgatcatcatcactggccatcagagaaatgcaaatcaaaaccacaatgagataccatctcacaccagttagaatggcaatcattaaaaagtcaggaaacaacagctgctagagaggatgtggagaaataggaacacttttacactgttggtggggctgtaaactagttcaaccattgtagaagacagtgtggcgattcctcggggatctagaactagaaataccatttgacccagccaacccattactgggtatatacccaaaggactaaaacatgctgatataaagacacatgcacacgtatgtttattgcagcagtattcacaatagcaaagacttggaaccaacccaaatgtccaacaatgataaactggattaagaaaatgtggcaaatatacaccatggaatactatgcagccataaaaaatgatgagttcatgtcctttgtagggacatggatgaagctggaaatcatcattctcagcaaactatcgcaaggacaaaaaaaccaaacaccacatgttctcactcatagttgggaactgaacaatgagaacacatggacacaggaaggggaacatcacacaccggggcctgttgtggggtggggggagggatagcattaggagatatacctaatgttaaatgacgagttaatgggtgcagcacaccaacatggcacatgtatacatatgtaacaaacctgcacgttgtgcacatgtaccctaaaacttaaagtataataaaaaaaaagaattatcaaggacagtcatgaaaaagataaagtcaccaaacatactgaagtacttaaactctaagaatataatttatacatgaaataattataattaggtaatgaatatcaattatggtatttttcatttgtactaattattgttctcttttttctttcatatttcattttattacatttagcatcatgctgctattcctgcaaatactgaagaagcatgggatttaaatattttacttctaaataaatgaattactcaatctcctatgaccatctatacatactccaccttcaaaaagtacatcaatattatatcattaaggaaatagtaaccttctcttctccaatatgcatgacatttttggacaatgcaattgtggcactggcacttatttcagtgaagaaaaactttgtggttctatggcattcatcatttgacaaatgcaagcatcttccttatcaatcagctcctattgaacttactagcactgactgtggaatccttaagggcccattacatttctgaagaagaaagctaagatgaaggacatgccactccgaattcatgtgctacttggcctagctatcactacactagtacaagctgtagataaaaaagtggattgtccacggttatgtacgtgtgaaatcaggccttggtttacacccagatccatttatatggaagcatctacagtggattgtaatgatttaggtcttttaactttcccagccagattgccagctaacacacagattcttctcctacagactaacaatattgcaaaaattgaatactccacagactttccagtaaaccttactggcctggatttatctcaaaacaatttatcttcagtcaccaatattaatgtaaaaaagatgcctcagctcctttctgtgtacctagaggaaaacaaacttactgaactgcctgaaaaatgtctgtccgaactgagcaacttacaagaactctatattaatcacaacttgctttctacaatttcacctggagcctttattggcctacataatcttcttcgacttcatctcaattcaaatagattgcagatgatcaacagtaagtggtttgatgctcttccaaatctagagattctgatgattggggaaaatccaattatcagaatcaaagacatgaactttaagcctcttatcaatcttcgcagcctggttatagctggtataaacctcacagaaataccagataacgccttggttggactggaaaacttagaaagcatctctttttacgataacaggcttattaaagtaccccatgttgctcttcaaaaagttgtaaatctcaaatttttggatctaaataaaaatcctattaatagaatacgaaggggtgattttagcaatatgctacacttaaaagagttggggataaataatatgcctgagctgatttccatcgatagtcttgctgtggataacctgccagatttaagaaaaatagaagctactaacaaccctagattgtcttacattcaccccaatgcatttttcagactcc

SEQ ID NO: 11584 - DNA, 6000 bp, Homo sapiens
tctcggactgctgagtgttgggaaatgttggaaagatgcctgcttcttaacactattgatatcattgagagtggtcaaacctttagattccaaatcttatagtggtagttaaaaaaaagtagccaagaatgtgaaaagaacccatggtggtagggatgggaagaggaagttgtaccagagcaaagcgacatagagaaggagatgagagaacatgaaaagcaacgaatttcacaattttgccataagctgaccctgactagcctacttaagaacctcatgtctcagaagttgctaacgggttctctagtgatttatcaactgtaaaatgtttcattatccaacaatctccttaggaaaaggtatttttaatgtatttaagctctagtatcctcatcgctcagatggttggtttggttcgcctgagtggcttttagatctgtatttctagtgccctctaatccatgggatgacctttaatgctgcttccaaaaaagaaaaatattagagggcaaatgaattgccaaatactcattttttaagtaaatgatttggagaaagttattaactcgcctccaagcccaaagttacctgtgtgagaatcaaacaaaaacaattttgcttatatcatctattcatttccaattttgtacctatgctaacaatgttcttcttctccttttatttctcataaatcgagagcagtttccctaagtcagctattataaccagactaagatgtgtttctctttggtgccagcttcttgttgaggcaggttaatgaagagattgtggtttttcctctcattaggaatgcattttggcattgacaacgcttcactgatcattatgattccatgtgttgctgttgattagacttttctacatggactttcccagcgagattgctttccctcggttgagtactagttaagcgttcacttaaaggcctccctggaaagtccttttcttgctggaatgcaggacaagctccctctgtgttcctgttgacttttttcacagttaacattactcatcacagctgaagactgaataacaatagatgggaagtggtttccacatttttccatagaacgtaaccccagttgacttgtatgaaggaaaaattaaatgaatttatggcagtcattagaggtgggctaggtactatagaacatattgaacctgacagtccttttctagtgtattgtgtttgttaatatttgttaatataatttgttcaaagaatttagaaatgcaatctgacagaaatgaaattaagaaaacgcaactttttggccagttgtagtggctcacgcctgtaatcccaacacattaggagactagggcaagaggattgcttgaggccaggagtttgagaccagacagggtaacagagtgagacccccgtctctacaaacactttttaaaaatattagcagggtgtggtggtgcacacctatagtttcagcattctatcaggaaactgaagtggatcacttgggcccaagaggtccaggctgcagtgacctatgaatgcaccactgcattccagcttgggtgacagaggacaccctgtcagaaagaaaagaaaaaaagaaaaggaaggaaggaaggaaagaaggaaggaaggaaggaaggaaggaaggaaggaaggaaggaaggaaggaaggaaggaaggaaggaaagaaagaaagaaagaaagaaagaaagaaagaaagaaagaaagaaagaaaagaaaggaaggaaggaaggaaggaaggaaggaaggaagaccctaattatttgtttactcataaataagcttattttaaagcattccaaattttttaacttttattttaggttcaagagtacatgtgcaggtttgttaaattttgtgtcacagggattcgttgtacagattatttcatcacccagctacaaagcctactccccaatagttatttttctgctcctctccctccccgacgctccacccctcaagtgggccccagtgcctgttttttccctatttgtttccatgagttctcatcatttagctcccactaatgtggtatttgggaaaatccaacttttgaaagatctttagtctgctaatcatgaatggccaacataattacaggcatgccaacatttgtaacattgtgacactttccctgccattcttagttaaaactgatcttttgttccaaaaatttttgctaccaacaatagcctgtcctttatagttcttttatacttttgtgtcttctctctaactaaataatcaactctttcagcattccatccatttccctttctcctccctcttactcccaacccacattcccctctccattttaattttaacctgtgccccttcaagtgtactccagctttttttttaaaataatttcaagtgatactttgacttttgactgcatatggaagcataagtaacatgtcctttcatttttggataatgagtttcctgattaattacagctcaagagtaaaatgactgattactatttaattcattttgtgcttctttacaataaagtaaagacagaagccccagattcaggaacagacaaaatactttaatcgctatcacattttttttaagtctagtcaattagaaaagtcaaatctttcctcacagccaagcacattaaaaaaaaatcttctctggtaataaacttgaagctttaaataattctacaattataaacattttgtgtattttgcaaatatggcataacctgttggcataaaattccattgttccagaaaatatcggtaataaaattatagaaaagttaaagatcttcatttcttatttcgaagcgtttgggagacatttcagaaacggatgggaaatgttaaattctgcatgcctgcttaagtttccatccacaccgactagatgtaaacgagtgtcaccaaaagtacaccacaggcacccacacagattccttccataagggatccacaaagtttagatgtgaaatgtacctaaaggttcctagccgtctttcatccctccctctgtgaaacagggagacacatgtgttttaaggcagagatggaacttgggcgatgggcggggggtgggggaggtgggaagggacggcttaggacagggcaggattgtggattgtttctgccgccttggttgcccatactgggcatctctgcaggcgcgtcggctccctccacccctgctgagatgatgcactgcgaaaacattcgctctccccgggacgcctctcggtggttcagagcagggaaaatgttgcctcaggtttaaaataatctgcccaagcaccccagcgcgggagaaacgttctcactcgctctctgctcgctgcgggcgctccccgccctctgctgccagaaccttggggatgtgcctagacccggcgcagcacacgtccgggccaaccgcgagcagaacaaacctttggcgggcggccaggaggctccctcccagccaccgcccccctccagcgcctttttttccccccatacaatacaagatcttccttcctcagttcccttaaagcacagcccagggaaacctcctcacagttttcatccagccacgggccagcatgtctgggggcaaatacgtagactcggaggtaggcatccgtgggggggcgccggctcgggcgtgcggggagtgtccgcttctgctatctgcctctccaaatatcccgactgctgccctggccccagccctctctccacttcggagcactcctctggcgttggcaccgctgaggaatgggcctgggcggggaggtgaagagaagccaggaatgttttatgttttcctaatggagagggggcctagggagcccctgagctaggaggacacggaaaaggggattggggtcctgagattgggtctgttgggcccaggacgcgttttctggatgggtctaggatgctcccttgtcgcgggacccccgcggtccggccctgcctgctgggggttcgaagaggtggagtgcagggtggaggtgttatttacccgagtcctggggacagtccccgggactctccgccaggcgcccagaccggcaggtcccgcaggcggcgcgcggtgtgtttgcactttccaaagttcttgaaccatctcaagaactccttctgcatcttggcgtctggcaggggtgttccgagagaggtagacctcccctccccaaactgccaccatcacttccaacgccctccacgcgctggagctctgcccgggtgtggaaacctcgtcttccaacacgtagctgcccttcagccacccgcccgcagcctgggagtgccctgagggtgggtcgggggagctgcgcaggtgagactgagttctaggacatttagggggtctggtgcctggctccgccaaaaatggggactttcgggattgtgatcatcacggcggattgagcagggagagccgtggagggacaagagagggccgaggcagggtggggggcgcgggcaggtgcgagggggatgcggccaagaagcagcgataaagggaacattccacgggtcgggcggctgctgttggatcttagataaagctggaagggattaccggggcaggggtaatagggaccggggacgggaacgcgaaacaggtgaagcgctcagggcgagagcgactcggcttagggagtccgggagaagcctgcggctgccccctcgccgccgaggtcctgcgggtcctgcgggtcctgcgtgctgagccggggcgtgcgcgggcgggggccttcggaccgcgcggcggggcctgccctgacccctggcggcgggcgggggaggcaggcgcgccctgcagagtacagaggggtgtggtgtcctctgcgagatcctcttaaaaagctggctacgcgcaggcggtttctgtgcacggagccgtagctgtcggagcggttagttcgatttcgagctcgaggtttcccccgccgccaggctgacttctcatcgcttgtttttctttttgcatttttcctcccaccgccgttgccgccctccccgtcctggccgtccgccctccgccctctgcagggacatctctacaccgttcccatccgggaacagggcaacatctacaagcccaacaacaaggccatggcagacgagctgagcgagaagcaagtgtacgacgcgcacaccaaggagatcgacctggtcaaccgcgaccctaaacacctcaacgatgacgtggtcaaggtaagccaaggcgaccaacagggaagggctgggacagctctcctctggcagttagcccgtgcatccttctttagcattgccgtgtacgcacaccccaccccgccccctacacgcgcacacacacacacacacagagttttgtgggtttgatgtgtgggagctcccgcagtcggcagaaacgttacatctcccttcccccatctccccccaatagttagttcagctgaaattcagctaaagtgagttttgtagaagttcctataactacacttttatcctagcaaatgagcctattgacctcagcaacagacggcccatactccttgggacggtgagatggttcctatccattcccaggttgaaagtctagtgacaggtccccactgcacgtggcattaagacagtcagataattgtgtcaggtcttgtgctgaggatgagtcagaatacaagatgggcatgttcccccaactaaaacgatgggaagtgattttcttaaaaatactacagtggatggaaatgcctaggactaaagacaaagaaaatacgtacttattcatatacatatgaaagttactttaactagactaacaagtcacttgtgcacaactaagcaaatttacaaaaccaaaaacaatgtatgcctcttggtttcttctatctatggacacctgcacttagatgtggaaagctgcttctttagtagctacctgggtcagcctgccctgagctaatggcacattcaggttggagttccttttcatactttcaggatgtg

SEQ ID NO: 11585 - DNA, 6000 bp, Homo sapiens; identical to SEQ ID NO: 3466

SEQ ID NO: 11586 - DNA, 6000 bp, Homo sapiens
agaagtgcgaattagctttagaaaggaaggaaaacaactctttagttataacaggacaggaggggcagagataacttggttggtccctgtttttatgttaagaagaagtgtgtctttggtggcttctattttccctgaaaacaggaaggccatctgctgagaatgggaggaaaggataggaaaatgaaggtttgacagagttttggtagagagaaggagtgtggagtgataccagaaaactaggcaaatatttaggtttgcaaaaacaaggaagagtttagaaactccacactgccaagcttaacattgatccccagcaaaactctgcatcacattataaaacaaatatttatgagaacttctaaggaaagaagagataattggcaccaaccaattttccctaaaagcaagtcaaggcaaattattctcatttccttttgcattaagtttttaggtttgtagattataggaatattttatttaggaaattatttgggaaaatctctcaggtggtccttgtgaacaaggtatcacacagaatgtaaaacttcataaagaatactgactacttgtaaggaaatttttcaagggaatctgagagagtagccatttttagcactcaatataattcagatcaagtgcactaacttcctaaagttgtcacttatgcttcagaagatactcacgaccagccaaataattaagctgtaaataatgaggcagccattaagcttggaatcgtgtgtttcatacagtgcagatttccgtgtgtatgacacatgctcatgagcacacacagcttaagattcagattctttctactgatactggtcaagttctcaatggctgtactcagtaatttttttcttttaaggaacatggccttaaaatatctaatagatgatcaaataaatgacaattctaacaagctgttgggtacaaagatactgacaaaatcatgtcccacatgaactaaaaaaaaaaaaaaaacttgataactttggcaattgagttttctaagtatataattagatataatatacccagttttatgtatatatacgtatatgtatatatatacatatattgaatcttccatgcaatgaagattatgcttaaagcataggtcttggttaacttctagctagaagactagacgtctcctcctgggtcattgcatggaagattcagcctcctgaatggtgattctaagggaaacacaaaattaaaaaactaggagtagaatcatatattgacaagttgcctttgaaatatctgcctaagtcttaagtggaaaatattaaaaaacaaaaggaaaagaaaaccaaacacctcttttagttctaaatcttccccttattatgaccttaaaattatgatttgctctaaatagatataattaaatattctgaatgttcaactactttggtctttaaaatagtttcatcgccaattcttattacaataagctaatggctatttaccttgatgcctgatgaacaaagaaatataaaaacaataaaataaatgccatgttaaataacactgtcaataaataactacagtgtgtcttccttttaaatatgtggtatctattcatttaaccacttctttccatagcattaaaataaaggcggccataaattaggtgttttcattacgtttaattactcccctgtagagcggatggtaaaggttgtaggttagaggtatgcattgtacagaatggtgttttatgaggatgagaagttcccaagataccacaagtgatgattggcagtgtaagatatgaagattttctttttctcttatttccttatgactcattaaatcttgtttgcttttcaaaggaggaggaagagggaaaagacattgaagaaggcgctattgtgaatcctggtagagacagtgctacaaaccaaatcaggaaaaaggaaccccagatttctaccacaacacactacaatcgcatagggacgaaatacaatgaagccaagactaaccgatccccaacaagaggaagtgaattctctggaaagggtgatgttcccaatacatctttaaattccacttcccaaccagtcactaaattagccacagaaaaagatatttccttgacttctcagactgtgactgaactgccacctcacactgtggaaggtacttcagcctctttaaatgatggctctaaaactgttcttagatctccacatatgaacttgtcggggactgcagaatccttaaatacagtttctataacagaatatgaggaggagagtttattgaccagtttcaagcttgatactggagctgaagattcttcaggctccagtcccgcaacttctgctatcccattcatctctgagaacatatcccaagggtatatattttcctccgaaaacccagagacaataacatatgatgtccttataccagaatctgctagaaatgcttccgaagattcaacttcatcaggttcagaagaatcactaaaggatccttctatggagggaaatgtgtggtttcctagctctacagacataacagcacagcccgatgttggatcaggcagagagagctttctccagactaattacactgagatacgtgttgatgaatctgagaagacaaccaagtccttttctgcaggcccagtgatgtcacagggtccctcagttacagatctggaaatgccacattattctacctttgcctacttcccaactgaggtaacacctcatgcttttaccccatcctccagacaacaggatttggtctccacggtcaacgtggtatactcgcagacaacccaaccggtatacaatggtgagacacctcttcaaccttcctacagtagtgaagtctttcctctagtcacccctttgttgcttgacaatcagatcctcaacactacccctgctgcttcaagtagtgattcggccttgcatgctacgcctgtatttcccagtgtcgatgtgtcatttgaatccatcctgtcttcctatgatggtgcacctttgcttccattttcctctgcttccttcagtagtgaattgtttcgccatctgcatacagtttctcaaatccttccacaagttacttcagctaccgagagtgataaggtgcccttgcatgcttctctgccagtggctgggggtgatttgctattagagcccagccttgctcagtattctgatgtgctgtccactactcatgctgcttcagagacgctggaatttggtagtgaatctggtgttctttataaaacgcttatgttttctcaagttgaaccacccagcagtgatgccatgatgcatgcacgttcttcagggcctgaaccttcttatgccttgtctgataatgagggctcccaacacatcttcactgtttcttacagttctgcaatacctgtgcatgattctgtgggtgtaacttatcagggttccttatttagcggccctagccatataccaatacctaagtcttcgttaataaccccaactgcatcattactgcagcctactcatgccctctctggtgatggggaatggtctggagcctcttctgatagtgaatttcttttacctgacacagatgggctgacagcccttaacatttcttcacctgtttctgtagctgaatttacatatacaacatctgtgtttggtgatgataataaggcgctttctaaaagtgaaataatatatggaaatgagactgaactgcaaattccttctttcaatgagatggtttacccttctgaaagcacagtcatgcccaacatgtatgataatgtaaataagttgaatgcgtctttacaagaaacctctgtttccatttctagcaccaagggcatgtttccagggtcccttgctcataccaccactaaggtttttgatcatgagattagtcaagttccagaaaataacttttcagttcaacctacacatactgtctctcaagcatctggtgacacttcgcttaaacctgtgcttagtgcaaactcagagccagcatcctctgaccctgcttctagtgaaatgttatctccttcaactcagctcttattttatgagacctcagcttcttttagtactgaagtattgctacaaccttcctttcaggcttctgatgttgacaccttgcttaaaactgttcttccagctgtgcccagtgatccaatattggttgaaacccccaaagttgataaaattagttctacaatgttgcatctcattgtatcaaattctgcttcaagtgaaaacatgctgcactctacatctgtaccagtttttgatgtgtcgcctacttctcatatgcactctgcttcacttcaaggtttgaccatttcctatgcaagtgagaaatatgaaccagttttgttaaaaagtgaaagttcccaccaagtggtaccttctttgtacagtaatgatgagttgttccaaacggccaatttggagattaaccaggcccatcccccaaaaggaaggcatgtatttgctacacctgttttatcaattgatgaaccattaaatacactaataaataagcttatacattccgatgaaattttaacctccaccaaaagttctgttactggtaaggtatttgctggtattccaacagttgcttctgatacatttgtatctactgatcattctgttcctataggaaatgggcatgttgccattacagctgtttctccccacagagatggttctgtaacctcaacaaagttgctgtttccttctaaggcaacttctgagctgagtcatagtgccaaatctgatgccggtttagtgggtggtggtgaagatggtgacactgatgatgatggtgatgatgatgatgatgacagaggtagtgatggcttatccattcataagtgtatgtcatgctcatcctatagagaatcacaggaaaaggtaatgaatgattcagacacccacgaaaacagtcttatggatcagaataatccaatctcatactcactatctgagaattctgaagaagataatagagtcacaagtgtatcctcagacagtcaaactggtatggacagaagtcctggtaaatcaccatcagcaaatgggctatcccaaaagcacaatgatggaaaagaggaaaatgacattcagactggtagtgctctgcttcctctcagccctgaatctaaagcatgggcagttctgacaagtgatgaagaaagtggatcagggcaaggtacctcagatagccttaatgagaatgagacttccacagatttcagttttgcagacactaatgaaaaagatgctgatgggatcctggcagcaggtgactcagaaataactcctggattcccacagtccccaacatcatctgttactagcgagaactcagaagtgttccacgtttcagaggcaggttagttacggatcagaaggacagattgaggtgtggtggtttgcttgctctaaaagtaaaatgaaaattatagaaagatagaaatttggtaaaatggtacatcatcatttttaaaatcaaaacattcaacaaatcagtctccagtttctgaagtataattttatttattatttcaaacaattatttaacacattttggtttttaatttaattctctccaaaatagacaaaacaatttttatttattgtcaatatttcatactctacaggatgtcttttatgggtgggggcaattctgtttgcataatacatttttagtacactgcttttaaagcaagatcagagtatgctattttagatgattttaattttcatacttttgttctaaaataagttgtaaactaattctatttaattataaaatgaattattaaatctgagagtaatgtgacataagcacttctctctgacacacccctgtagaaaggaattagttaatttccacattcatatcagcttggggagctttatttattattattatttaattaattaattaattaattttgagacggagtctcgctctgtcgcccag

SEQ ID NO: 11587 - DNA, 6000 bp, Homo sapiens
agaagtgtttcctgatgactgcatccatgccaacatatactattttttgattttttgattatggccattcttgcaggagtcaggtggtatcacattgtggttttgatttgcatttccctgatcattagtgatgttgattattttttcatatgtttgtcggccacttgtatatcttcttttgagaattgtctgttcatgcccttagcccacttttcaatgggattgtttgtttttttcttcccgatttgtttgagttaaaccatccctgcatccctggtatgaaacccacttgatgatggtggattatctttttgatatgttgttggattcggtcagctagtattttgttaaggattttagcatctatgttcatcaaggatctcagtctgtagttttcttttttggttgtctcctttcctggttttggtattagggtgatgctggcttcatagaatgaattagggaggattccttctttctctgtcttgtggaatagcgtcaaaaggattggtaccaattcttctttgaatgtctggtagaattctgctgtgaatccgtctggtcctggactttttttttgttggtaatttttaaattaccgtttcaatcttgctgcttgtttttggtctgttcagggtatctaattcttcctgatttaagctaggagggttgtatttttccaggaatttatccatctcatctagattttctagtttatgtcactgaaggtgttcatagtagccttaaatgatcttttgcatttcagtggtgtcagttgtaacatctcctgtttcgtttcttagtgaggttatttggattttctctcttcttttcttggttaatcttgctaatggtctccgcatgcagctctgtctggagcttcaatccagttctgcctcccatctgccatgatcccgaaattgaagtagcataaacactttttattttaagaattgtgtatatattttaaattattaaatttatattataactaggtctcatgaaatgtaggatattgaccaagaaagaaaggaatcctgacatctggaaagtgatatctggaaatgtttggaagatttggagaaagctaaaccttaaaacttagaatcactcacttttactccatgtcttgaggaagtaatccctgcctctgactttcctgaaaacagttgaacatttctctttaagaaagtgctgcttttaatcagttatcagaatgcaaatttataagttctgagggataacatgcagatttatattatgaaaacaaaatgttacaaccagaattggctaattgatatatatatatatatatatatatatatatattttaaaatttcagtattgcatttacttattcactgtaataaatatttattagtggctatgatggcaaggtattgtgttagtttctgatccttagacttcaaggagaaaatgatatagcaaggcagtcagaaaataattcaataattttccagccaatataaaacggcatttgtgacaagtgcttccaaggactggcctgctgatccatgagcagctataataggaggtttgacttattgggggaaggtttccctgatgggttacagttaaagtcgtctcttgatattcataaatgatcagttccaagactcccaaggacaccaaaatctgtggatgctcaagtcccgtatataaaatggcataatatttgtatgtaagcaacgcacaccccctcgtatactttaaaacatctctagattacttaaaataccaatacaatgcctacacatcacttcattcctgtgtattcgatgtagtacttggtgtgcagcacattcaagttttgcttatggaactttgtgggattttgttttccaaatatttttgatctgtggttacttgaatctgtggatccagaattcagagataaagggtcaagtgtaatcaggttaaaaggcaggccgggcacaatggctcaggccggtaatcccagcactttgggaggccgaggtgggcagatcatgaggtcaggagatcgagaccatcctggctaacacggtgacaccccatctctactaaaagtacaaaaaattatcagggcttggtggcaggcgcctgtaatcccagctactcaggaggctgaggcaggagaatggtgtgaacctgggaggcggagcttgcagtgagcggagatcctgtctctgcactccagcctgggtgacagagcgagacttcatctcaaaaaaaagaaaaaaaaaaaaggcaaagacagcattccagataggcaggatagcgtgtacgcacgtgctatggtggtgttactggaaaggggtcctgattcagactccaagagatggttcctgaacctcgcacaagaaagatttcggggcaagttgataaagtaaagtaaaagcaagtttattagagaaataaagaaacaaaagaatggttactccataggcaaatcagtggtatgggctgcttgactgagtacactgtgaaaggaaaatacatcttggggcccccaaatcactaagctaaagggaaaagtcaagctgggaactgcataggataaacctgactcccattctgttcaaagtcatccctcggctcactgagataaatgcatatctgattgtctcttttggagaggctaatcagaaactcaaaaagaacgcaaccatttgtctcttaactacctgtgacttggaaggcctcttccagcttcgagttgtcccacatttctggaccaaaccagtgttcatcttacatatgttgattgatgtctcatgtctccctaaaatgtataaaaccaagttgtgctttggccaccttgggcacctgtcgtcaggaactctagaggctgtcaccggcctgccttctcaaccttagcaaaacaaacctctaaattaactgagacctgtctcaggtattcaaggttcacaacacttatagttattccttggttatatgctaaaaaaggggtggattattcatgagttttccaagaaagggaagaggatttcctggaactgagggttccttctccttttagattatatagagtaatttccggacttagctatggcctttataaactgtcgtggtgctggtgggagtatttttgagaaggctaatgcattataattagcatataatgagtagtgaggatgaccagcagtcacttgcataggcatcttggttttgatgaattttggctagcttctttacatcatcctgttttatcagcaggatctttgtgacctgtatcttgtgccaacctcctatctcatcctgtgactaagaatgcttaacctcctgggagggcagctcaggaggtgtcagcctcattttacccagccctattcaagatggagtcactctggttccaatgcttctgacagcagtagagataacacagataggagggatttaaagaacgtcaccgtagctaagatacagagaacagcataggggttaagcaaggtccaatatgggactagctttgttaagcagctttgcttgaagtgataaatcttatttcttcttcaaaaattcttttgaggaattttgtttaatacctaacagaaaaatcaataattaaaaaattatggtagatatcttcaagtcaactttatattaaaaagtgttccttctttgaaaggaaacacccttttcaacacccttggctttttaaaatttcatttttatacttatcagagttttaagagtcagatagatagttctagaagactgaaaatacggtaacttgctagacttctcaactgctgcctcctaattcccactttcagagtcaatcattttaaattatttcagaagtttcttcaggtatttacctctgtttttctattataatatgcttatagtgctatttcttattttttcattttagaaaccattcattttctagtattttgtataccataaaagatgaggatttagctctctcatatgctgtgtatcatctctatactttcctactcccatcctcccaatatggttctatcatattataatataagcacttaatattcttctgtaatattgttctataataattatattatataagtatattaatattatattataaaattattctataattatattgtaagcattaatatcttcaaattttaattagcattttaattgtgtggtttctttttatgcagtttttaaacctatctttttattaaaagtaaactagcttatgttttatattaataattatattttttattttaaaatgcatttaaaaatagagtgaacttaaattttgtaataaataagattacatatgttcgtagatttggcaaaaaccatgaaagtgttatggatataatgcaagtctaagaaacagtatgtccggccagtgtttggcaaattatggaccttgggccaaatccaactggctcctgcttttgaagtaacatattattgtaacatccattcaaactattttctgtgactactttctcctacaatggcagagtgaagtagttgagacagagtctgtatggctcccagagcctaaaatatttaccatttggccctttacagaaagtttgctgatctctctcccaggctatactatgaaagcatttaaaaaaaaccttaatcatcagtataatcatgactctataaggcaaagatatatttaacaaatttgtcctacattgtcccttttctacattcaagatggtttagtgcctttctacagatctggagcattccaggacacctaaggctggaggccatgtgacaacactgggctattatgagagtttctttgtttactgtttgacaggacagattctgtcttctcaaattctgtttgatcagaaatgctgtagcataataaagggagcagatgaatgactgaagccctacagctccactaaagattagagtaaaatctgcacttcaaaagatcctggtaaagcagggaaggtccttagctttccattttaagtgggaatgagacaaggggatggggatgaaagaactgggagccatcattgccagatgcatgtttgcagagcagtgtggggatcacctcatctgtccttcaaggttctgcaatgctctgccttcattttccttctcaagttaacagatatattctgactctgtctttcatgctcagtattcttgcaagagaacagagctcctgatcacctgtgtgcgtcctttgagtggatggcagctgcatctctgcattacagctagttagaatgatgagtccttgctatgcctcaagcactgtttcgagtgtttgatgtctattatctcacttcatcctcaccaggaccccatccgaggtaagttctattattgctattttacaaaagaggacactaacacacagagagatttagtaacttgccccaaatcacatagttgttacttggcagagtaaagatttgaatccaggatttcactccataacctgttttaaaattattatatgaatttacctcttttccaatctggatgccctgatgaaaggagagtgtaaagccacactccggtgcttaggggatggaatctcccttgaaagggataaacatggttaatgttaatccctaaagagaacagggtttacgcaggaaactgggactagaaagactggccttggtcaggctggagaaggaatttctggcccccacacttggccttttcctctctaggctagccttttagggaagcaaagatttagactttagttcttgaatgtgggctaccagtcagcccctttacatggaaataaagccttgagctcaaagagcatgtggtatcctgtatttcaaattaaatagtttcaagttacttcgtggattaatttcccttttgttactccctggcaaagtcttatttaaatatcctggcctcatttcacttgtgttaaggggtatcaaagggaagagacgatggtgcatactgaaccagaatatctaaagggagaactatatgccctgactctgaaac

SEQ ID NO: 11588 - DNA, 6000 bp, Homo sapiens
agaaattggtatgttgtatgatctgagcaattatgtgaattcccatgagtaagcacaggtttctctacagactcaaaagattttaagtattcctagatgactctttcctgcacaaagattactgattcaaataatctgagacctcatgcatatagaagagtatcataagactttcactttgaatttgctagaatcttatcttcatctgagattccagcatttaactttgcctgtaaaaaggggaaatgtaggctgtttgtgaaaatatacactgaggtagttgttgaaactttcaagttcaccctgtcttagaggttcgcttctgaagcagcgctcagcttacctcctggtaggaggaacacacatacactaaatgcttctctaaggagacaagcatcccatgtgaccttttccttctgtattcttaacactgatttatcaccattgcagctgtttagcattttgcagggtggtgcacttcccctcccatctctgctttttctcccttcttcatagtccctgtctgcaaaagagccctgtattttaaatattttatactcagcagcagtaaatgttttcaggcattgggtaacactatcgctgctatgagagaaaagagttgaaaacatctgtgatgccaaacttcgtggaaaagaaaaaaaataacaaagcattgtttgtcacactgtcactaaacattatccctcagaatcagtcctatttgtatatgaaaacttcaattgcagggtctgaaaaagaaaagctcaggattttctagaataaaaacagatcatctttttaagctaaagaatagaagcttttaaattactctctgggaaggtctgtaggaaaaaataaataattctaggaagaataatgtgtgtattatgaaaccattattaagatttcaaaacagtaagagacaattgaagaacccattgtaagtagtgattgtcatttagcggagatctacttttaacccaggattgttatatttcaaactgaggtcaaggaaaagaaaggtttctttggcatccatcagataaatcagcccaccttttccaaagctcctgctgataaatacggtgcttccctgatttaactcttaaacagtctgtgtgagtagaagatgaaggacaaggcaagatctgctcttggctcattttcccaatataggcaaagccctcaacttcattttcttggttccttgaaaatagaaaaaaaattttaaaaatgttatgactgccatacctggtgggaaatcactggagttgaacttgtcaccctcttaatccacttatgatgatagagtgctgatttgtgcatctaattattgaagcctaattattgctgcagtgaaatcaatgtggcatgttaaatatgcgccacactcccaggaatgagacctgtgcttccccttcttctcatgttagtggtgaccttatttataatcttattcaaacgaaagctttgtcaaagattcaaagtcacccttcacaggcattgagagctcttcagtgtgtgtctgaaggttatatgtaatgaagtttggcttaataagtagaaattactaatttattagagttccttgaggtggaaaagaggaatgtagattaaaaaaaaaatctcatagatgcattttacaaagtatttaaaaagcagttttgaaaatgttccacaccagccggcacggtggctcacgcctgtaatcccagcactttcggaggccgaggcagtctgatcacttgaggtcaggaattcgagaccagcctggccaacacggtgaaacgccgtatctacaaaaaatacaaaaatagctgggcgcagtggcaggtgcctgtaatcccagctacttgggaggctgaggcagtagaactgcttgaacctgggagtcagaggttgcagtgagcccaagatcatgctactgcactccagcctgggcgacggagtgagactccatctcacgaaaaacagacaaacgaaaatgttccacaccaagagttactaatcatataaatgctatattccttgggtggggagtattcttttttttttcctcagaaaacgaactggcttaagagattaaaataaaacactcagaatacacatgatcatttcttgtatggaaacagcaactagaagaagaaaagaattaagttccctggggtcagaatgctgatggattatgtttatcttgttaattatatgatggtgatgagcattatggtttgcattgtcaagaatcactccttaatactctgtttcagaggtcacaggtgtgacccaagaaactgtatttttcagtcttgaccgacaatgttatatttatagcaatttgctatgtgtcacatgctcttttaagaatttcacatgaattacttccattatccctcctaccaaccccgacatgtatgctatacccattttatggtttaagaagctgaggcaaagaaaagttaaacaacttccctaaaatcacagtgaatggcagagttacaagtctatataaagatgtgttctaagtgatgacctagaaaaagaaaatggacataattgatgaccgttggctaaaaatgatgcttccctgtgcaactcctctccaaaaggccttaagtatactgacttctattaaacatagcacttcagtcacacatagactctgttttattgaggtttaagaaaaatattcgtttgccttcattggttatttatttggttgctcattttggaatgtgcagctttattagtaaaagggggcttagtgttcttaatgatgtaaaggaacaaaaaagtaacaaatcactgggttttcctgtctattgctggccagggatctatttctcctcacttttttgctttgatgggtgtgtgtctgtgtgtgtgttccaaaagactcaagcagcttcatgggtttatggaggctcagtagacagaaataatggagtaaaaaaggaaaatgtgaattcattctgaaaagagtgtctaagagaggagagatgacaaaatcagatatttaatgtagtggaacaaatgctgggagaggctgagaacaagacttagcagggctgttttgattttctcacaggtatcttataatcacccagtgatggtgggatgtaagtatggaggttgaaggcagagacacagtattgtaatgctgcattttaggatgacttcaatcaagcaaaatcaactttgtgtcaagtcctgcttggtgatagctatgagttaacaaaaagggcagaaactttcagctacagcatttccatttatcaataaatttacattgctataaaattaatcattggattgtcaactgttacatagatgtttcaaatgaagtgtcttttcttgtcaataggaatagaagcttataaaaacacagggacagtggtttttgctcttgtggatggcctttaatacctagcaaaaccctggacgtcaagaactgaactgaatttaattgactatattatattatatcaatgtatctttaacttgctctttgtctatccctgtgacccaaaaagtgatgtgtccaattctgggctattcaatttaaggtttccacttcttgctctttatttgattgaagttggatgagagaaaataaagcctatgtaatatataatatattgatgttatattcacatacacatatgcttttacaaaagcaagttttggcctaagctacactttagaatcctatcattgtacttttatcaaatgaggttagtatctaaaaataatagatacaattattggcagaaatttctcattaaaataaagaaataaacatcaaaggcaggtctgaacacagaaagtttgcatcctaaatcttttttcatggagatcacaaattccctgaagcatcaaacatatatatattctggagatatatatatatatatatatttttttttttgagagagatatatatatatatatttttgagatatatatatatattttctggatatatatatattttctggatatatatatattctggacatatatatattctggatatatatatcctggacatatatatatatattctggatatatatatcctggacatatatatatatatatattctggatatatatatatatattctggatatatatatcctggacatatatatatatatatatatatatatatatatattctggatatatatatcctggacatatatatatatatatattctggatatatatatattctggatatatatatatattctggatatatatatatatattctggatatatatatatatattctggatatatatatctatatattctggatatatatatcctggacatatatatatatattctagatatatatattctggatatacacatattctgaatatagatatagatacagatatagatatagatatattctgtagtctactgcccattagctgaagaaaacatggtcactggctcatatttaaagtaagagaaaaaaattacttctccttcggatacatttgtcaaagctccaaagaaataaacaatctgtgaatagttcagcacaattatatatttacaaagcatagtggatttagtctaacattttcccacctggaaaaactgggcttaagtatctccgacaaacaaaaagcaatactgcgttcttcccaatatgccatgtcacctttgtagcactcacacacttgcagggaagggactcggggttgggggtggttctgatgtagaaattgcagatggagagctgggctctggggatggaaatggagagaagcgaaaaagagcctggagaaacggctgtcatatttgctcagaagaaccgccaaatcagagagcacagaagatttcattggaggagcgccttcaacagcaactaatcctgtcatactgaaagaaaattgtaaatgttctctccagaaattgtccgcccattgcagctaatcgaacacacacgcacgaatacagacacgctctcctgctgtactaaaggcgccagggcgcaaagacctagggagcgcgcgcgggcacacacacacacacacacacacacacagacacacacacactcacacactccaggctgcgggttggccagagcctggaaatcgcagatttcaccaggaaatcgccgaggtacccgaataggtgttgcctcccaaaactaattcctacttccccaagcactttggtgaagaaatgaatccagcccagctcgccgaggcatccaggtctccattctattttggtctccaggctcttcgtgaaagccaggtttgaaagtcttgtttgcttctcctttagtggtttggcgtggagggcgggggcagcgtcaatttaactccagtctaaaccacgaacaggtcacagactagccaagtggctgagacgagtgtggggtgcgtgactctgcctgcgcgcgcgccagccccgcagctctcgccagagccttggggtcggttctctcccgcctctcccgcctctcccgccccacccctacagtgtctcggcatcaactaatcttttccttttcttttgcaagatcaagggagaaagagaaccggcagctggcctcggactctaagcggtgcgcagctccagcccgagcggatcggccctgaacccacaaaggactcctcgctccttcaagcctccaccacctcgcagccggggaggcaactggagcgaaaccagcgacaggtaagggccccgcgctgtgcagctctccgcttacccactccaagggccctggcaccagggggtctctcccttcatatccccccaagccggaggctcaggggtcggggcttgggggaattggagggaggtcctccccacgtgcagattctcaaacggaaactttggatcctggggcttggagggttgcgagcagtgatggcgggtctgaaaggaaggggcaaacgaggcacagcgcgaggcgaggtacccctacgattccgacggtcactgagtccagccgaatg

SEQ ID NO: 11589 - DNA, 6000 bp, Homo sapiens; identical to SEQ ID NO: 2517

SEQ ID NO: 11590 - DNA, 6000 bp, Homo sapiens
gtttatcaagtacttatatagcacattctgggtgccagagcccacattcattagtataactctcagatgataactggaattattggtattacttggaaagagattatagaataaggaaaaataaatacattctaatcaccattaaatttatagcctctgtaagcattgcagaatagcagaagttacagtggtactagtggtggtgatggtagtgatagtagtatggtggtggtggtatttgtggttatatggtggtggtgatggtgatgatggtggtaggggatgatggtggtgatagtgatgtgggaatggtgataatgatggtggtagtagtagtggtgttggtgatggtgatgatagtggtgggggtggtgttgatgggagtgttggtgatggtggtgatagtggtggtgatggtgacgatgatggggtggtgatggttggtgtttgatagtgatggtggtggtggctatggtggtggtagtggtggtgacagtggggtggtgtgaagaatatggtggtggtagtggtggtgatggtgaaaatagtgatgatggtggtgaccatggttgttgtggcagcagcagcaaacacttatgtactacctactgcacatcactgatttattacttgctgcatgttagagcactttgcacatagtaactcattcagtcttcacaaaaggactgtgagggagatgctattattatacccttatttacagatgaagaaactgaagcactaagagattacttaatttttgcctaaggtctcacagctagcaggactggagcctgtatctaagccaggcattttgcctctgattctgggtttcttaaccagttacctacagtgtctctaggaatggagtgaaatcagcttttccataatttttaagaaggagctcaagtctagcagaaagctttctccaagtatcctagtggctctatatcctgtcagttttgatgtggaattcaattagttagttgtctagcttggggcacagaaaaatattcttattacttgatgtaaaacttcaatctggtgtctctgttctgaggactaatattttctgtctattttctagttgattggccggcctgtgatggtaccttactggtctttggggttccagctgtgtcgctatggctaccagaacgactctgagatctccagcttgtatgatgagatggtggctgcccagatcccttatgtacgttctcagtcatggctctggagtttgaaaactaacccaggtgcctctgtgtctggcttcatttgtctaatgtttgtgagattctataaagacataatgttctttttcagacaatatcacagttagcctcaccccagcacagtaatagaggtaagggcccttgtttccatcttctagagatgatagctcaagacttactgtgatttcccagagggggagataagctggctccagggctctttctactatctcatgcttccttccatttctttcacatgacttcaaaacatgtagtcaaaatgtccttggttccataagaataaataatatccacagttcttttacttaattcctgaaaaaaactaaccccaaaccatcagaccattgtatatgtggatacgacctcagttcccgcagccctggtgctgtagcacagtgtcccatgagctctgagctaatcactgatggaatacacggatcctggaatgggttccagaggatgtacacatggaaataaagcttatccttcactggaggatgggaggggacccagtcatcaggcaactgatccaatgtaccatcgcatatctaattgtattctacatttctcttgttttacagtagctccattagtggaacatagcgtttccattagtggatagtgaaatgcaatatttcattctccagaagaatgtagtgtctgatttccctcaagattgggtattccaaagcaactgtacattgttgctttgttttgacttgttttgcagtagatttaccatccacattgtattagccctgggtagttaatattattttttctaagcatgaaccactgataccaggggcagcctcttgagggaggtcatcacagtcactcctgatagtggcagtttacaaagcactgtccattccagtgttcgtatttatcctcagaatagccatcttagagaggcattctcatcctattttatgctgactttgatttttttctatcttatcactgaacgtttgagaaattaagtgaatttcccagcacctgtacctaacaaatggcagagctcggacttgaaagcatcaacaagaagctatctggaattccaccatgggtggtggaggcttgttctcctataaagcttgggcgtgtacagcagcagcctctcagctccccatgtcctcccgcaggacgtgcagtactcagacatcgactacatggagcggcagctggacttcaccctcagccccaagtttgccgggtttccagctctgatcaatcgcatgaaggctgatgggatgcgggtcatcctcattctggttagtcctgatgtgaatgtgtgcggtctgtttgggagcaggtatgggttttgttggagaaagtgttatactttatttccatgttgcaagtagataaattgaagtgtagtaagaaatgtgtatttccctggactcacagaaactctacagttcaggtagaagccaacaagttcgccctggaggagttctccttcattctgtttctcttcattctgtggctttgatttttcccaactgacttatgctttgatttcaggatccagccatttctggcaatgagacacagccctatcctgccttcactcggggcgtggaggatgacgtcttcatcaagtacccaaatgatggagacattgtctggggaaaggtataatcctaagcgatgatccagtagtccctagcctgagggtgggtcactgttagagggtcacacgcctgtgtatgttatttttggccttttctatttgggctctgaggtcagaagctctccttttctcaatcaatatttgttgatacagttaataacttttaagtaatataatgtgttacggaattcacttctcttttacatcaatcctacatgataatcaaagtattgctcctaggaacatggtttatataataatttctttggaaatactatgtaagggaaattgtctagtgcatcgctactgaacatgtttctctccataggtctggcctgattttcctgatgttgttgtgaatgggtctctagactgggacagtcaagtggaggtaaagggtctttgtaaatttgggtggagtcagggtttctaggaaggggcagccgttcctgggaatgtggacatgcctgtactgtggacatgggcttggcaagggagaaacacttagggcatgtgtgttggatgtcagtctgtgtgcccattactttataggtagtcatactttactggccactgggatgtagacatgtattattatccttgggatttaagaccagagagctcagatgacttgtccacggttttaggtgacagagtgttgatttcaattccaaggctgtcagattacaaaggcccaagaaattcccactgggcgatacctcctagcagtgccatcttttctctgaactggtatacttaactgttgttgccttggttatcccttttaaacagtcttctaacctcaaagactgtttaggtctttttttggtgtatcttttttttttccatgaacacgtttctccctttccacacttataattcctcctctgagcccaatccttccttgggtttctcaactttgcttttacctctcagtttccagccttactgtaaaacttgctctcttctggggatggtttgttgcttgtaatggatccaagtagcccatgcttctgtacctgaatttttttccagattcactaagcgtttcttgcttgaatgatacatggctccttacaggtctaggaaggctacggccccatcctctggccaagatgtgtgtctcctgaactgaggcagcctgtgtgctttactatcaattgttgtgacagtacccacaggcaggattcttagtgcgggtccaagggcttcctggagaccaagtaccttgccctacctctggagctgttcttcaataatgcctattctttctgggcaggaattgtagcagggcatgtgtagcctatgtgacccccacagaaaagctggggagacaaggaaaaggcctcttttctagaacatctgccaggaattgaagggacaaagaagctgacttgtgcagtcagcaatgcggtatatgttgtagtgtctagatactctctcaggatcaagtattaatcagacaaatatccatgttgtgggcacaaatcccagcagctgtaattctgttagcagccactcagaagtccaggggcaaagacctcttttgggagttctttctacgtaatgtaagattgtatcccatggacagaggtgcaggagaaacattgatcaccaggaatgtgactggtgatcaccaggaatattggagttaggccaaatattcatgccttatccagataagctggttttcagggcaagtggtgagtcctagagggaaaggcagatattagacagaaccacacaatctggagccagggactgaggcctggcacagctctgatagggtagggagaacagatggtactgcaaacacgtgatgcatacttctctgttgtcagtctctggcctcctggatcccagagccagttggcagcagtagcactattgatttaaaatgagacacacttggcaccaggctgcttggctattggactgcatgtctttatttactgtcagtagatgcagtaaaacaaaacaaacaaaacagaagctggggctggttttgaagattggcaagaacgagtcagactcagttcaaggctgttttccttatgtctactactgaacaagtatctatctatctatctatgtatatccatgtacccatctatgtatgtatgtatgtatgtatgtacgtatctatctatctacctatctcagtctatcatatctatgtatctaccgatcaatgtattaattcatccacccactctatctatccatccatcctctatctatctatctatcatctacctcatctatctatatctatctatctatctatccactctatctactcaggttatatctatctttctatctgtctgtctatctatctatctatctatctatctatctatctatctatccatccagccaccctattcatttatgtctgtctgtctgtctgtctgtctgtctatctatctatctatctatctatctatctatctatctatctatctatctatcattctatcctatctatgtaccatctatctatctatctatctatctatctatctatctatctatctatctaatctatctccacctctattcatccactcaccctatctatccaaatccctcttctgtctatcatttatctacctatttatatatcatctatctctatgtatgtatgtatgtatgtatgtatgtatgtatctatctatctatctatctatctatctatctatctatactgttcaagggagaagacctagcttcctgtcctctcgtcacctctcacagagaatcacttgaagcttagtggtccaagcagcccacatggacacaggaacctgcccagccagagaagttctgggtcatgggcttcctgacttttatcaagtagtcagtatcagaaccccacagttcatcagccagtaggggcaacactgccatcctgaggcaatttggaaatctgagggcagtgttggttatcacagggacaccagaggcattcagtgggcagtgggcagggatgcccatagctctgatttcagggaattctccacaaaatatctctcacctcaaacgccagttatacccctgatgagaaacacttcattagggagtcacagaatctgttagctc

SEQ ID NO: 11591 - DNA, 6000 bp, Homo sapiens
ccatctgcagttggcatatggaaagaacctcctggtcacatttctctttccattttagaaatcattcttttgttgtgacactgtcttttcattttccttccctgactgctcttaacttcctactttatgctgtgcactcttgaagaaaactttctggtacctgatggttataaatccttggaggcgcgtgaagatgttttaggtagtaaagggcagtggccattttctcactttgtctccctggcctggtcttaagctgttgggcattctttagtcaggaacatcttcttatttgctgtacttcacacatactgcctaaggatatcaattagaattgcttacttaagaaaaatgcccagcaatcgttaaggccactcttgttcatttcctgcattttttttttttttttttttgagatggagtctcactctgttgcccaggctggagtgcagtggcgtgatcttggctcactgcaacttccgcctcctgggttcaagcgattcttctcctgcttcagcctccccagtagctgggactacacgctcccgccacctcaccaggctaatttttgtatttttagtagagactgggtttcaccacgttggtcaggcttgtctcaaacttccgacctcaagtgatctgcctgccttggcctccaaagtgctgggattacaggcgtgagccactgcgcccagcccattgtcttcattttaagagcactgactctgctgctcctcttgagacatcttgggcagtgattctgttcttctgggatactctgggtgtttctacttgtatttagaatggctggcttaaaagtctttgtttgaatattccgcattctgaatgctcttagttgtcagtaaaactatgcctgcctacgcactcttctatttctgatttaaaaataggttcagctgcctaacaattacacatactctattttgcacgcgcacattacttaaggagacatttagagggtagatagcttttattcctatgagttatcttgaaatcatcttcttaactatctttttttccccaaaggggccatattttgaaggatttgtgatgagacttttggtctgtgaagcccaagacacaatctccaacatgcacaggaaatccagtatcaaatttctaacatgtcttcagagacaggcccagggctggcttgagcgtgtcagagaggtgtgcactgcgtactacccatcatacatggccacacatgcctgtggctgtgagaaatactggtggtgacaaagacaatgagatgccagagaaaaagatcagtggggtttgcaaaagtgattaagatgtcgtcctaggtataattaaagacttaataaggttgaaggaaagagaggacattgcacataccgaggcccctgagagatctgcctggcaacccagaaagggacatatgggggaaaacgccttagtgtaaccaggtcagaattttcattctgggcagaactggaatttgaataataatactgagtcatatagcgcatacagctatgacatttcatttatttctctatataatgcaataaagtagatggattaaccgtgacgtttacagatggagcaggggagaatgaagaggcgtcagtttgggcatcaggctggatcttcacactctgacctcactctgctctatcctgcccagtgttgcttcacctgatatcaggggtgcaaggcaaccagatctgacaccagtttcagtttagatcctgcctttacctgggtgtgacccgggtccatctcttcagctcggcctctgctttctcttcataaacttttggggttagtcctcggatgatctctaaaacatggcccaggtgctccttgccagtagagtgtagccggatttggagggactggacactcagtgtgaacaagacgaaggcctcaggaggcagtaaaagctgacaagaggagagaaaatgaagcgcctacgggtgcatactggactagcgggcgaaaggccatgactccttagtttggagaaagaactggggccgagattggggaagtttcccagtgcaattaaaaaaaaaaaaaaaaagaactagaagaattacccaggtctggcttctttcgtgtagcctggggctgagtcgcaggctgagaaatccagtctggccagtagggggctccaccaagcgcagtctcagaatgcccaagagctccaccgtcgcccggggtctccaccaagcgcagtctcagaatgcccaagagccccaccgtcgcccggggtctccaagaggagtgggtcgtggtgggcgttgaagggccgtaaaagacgagcagcccgcgtccgcgtccgtcctcccgggtctccagtccgcaggcggccgccgcctcggccccgccctcccacctccattcccggccccgcggacccgaacggtccctctcgcaaccgatctgctggctggggcgctggggatgcgaattcctagaagccttaagaggctgcccagcgttggaagttcgtatccccaagaatgctggaggttccggctcacacaccccctccgggcacagagtcagctggggggtgctgggagggagaacgccccgctcctcaccccccatccccgtgcaccctggagcccagctccatacgttcggccaccccaggcggactcggggtggccgggtagcgggtggtggcaggaggggaccgggtaacggcaggcccgagaggaggtcgctgggccgggccggaggcgcacaggggctgcgtggctacctcggcggcacccgccccacctccgccggctaagcccggagggggacggtgagtcagatctcgggcacccgcgggtcgggcggggagggggaggcaggtcaggaaatgacatcagaggcctgtgctcagggagtgggggtctgagccgggctggggcggcgggggcggcagtgagtggggtgggggcgagcggacctcggcggagcctccggcctgaggcaggatcagggccccttcctgggggagtttcctgcctggtccgcccttccccgctctccccgccccctctccgggccgctccttgtatggtctgggcgccgctctctccccgccccctctcttctccctccctcctccttccgtgtgtccctccccgcccggctggaggctgctccggaccgggacgcagagtctgcggacccggcgccgaggcggccacccgagacgcggcgcgcacgctccggcctgcggtgaggcgcggggagcggcagggcggccccacggggagggggcgcggggcgccgggagggggcgagtgggggtcaccaaggggagctgggaccgcctggggctcctgagcccggctccgcgctgcgtaacccggcgacccaccccagcagcccggcccggccatggcggccccccgcccgtctcccgcgatctccgtttcggtctcggctccggctttttacgccccgcagaagaagttcggccctgtggtggccccaaagcccaaagtgaatcccttccggcccggggacagcgagcctcccccggcacccggggcccagcgcgcacagatgggccgggtgggcgagattcccccgccgcccccggaaggtatgcggcggggcttggggaatgtaccccggcaggagccggggtggggggcagtcgtttcgggaatttggggatgtctggaaaggttgttgccgagggggctgggcgcagccaccctgtcccgagcagatgttcttacctcatcgtggagctcgtggctgggagccagggctcctgggaccgttccaagtcccccgcctgggagtgggagtcgggaatgtggggcacgaatcttcccctccgggtccgttttccgaagtgtaacgggagctgcaccactcctcggcagtgcgcccggcctttcctgacctggtactcccagggcgccctgcgcccctcctttgcttccccacacgctctgggacccctgagagagttcttgggttaggggttagagcggttaactgaggggagcttgggtgaggggtagagggaccccggccgacgtctttctccttcctaccccagactttcccctgcctccacctccccttgctggggatggcgacgatgcagagggtgctctgggaggtgccttcccgccgccccctcccccgatcgaggaatcatttccccctgcgcctctggaggaggagatcttcccttccccgccgcctcctccggaggaggagggagggcctgaggcccccataccgcccccaccacaggtacggaggcctgggaggggcggctgcactggacacccccaaggagaggagaagagggccctttcttcttacctcccctgcacctctgccttgggggtggggggatagaggcatggaataggtgctctgacctctgaccctctagcccagggagaaggtgagcagtattgatttggagatcgactctctgtcctcactgctggatgacatgaccaagaatgatcctttcaaagcccgggtaagggaccggagagtaggaaaagcagggctcagggccagagagactgggcatagaactaaggaggatggtgtcctcctgactgcatctctcttccctctcccaccccttgcaggtgtcatctggatatgtgcccccaccagtggccactccattcagttccaagtccagtaccaagcctgcagccgggggcacagcacccctgcctccttggaagtccccttccagctcccagcctctgccccaggttccggctccggctcagagccagacacagttccatgttcagccccagccccagcccaagcctcaggtccaactccatgtccagtcccagacccagcctgtgtctttggctaacacccagccccgagggcccccagcctcatctccggctccagcccctaagttttctccagtgactcctaagtttactcctgtggcttccaagttcagtcctggagccccaggtggatctgggtcacaaccaaatcaaaaattggggcaccccgaagctctttctgctggcacaggctcccctcaacctcccagcttcacctatgcccagcagagggagaagccccgagtgcaggagaagcagcaccccgtgcccccaccggctcagaaccaaaaccaggtgagggatggtgataggacaaggcttggtaccagggcactggggcggggctgggtcaggagccagagcataagcataaggtgattggagagtcagggtggacacgggggttgcggggtggcgggataggaattttcatcctctggggttagcctggtggaacaatggtaggaaaatgctcctctggaggagaggcctggctgggtgtggggctgggtggggcctggctgggacggcgcagagagcatgggctctgaattaggaggatctggtggacctttccttgtgcctttaccccagaaagttaaagggagggatgagatcaccagttccaccttggtttttcccattcttgggtcttgagttaatctccctgctcctctgagcactctttctgcctgagggcttggaggtaagagacagccccagtaaacactggttgagccagcatccaccacgtgccaggcactgtgctctgtgcccaggagggtaggacatgggagggaagagatctctgcaagaagctcagccttcaggtgtcagatggacctggaatggaattcttggctcagcttctcccaagtccttagactgggcaagttaggtgaaccctgagcctcagtttctcaatctttaacattctctactccatacagtggttgtgaagattgggtgagctaatacctagagagtgttgggttctgtatctagtacaggaatgctcaaaatagaaaagctgtaattacaaaatggttcttgccttctagttcaggaaataagatcgtccaatttctggtgacgaagatgaccctgatggtcatctagtccaagcatccagagtccactgatagtgttg

SEQ ID NO: 11592 - DNA, 6000 bp, Homo sapiens
tgtcctgatctggaaatttccagagaagattgggaattcctcctaagctggccagacagagtgacatctctctacagattctagagttctgcctctctcccactacacttcagaggtggctttgaaagaccacccaggcctcctgaccagccctctcacgtggcagctcctatgggtgccacataaccgcagtctctccacatcgcctttcctccccatcgtggagggtaccttcctggtaccaggaaggatcttccatttgaagatacaactgccttcttggtaataattcctttgccttgggcccacatcctggattccaagtaaccaagggcaggctacttccagtcacacccaaagagatggcttgtccctcggctggggctcaacttctgctttggaaaccagctgaagtccaggacacaggctccccaagacctcactagagatctggtgtccttagactctccctattaaactccagcttatttacatagtcacgggcattttaggacaataaaaagaaagtaaacatcagaggcaggatttcctcaaagacattacattgtacatacatgacggtatgtcctgatttctttcatgcgatgctcgaaaataacctaagtaatccacatcgattactgcagagaagccagaagagtaactattcctggggatagctgatgtcaactaggagggggtgcaaaggaactttctgggtggtagaaatagtctttatcttaatgcaaggaatgattgcatatgtaaaaatgtatccagctgtgcattaagatatgcacattttaccgtgtataaattacagctgaatggaaaagtagaaaaagagaaaaactctgctctgagaaaatcttgaatgacaaaaaagttaataaatcactcaatttttcaactacacttagagagaccaggattctaagctgactgaccagagaccagtccttgaacctctccagactttatcatatccacttgtaaaacaagaaggttgaacaagatggtatttaaggtctcgtctaccatgaacaattcggcaaacctgccggagaccatcagccatccagtgtggcttaccacctcccaacctaagtgaactcacagccaagcagcaccttaacttttcatgccagggttctcagttctcctaaggatgatggggggagggatgtgccacaataaaacacatctgcttccagtaattccagtcagcatatatgctttcaccaaacgtagtcaggagatctcctaacattattgccacctaattgtaaatgctaactaaggagccatcagaatggcccacgatacctcaagctcaacatatcgaaactgaaatccatcattttcactcaaaagcccccttctgtgctcccacttagttaatgtcatggccatcttcttcattattcaaattagaaaactcaatgtcctatttaaagttttactaacctccccataggggatagactgttttatcttgatagaacactgcatttttaatataaagaaatgctattcttcctgtaagccatcataccagaacaatgccacagaaagcatcaattcctactagtcataaaaggcagctggaacatagatgtgaacataatgaaatcataccaaatgtctctacctcccaggatggctttgctagttgaaatccctggattctggattcagacaggctcataatttgactccctcactccagtccctctatcctgataaccaccctccctagtgaggccaaatttctacagatctggtccagttactcctttccttacagaccaccatgattccccctgtgccttataagacaaagtacaatcccaagcttggtaagtgatttacggcctaacttaattttcaagtttttttcccctactccatacaagctttgcccctcacccaccagcaccatgtgccacagcctcagctatgtccagctactgatattccctggacaccactacagtttcctaagactgactatgtgtctgcctgttccggaattgcttccccttcattgaaatcctgcccacacaaaattttttttatcattttgcatcttgatttataatataaaaaataagacagaagacttcatttccccaaaaataccaaaatttttacaagacaattcattaggtgcattgcctggaaagtagcaggaatcctcattagtcagcatcttcacatagcatttgtctgaatggagtagtttatcattactccaaagacatactgaagtttcattaaaattttttgatgtaatttttcttctatctcactctcttggattctaacgttttcttttctcttttcttcttcttttttttttttttttttttttttttgagacagagtctctctctgttgcccaggccagagtgcagtggtgcaatctcagcagctcaccacaacctccgcctcccgggttcaagcaattctcctgccttggcctcccgagtagctgggaccacaggctcacgccaccacgcctcgctaatttttgtatttttagtagagacaggttttcactgtgttggccaggatggtctcaaactcctgaccttgtgatctgcctgccttgacctaccaaagtgctgggattacaggcataagccaccacgccctgccaacactttccatattatttactctatgtggtagttcatgaaacctttcccttctaaaagatggcctgttaaagtgtcaaaaagaccaacaactagaattggcctgcctatgaccatctgtaagacaacagaccctctaagagaagaaatcaaagaagtttgaattcacacattctgagacagacggaagaaagatatgctattattgctggataatgaacacatggatttatgagaaaagcagaaatatatatgaaaaatttaaattataataaggttagagactttccatctgccattctaggagctaacagtatctccataggcttgatatttttataaaaacaagtgcttcaagaaaagagttaacagtcagtcagtgtgtgttgctaatgctggagaattgattcaactagggatgacacttgggaccaattaattcaaagctggctttaaaaaaaaaaagtagatacaataaatcagggagtagagcttcatttaaatatagtgagggactgggatagattacttgaaaaagctcagaaccaaagattgtctcaaaaggccaaagacaactataagtaaaacaagtgctaggtttctataagctatcaaacactgaaatcaaaaccatgaaagaaaatactggccaactggatgtcaactggaaaatttatacaaagtttgttaatttgtacttgtatcccctcaatctataaaaattttaaaacatgttttaaagcaacaagaaataaaaacagtttgttataaatgaaaattttcaggaagttatcgttctcaagatgcattttactgaaattacaagacaatttttaatagcaatcaagtaggaaccttgaggagaaatggggaaacgtaaagacttacatgaaatcttatacgggagtgtggtcacagtaaaaatatatcttctttaaaaagatgtttctatttcttttgtattgctgttttacctttaattttttaattttttttttttttttagtttaggtacttctcaatttttaaggggattgtgctctagaagtttctgatctagttgttcagaacctgaaatgtattttaatgtagacaccgcattgtatatagcactcacattccatagctaaccgtaaagagctctgctgttgctgtagttgagtgttgattcaaggtacacaggacaggctgagatctgggtcctggcttctggaggccatgagatgtagaatagaaatgttgaagaacaaaaagaattgtttcttgtatttctgaaggtcaagcttgagcatgacaaacttctccacagggaaagtttttatttgcctttttgatagtcaaatcacggtcctgcctctccttttgttgggagcctcattttggtgggttagtaaagggaacatctccaacattcataggagcatttgtttaaagggctcccacgtggcttccagccacttctctccactctgaaacttctatgaattagagaatccccctaattcattcaaatatattacggcctatatttttttaatattacaatgatctgacacagttgggtattgaaaatagagtaaaaccattacaccacaattatcccttcatccctgatgaacatcctcttgtccatttttttaatcatacgaataaatgaaaaaaatgtgataaggtcataagagagttaggaacattatgtaatcttctttaaaaataagataagctgctctacccagtaaaaccctaggtttctgcagccatatgacagtctgatatgcatgctatggtcggtcacggtggctcacgcctgtagtccagtactttggaaggccgaggcaggcagatagcctgaggccacgagatctagaccagcctggccaacacggtgaaaccctgcctctactaaaaatacaaaaattagctgggcatggtggcgtgcgcctgtaaccccaactactcaggaggctgaggcaggagaatcgcttgaacctgggaggtggaggttgcagtaagctgagatcgcgccactgcactccagcctgggtgacagaatgagaatctgtctcaaataaagtaataataataataatatgcatgctatgctctggtccatgaagaccttccacacagtgatttagaggttcagactccttttctctgtggctccaccatcgtctagagcccgggaagtctagctggcaaagagagaaagggaggatagagaagcattctctcttcttgaccacactgaaccagcgtgaacacattccttgccctcctccctttggtaagagctagtcacatgtctccacctggatgcacagggaccaggaaggcagttactggctgggtagcagctttgcgggagtgatgatgaaaaggggaaagaaaccttctgtgaatggttagtggtctcttttacaggtactatgacaccaaaaaggagtaaactttaaagacaccaaggtaagtttccaggagatgcagcatttgatttgcattgaaggatgacaggcaaaaatgagataagggcatttttctggagagaaaacagcataggcaaatgcaggtgggggaggaagaccgtgcaacatagaagcaattgaaaggaataaagccgaagcccaaggaccacttcaaagatacctctctctagagaaatgacccaccgcctatctgttaagagtttgacaaatgaaatctggctgaacctcaggccttgtcggaaattagtcattttgcttgcctttgcggatggtgttaaaatgatcaaatttggttttctgcatctctgagtttgattcctctgatgagaactgatgcgaatgccaactgactttttatgaagagtggttgatatttagtattctacagagtctttctgggtaagtgtaaccagagccagtgaataatagaagcagtgtatatctgtcaagtgtaattataacactgaattatgctcatcctgcattccggttcctgtatacattagtttaaacatcagaacatgctggcatttcagacctgtgaggattttactttgaaaaatagcatgcccttgtttttagccatttttaacaggaaaaaagaacttatatcttgttcaaaattattttatggtaaagtttgaccactctgttttttaaaaaaatcttctcaagtttctaaaaatagggaagaaatgaggaatatttcagtctagttttaaatgccctctaattttctgtatttaaataaaatcgtatacaataaaataatatcttattttgataaactgaactttctgattaaatagttgttaaagttacagaatagagttgcttataaagtcaccaatctt

SEQ ID NO: 11593 - DNA, 6000 bp, Homo sapiens
tgtctcaaaaaaaaaaaaaacacaatgtctagaatagtggaatcgatgttagcattttatagatgtggcagctgaaggaaagagaaggtaattgtcctattcaagatgacaagataagttattagaattcttatttttctctgtttcctccttcagctgtggagagggagtgtgtgtcatggcgccccaggccagggaggggaggtagggtaatgggcctgggacatcagaagacatggcacactggcagagtagagccagcctgggtgctggagtcagactgcagacttggttccctgctcgtcccagttctgctgcctgcggacaagttatttcagctctcttagctccacatgatttttttcatctgtcaggtgagaataatggcacctccctcccagggaggtgaggatcaagggaagtagcccattagctccaggaggtggggctgtgtctgccctggtggctgctgtgagcaagtccagtgccgggcacaggagcagctctctttcctcacctctctgcaccgtggtcccttaaacccccggccccttcctgtccaggcagtgtgtggccatctaacgtgccatccagttcttcaggctgtcattctgtcagagcctggagtcgaggctgcgagggccctggctggctgggtgttgcctgagagttgcccaggggaataagacttttaagactagattttgtgctcagtgcctcattcctctgcgactttgcccatggacatgtcttagaaactgaagttgcttcagaacagccctgagaagggcaggggcaagggcctgacagaagaggaagtgctccttccagagggctcagccagagccccatgggtgtgctggtcagcaggagggcagtcggagcctcaagccatccatgcctctctctccttacaggtactctgatggctaccgcagctcctccctcctccgggccgtggcccacctgcggtcccagctctgggcccacctccctcgagcccccctagctcccagatggagcccctctgcctggtgctgggttgggggagccctgctaggccccatggtactgagtaagcatccccacctctgccttgtggccctgtgtgaggcagaagaggcccctcctgccagctccacaccccatgtcgtggggtctcgctttaactggaagctcttctggcagtttctgcacccccacctgctggtcctgggggtagccgtcgtggtgaggctttccccacttctccatcctggggacagggcaggacccagagctgcaaagggatggcattcctgcctcgctgcctctcaggggagagctcaggggagcagcaagggctagccaggggtccaggggtgccaggagcatcaacactgggtggctgggtgggcagggttccgtggggactggaagccagggtttgaacctctgagaggcactgatgtgtccacatgaccagccacaacctggacaagcgcagtgctcagtagtgggagaggaagggccaagatctggctggggatggggaggagtggctcccccacttaaaacatttgtgccctctgtctccccattccagctggccttgggtgcggcactcgtgaatgtacagatccccctgctcctgggccagctggtagaggtcgtggccaagtacacaagggaccacgtagggagtttcatgactgagtcccagaatctcagcacccacctgcttatcctctatggtgtccaggtacagccgggagtggggctggggaccgccgaggagccacccgaggcatccctgagtgcactgggctctttcgcagggactgctgaccttcgggtacctggtgctgctgtcccacgttggcgagcgcatggctgtggacatgcggagggccctcttcagctccctgctccggtactgccagccgcagggtgcagagttggggtgactgatggcctgaggggtctgggggtaggaccttatcctgaagtaatgtctccctcttctgccctccttattggttcttgtcccatgccagacaagacatcaccttctttgacgccaataagacagggcagctggtgagccgcttgacaactgacgtgcaggagtttaagtcatccttcaagcttgtcatctcccaggtcagtggcccagtggcccccaccacgtccacacacacactttcccatgtggattcaccaggccagccctgcccgccccagccctgatgttgggctgacaggcgcatgctgactcgagaaacccactgcctgtgagggcatgggtgagggaccatggaagttcatggaaggaaagtgtagaggcagtgtccaaggtcaggacaggctgcttctccactgctctgaaaccgaatcttccctggaaagccttcccaagcactcagacaagagcctttcctggcaagagcaaaatcacttcgcctgccttgtccccagagtgcctggattgctgacaagcattgagcatgtgcagtggcctaccgaacacagatgccctccccttatccgcccacaccgactctgactgctggatcatgccacacactggcctaggcagtcactggtgtacccccatgcagttctctttgttcagttcctagaacagaaagagaagcaagctgggatttgtctaggggaaggatgccacagttcatagcattctcgctcggccccctcaggcctgctgctcgcaccccaactggccgagttagggttacgtactgtgaccggtggactgccactgggcctcccaggggccaagacctgggccttggccgtgggagtgcagagctacagtcagctgacccttggaaaagtccttcctgtcatggtgcggacgccgtagcctcccgccttccctcccactccctaggggctgcgaagctgcacccaggtggcaggctgcctggtgtccctgtccatgctgtcgacacgcctcacgctgctgctgatggtggccacaccagccctgatgggagtgggcaccctgatgggctcaggcctccgaaaattgtctcgccagtgtcaggagcaggtaccggcattcctggccatcctcttcaccctccccacaccgtttctctttccactccccggaactcctccctgtccccatcctggactccttgtcctgttttctggactccttgtcctgtttcctggactccttgcagatcgccagggcaatgggcgtagcagacgaggccctgggcaatgtgcggactgtgcgtgccttcgccatggagcaacgggaagaggagtgagtcctgggagggcggagcacaaagcagagatgccccccacaccctgccaacccttcgtgccagcccagctgcctcctgaatgcactggtctctctcaccaggcgctatggggcagagctggaagcctgccgctgccgggcagaggagctgggccgcggcatcgccttgttccaagggctttccaacatcgccttcaactgtgagtgagccatttgggggctggaggggcgcttgtgggctggggaggagctgggagcagccaaggcaggcaaaggccctcccttcatctgctggctgcctgcattcgcctcgggccagctgctaactcttgcaggtaaagggagggtgccgatgtcccaacccagctatgggactccatgtggaacgctacagggccaccctcaaggaggccatggaggcgtgcccaccccaacttgctcttccgaggaggaagccaacgctgggaccagtcatgcgcctcacctgactctcccagtcagcagtggcagagcaggcccagggctgtttcctctgccctggcttcgtcctccctcacttcccctctcctgcaggcatggtcttgggtaccctatttattgggggctcccttgtggccggacagcagctgacagggggagacctcatgtccttcctggtggcctcccagacagtgcaaaggtaagtgggggccgttcccattgctacagagccccctgccgccctccagagccctgctgggttaggggacacgggtgccagccttctctgggggccgactgctgtgcagctccaggcctgcccagcttccccagggatgcatagggtggggagagagagcccctcagggcccataacaaccctcctggctggggcagtggcgctgcagcaggcaggtgcttgtcatcttcagccttccaaaggacccagaagtttccttgacaggctttttaaaaatttgtttcaactgtggtaaagtacacaaaacataaaatacagcattttaaccattttgaagtgtgcagctcatgggcagtgggtgcactcacattgctgtgcggctgttgtcaccgtccgcctccagaactcttacctggcagagcggaaactatccccatgacatgggaatccccatttgccctcccccagcccctggcacccaccattccactttctgtccttatgatttgacaactctagggacgtcctctaagtggagtcagactatgtccttttgtgactgcgttttgtcactccacattgtgtcctcagcttcctccgtgttgcaccctgtccgaattcccttccgctgcaggctgtgacattccatgcatggaaggaccatccttgacaggctgtgtgagctgcccttccccatgcctgccacttccagggatgacaagctgacccctgtccccacacaccccacccttatagcttattgctttgcgttggtccaaaaccacccgctcagctgagcctctgggatgaccagagctgatcaccagacagctcaaggcgggcctcccccctcctatctctttccaagctaaacacaagcagttctacataaatatgttatggtaaataatgagatagtaaatatgctgtaacagatcatcaaagggtgaagacccgtctccacgaaccgtgcatcacctctgccaccccatccctccccccacgacccccctgctcttccaccggggcccccaccccattctactgaggcatgtgtcctcgccctgctgcatggtgcacccctgcgtgtgtgtccgccggatcagaacccctcactgcagggtgtactgtcccaggaagcgggaggcggacggagacaggctcccattttcagccccaaacctgacattccacagagacgttcctcccatttccgcagctgcatggacaccctcgcgtgccccgtttctgctcgtgctccctaatctgagcaccttcagaccctttctggtcccgggctcaggcctccttggcagcctcgccctcctccagcccaaggagctgttctgtcgtggctttggaattcagatgctctcactgtgatagagatggggtcttggggggctgggagctgttctgtcgtggctttggagttcagatgctctcactgtgatagagatggggtcttggggggctgcctccaccactgcctgccctgctcagcgctgacccacttcccttgaccagagttttggcctctctgaatgggacggtcgttttagtcctgagggcccataagaagcccagtggcggctgggtgcggtggcgcacacctgtaatcccagcactttgggaggccgaggtgggtggatcgtgaagttaagagatcgagaccatcctggccaacatggtgaaaccccgtctctactaaaaatacaaaaattagctgggcatggtggtagtcccagctactcgggaggctgaggcaagagaatcgcttgaacctggtaggcagaggttgcagtgacctgagattgcgccactgcaccccagcctggcaacagcaagactccgtctcaaaaaaaaaaaaagaagcccagtggctcccttaataaaatcaccccttagccctctgtggtgggcagtggtgggacagtctccctgtggggagggtggctgcactgtccagccccaaccctcccgcttcgggacccccacttcccctttagggcctgagactctgactttacctcccacc

SEQ ID NO: 11594 - DNA, 6000 bp, Homo sapiens
gggcctagaaaagcacctggcacacagtgaagcattcagtaagtatgtgttgaatgaatgagtgtatctccttgaacctcattttctcatctctcgagtgtaaataatatcactgacatcagaatgacactgtgcgggtcaaagatgaccacgtgaaaatgctcactaagactggagacccctggaggacagaaacagggttttctcattctctaacaccctagagtgtccctgttcagggcccaaacttagagcccaaggggtgcttacaccgaatgcagactccgaccccagcctgaggggtcccccaacaccactctcctcacctttacaatctcaggatcgaggtcaccattgcaactgtcaaaatacttcttcaggtcctgaaaagggatatgagtgggggaatgggacagagtttaacctcaatctgggcccctataccttcccaaggctactgtcctccaaaccccgcctttcacctggtcacagaattcaaaaaccaaagtcagcttcttgtcgctgtgcaggacgtcatgaagcctagggcaaaagaagggctcagccaggcaggtccgcctgacagacgtccagtgtcagcccccgcctcccccaagcggccacaccggcaaggagcacccgcctcccgcacacctgacgatgttcttgtgcttcagctccttgagtaggcagatctcccggagggcggaactcggcacaccctgcatatgtgagggggccggtgggcagcagtcagatcccacccagcccaggccctcaaacccctccccaggccgtatcccactccccagtcctacctcatcatcgtcatccagcctcacccgtttcagagccacgatctcatgagtctcccggtttttggccttgaacacagttccgtaggtgcctaggggaaggaggtcaggggtcagggtgaggatgcggcactcttccctaagccaggaaatgcctcctgagagaggtgaaggcagcgtctcagtatgcaagggaagggattcagggtgaaggtaggttggtgagctttgtgagtgaggatgtggcaggtggggagggaggagaaggtgcccaccgaggctccaggggctcggcaggaggggcgagtgcggttgccagggcaaggatgtctaaaatgaaggcggtgctccggaagggtctggaaatagtgaggaggggtctgggagaggactgaggggctgcagaaatattgaggttggaggtctgcagcaagaaacgaggctgggggtcggggtgaggttgtccaagtgctgctgaggctggggtgagaaatttcaggaagtgtcgcggttgggaggtcgggtctactgggaacgctaaggttggagtgagagccctgcgggaaatgctaacacggggaagactggtgtctgcacggagtgctgagctagggggccagggctgcagccgctgctgagatcggagcctgtaggcattgctgacggtaagggagccagggcttcaaggaatgccgaaggatctgcagaggagctcttgcaggaacatctcgagattccattaccttccccaatcttttccagtttctcgtatttctgcatcgcggcggccgcggggacccctgcgggccctcggttttaagactctggccccggcgttgcagaggaggcggcacctgagcctccagccccgccccgtctgcccgcgcagggccttctggggcttgtagtcctaaaacgactaggtctccccgcaatgcccgagaccgaggacaagaagactacaacccccagccgtctgcgctcacgctctctgcagcactcgactccagggctccgtttctaccgcggaggcaaaccttggacttcaagtcccaggaagcaacgcgtgtccgttttccgggcgccccgccgcggcgccgtggttcccagtgtgccccgctgttgttattccttttatgtgctcccagccctcttgaaaagggccgctccgggactacgcgttccagaatgcagcggaaatgggggcggagcgctctcggttaggggtttggggtttggcggcctagatcccgggcactggcggcccagcgctgacctggttggtggcattgtgttcccaacggcctcttgacgacctcagcacgggtttccacctctccccaagccacctagtgaccccagaattgactggggaatgcctgtgagcgatgatgacctcacagggaacagctgaccgcagggctgggagaacagctgtgccccttcgaggctggattttagtggagggacacacgccaaagaccccctctctgctgagccccgtttgttgtctcggagcccacccgactctagccgctgaactctgacatgctgaggaaaactgggtggagccctgggggtccccctcagaccccagtctccggaacagggcccactggagtcagccagggtgtggcaggcaggttggttaaccccctccacagacaagaccacagaccgatgctcaacttgcagcagcctctgcctcaccccttaaaggagctgattatagattcccttacgctgcctctctaattgtctcatgattgcattcttgagggctatggaccgagggaaaaggatcccaaacagcactcctcagcaccggaaccagagttgctgctaaacacgtgttaattaactcgtttctatctgaatgcttttgcatacacaagggaaaagaagcaaaaagtgtattccttatctggaagactttgtgatttcgttgggcaaaaaagaactacacacaaaggtcttgaatgataagtgatggctctgcctagggttcggttcagtgtggaggttccattcaagaggaaggaggccagcacagcgaatctctgtccctctctggaagtggagagcctctaacaagttaccctctcccagatcagctcagggtaccgggcggccagcctccagcccctgtcacccttctcacccactcgccacccgtccctcaggggctttcttggaggcacgggggttattgaggggggcaagagaatctcaaccccgatacgtttatgtttcgacttccccgaatttccttgtgcctgcgttttgctgcctgggatccctagcgtgagaagggctcctttacactcagaggtgccgtaatggagccaagggacggcatcctcggggctcccgagccccgagtggagaagcttggggcagagggacggcgggggcggcccctggtgccgggctgtgcctggaagcgcgcccccgccccggcccccgctcccgcctccccacccgcgaaggcgggaccgcgcacggtgcgccggggggcgcgcacgcagggggctggcctgcccgcggcgcgggggaaagttgagttgggagaagttgggagcggcgggggcgcgccccggggtgggcacggggcagtcgtcgggagcgcgcgagtgcgccggaggacggggagagaccccgagacccccggggcacgaagtccagagcgagcgggtaggcggagaggtggtggcgggggacggccagggccgcagagggaggaagggagggggaaggagaggggggaactcgggactcgagcggggagggagtggaagtggaggaaagggcggagactggggcgcggggaaccgcggtcttggggagaaggatggggaggcggatggagtgctggtcggaagcgggcattccggggtccccttctcagagttccctaaagccagggtgccgcgccccctgccaccaggagggggtagtctccccgaggcgccgccggccctcccactccccggctggctccagaccacccctcccctccggcccccccgcatagtccttcagtcccgtccggggcgcccagactgggggttgcccggggcccccatccccaatctccgggttgagaggcgaagccaggaaaggcgggtggcgggtaaggtcggacaaggggtcagacagaagagggagcagctgggtgggaatgggaaagatgagcccggagagttggacctgactcccggggtcggtttgtccaggcgggaagttctgtgctgggtgtgagaggcggcactgcctgaaacccagggtctactttatcccccttcgtttcccccgccagccccacatggaagagctgcggaatttacgagttcacttggggggtggttaatgcccaagtgggggtccgaggtgctaatcccttggtcaaggggagagatactaatcctctgggccggtcggggctggtcccgggaatgtgcccctacccggattatcggcaccgatgctctggacagaagctgctttgtgttctgggacagcaggggagggggtgcagaggagtgtggaggagcgcgacgagggcacagcctgaggtgggagtgggcgcctgcaggtgctctgggcggactctccccacacccttcccagactgggtgcactcacgctcacccacaccacccgccctggctgaaggcctgctgagggggaggggaagagcgtggttagccaagttggagtgcttgccaagaatgtgttgccaggctccccatcctgggtgacccccccagacctatattgtttgacgctacactgacttgtcttactcctaagtcaggcacccccagtccccagcaacacactgggagcatgggttgttgggtaccgtcactttttgccagtcttgggtgccccctgtgctgacccgctaggaatgcgccccctatttgcagggattgggctccctcctgcagctccttctctgcccccaccacacagtgtcctccccagactccctacagtcacagtcaggagggtggcagcactgccactcagattttcctggctccaggctctagaggggcgggatccagactgcccctcagaggcagaacctcaaggttgcggtgcccaccccctcccagcccatcacatgcccctcccccattataaagctctgcccagcccatgcccaccttctgtgccttcctctctctcagtgagtgagtggagttgagctcctgccctccacccagccagcctgcttccctcctgccggtccccaaggacctgggggagggaagcctcctgccggcctgtactggggagggggcaccccctccctgcaggggcatcttgggctctctccagagttcttccattcgtctgcttcctgtctcggcagcccggccccggctccacggggtgtctcaccctccccaccacaccctctctggtctcaggcccacctctggtgggtgccctgaccctgcgaggctccgttgtctgcctgggccttcactcccctctttccccagctcattatcactccctccctcatctttgttgctttctctccgggcctgggccttgactcctttctccctcatttttcttgcggcctttcccacctcctctctcctcctccctctactcagcctctcggcccttttcggcccccctcgcctcagtcctctcctgtctccttgttcttctcttttcttcctataaataactctcctctgtgctgtggctgccgctaagggccactctgaggcccttcatactccaggaggatccccagcagcgcagcctgcgcgtggtggctcctgccctcccagggctctcgatggtgatcaggcctctcccccatccaggttatgcctccgcctcgttgccctgaaagccgcagcgacagcgaaaagggctaagattcggccatgagcagcgcccctcggcgccccgccaagggcgcagattctttctgtacggtgagtgtggcccccaggtcgccagcccaaccttccctccctgggcagccttgggtgctccggccaagggtcctcgccaaccaggggtgtgagcgtgtgtgagtgtggagactgggaggatgctgccatccctaccctgactttgcatgatggtcgtagggggggatgggtagtgggggtatcagacgtcttccagtcctggggagggagttgag

SEQ ID NO: 11595 - DNA, 6000 bp, Homo sapiens
gactccatctcaaaaaaaaaaaaaagttatttatgattgtggatcacataaaaagcactcatttggctgagtgtggtggctcatgactgtattcccagcactttgggaggtggaggcaggtggatcttttgagctcaggagttcaagaccagccttggcaacatggcgaagtcctatctctattaaaaaaaatacaaaaattagccgggcgtggtagcgcatcgctgcggtcccagttacccagaaggtcaaggctgcagcaagctgagatcgtaccactgcgctcctacctgggcaacagagcaagaccctgtctcaaaaaacaaaacacaacaaagaaacagattcaagcgcctgtgcctcctgggagaaatatgcttctcctttcccagcctcgtttaaaaatgtgtggttacagataacaatatttattatgctttttcatttatgccatcacattaaactccccacccccaacaaactccgaggtgaggattattaccattttgcagatcaggaaactacggtgacaagcagctctgggcagctctgttgcctaggctggagttcagtggcacgatcatggctcactgcaacctcgacctcctgggctcaagcgatcctcccacgttggcctcccaagtagctgggactacaggcaagcaccaccatgcctggctaatttttgtttttttttttcagagatgaggttttgccatgttgcccaggctggtctggaactcctgggttcaaacgatctgcccactttggcttcccaaagtgctgggattacaattccaggcatgagccactgcacctggctacagtttttaaattttacatagagatggtgtcttcttatgttgcccaggctggtctcaaactcctgggctcaagagatcctcctgcctcgaccttctgaaatcctggtattacaggtgtgagccaccatccctccccctgcccaccctgccctgggtttagccagagaaaagaactcgggatgaggggagaagaaacagggaaagagaaatgggaaaatgggggagaaaaggaggtgagtaaagagagaggagaaagggactggctaaatttgaaaaaaatcacagaaggtcagtgctggaaacaagaatatttggcttagactctgtttaaattatgaagaaacggagacccaaggaaggaaatgtctcttggagaattacctaggaacttagtaactgaaaaggatctggacctgcagtgttcagtatggtagcctccggccatatgtggctatggagcacttgaaatgtggctagtctgaattgagatttgctgttaagtgtaaaatacacatcagacttcaaatattccatataaaaaaagaatgtaaagtatctcatcaataatttttcatattgactccatgttgaaatgattgggatatatctaataatacaataaaatattaaaattaattttaccttttttaactctaaaaaatgtggttactaaaaaattttaaacaacatatatggctcacatttgtggcttgcactagatttctactggacagcgctggtctagaaatcttctgaccttgagctaagtgtatctgctgtttcccagtctcttccaacaagtcatttacaacctatcatgtgccagctgatgagaacagattcagttgcagtctaaggatgagactaaaacagggataacaggtgctggtaggcaatatcagtgagttctatcttatatactcctagaatggtatctataagatatacatacaagatattcttgagtggttcttaactttaccagccccaatgttccattttaataacatttttataactccccatttactattgtgaaatgaagtttatagatagtatagcctaactacatacataatttcaaaaaaaattatagtgtctgaaccaaagcagaaagaataaaaggaaatcctttataataagataatacttttcagtatgctagaaagcataattagtcagatgctagtagttatgcataggagcaccttgaatgtgacagtacaaatgcagactgaacgctatgaataacactgctatcagtgacccagttctccaaaatggtgagtaattcctaataaattcctgaacacaacaaagtataatcttccttctgttaacatggtggttacattccttaaaaattcagcacattttacacccctacaagattactttgttttttgtatataagacacaggcacatcagatgattataaccagtttttttttaacctatatgaatattcagtaggacatgtgaaagctgtgtgggatcaggacagttttcttgtgtgataccatcttgcaatgtgcaagacatggagcctccttggctcctctcccccaatcatttgacaacaaaattgccccgaacatttccaaattgctccttagggagggtgccattctggttggggaaccactgtggtggtctgaatgctttacctgttccctgttccccagccttaccttgggctgttctcccctcaccaggctcaaagatgccctgggccttcccagttcttctccaagccaatctctttcctctctcaggacattctggtgctcttttctttgcctggaaaactgtccacttcatgtctggataacttttcctgaacctttggatctcagcattgccaaattcccagtctaatttaatactttgtttagtttttccacaggactctgtgcttttctgcaatggtacttatcagactgggatttctacctgttttattcttgctatgtcaagcgtgtttattacctgtctccctcaactttcagttccctgagagcagggaccatgcccatctcgtccaccgcttgtttacccagcactcacgaagatgcccggaacttagcatccttagatgaacgtacgtgcctggcaaacaacaaacatttcttaggcaactgaaaggctgatgggattccacagccaattgggagaaaagcgctctcgagggtgggggtatgctttttccagggcagatggtgttcagcccaagttacggggcagctttggtccactctggatttgcctggattcgcgtatgtgggggcgaacgcgtcttatcggggggcggccggttggggccaggcagcccggatcccagccgaggaggtgcgcggtgctgagaggccgtgggagcgaccatagagaacgcgcgggcggagcgagcggccggatgcggtcaccatagagacgggtgactgacaggcagcggaagaggaagctgcggacaggggctgtgaggtggcagcggctgcagcggcggagccggcgcctcagcgggcactggggtctgttcccccttccccgtccctgctccctgccaggcgcgtgcgggacgccgctcttggtccccacgcctccgccccgccccctcccgggacgccgggagaccccggccgtcctttatccggtgtccgccggcccccggccctgaaacccgggcctcctccccgagggccttgggcgtccctcctggtcctgcgctcgcggcctcgatgctgtctctggcgcggcctccgctcccgccgactggcctgagaacgaggtctgtgccccagtctcccagccgcgacctccgaccccgcctcgcagaacgacccgagctggtctcccgagcccccttctcagcagcccggtgacgtggccagtttatttctgttttgagacgaacggcgaagactcgcgtcgggtcttcgttctagggctagacttggtctctgatcgccgagaggtagcgcaggggctgtgggcccccggcaggggtcctgtcggaagctggccgcgcttctgtttgcgttcccaggaccctggcattgtctctagttgctgcttgtgctctctctttgcttttggtttgcttcatttggcccctggggccctggtaaaaccaggcaccgaatcgctcgcacacagagttccagtccccgcctgctgtctcctcagcagctggggttccgaggagaatgccctgcaagatggctccatcggccatggcgctcctgagaggctgtcagtgctgagtcaccgatctacctcattcgggtgggcagaacttatgtgtgccatgcgagtggctccagaccgctcctgagtgggaggaggggttcctgtagccgttgcgtcttctcaaacacggggagcagagtagaaagaggctctggccccttcccttgtgcccaccgggcctgccgcagtggctcagcagccccttcagtagcccgcctgaggaccgatgccagaggcaggcattcttccggaaaggcccactgaggcaggctccggctcctctggttggggctgttgttttgatggatcgtgtgcttttcccttacctcttatcacttgctgtcatctgttgacttaggcccagtctgcagatgtgtgtagtgttcctttttgggttagctttggcagtattgagttttacttcctcctctttttagtggaagacagaccataatcccagtgtgagtgaaattgattgtttcatttattaccgttttggctgggggttagttccgacaccttcacagttgaagagcaggcagaaggagttgtgaagacaggacaatcttcttggggatgctggtcctggaagccagcgggcctcgctctgtctttggcctcattgaccccaggttctctggttaaaactgaaagcctactactggcctggtgcccatcaatccattgatccttgaggctgtgcccctggggcacccacctggcagggcctaccaccatgcgactgagctccctgttggctctgctgcggccagcgcttcccctcatcttagggctgtctctggggtgcagcctgagcctcctgcgggtttcctggatccagggggagggagaagatccctgtgtcgaggctgtaggggagcgaggagggccacagaatccagattccagagctcggctagaccaaagtgatgaagacttcaaaccccggattgtcccctactacagggaccccaacaagccctacaagaaggtgctcaggtgagagcaacatgtgtgcatagtccccagacactggccctgttttgggctggtgtaaatccttgcctctgcctttccattggcaatcggcgtcgggcgacttggagcaattctggcttattttccatcatggtttctttctgttttttccctccttctcaggtcttagaaagtctcacattcattggtgttaaattagggttcgatgttttttgtttgtttttgttttgttttgagacggagtcttgctctcgtcgcccaggctggagtgcaatggtgcgatattggctcactgcaatctctgcctcccaggttcaagtgattttcctgcctcagccttgcgagtagctggtattacaggtgcacaccaccacgcccagctaattttgtatttttagtagacatgaggtttcttcatgttggtcaggctggtcttgaactcctgacctcaggtgatccacctgcctcggcctcccaaagtgctgggattacaggcgtgagctaccgtgcccagccagggttcgatgttcttgaacagaggaggaattgcatctaacctacctaatctatccttggtagactccctcccctcccaaatcaattcgtgtcagctacttagtggatactcagttcagtacctaattaatattgacaaggaaggaagtttctcccttctcagccccaactcactcctagagggggatgtatattctgaacaagctgggttcctaaagattagggagttgacctctggcacactggtctttccacaggactcggtacatccagacagagctgggctcccgtgagcggttgctggtggctgtcctgacctcccgagctacactgtccactttggccgtggctgtgaaccgtacggtggcccatcacttccctcggttactctacttcactgggcagcggggggcc

SEQ ID NO: 11596 - DNA, 6000 bp, Homo sapiens
gctttctagtcttgaatctgttaagatgtgttttatggtccagaatgtggtctatattggtgaatgtgagctagagaagaatgtatatctaccatgattggatggaattttctataaacgtcatttagatcaggttgattgatagtgctgtgctgttctagttatcagtttctttactgattttctggctgcttgatctgtcagtaactgacagtgttgaagtctccaactgtagtagtggatttgtctctgtatatttttcttagttttgcctcatgtattatgatgccttcttatttgaagcatacacattcaagactgttacgtcttcttggagaaccgacctctttatcattatataagatcctttttgtccctgattatcagacaaaatctgttttgtctgcagttacaattactccagctttcttttgatttgtaatgtcagcatgatatatctttctccatccctttactgttagcatatctaaagctttatagttcaagttggtttcttacagacatgatatagttaggtctttttaaaaaattttgtccactgtgacactctcttttgattggtgtatttagacaattcacgttagaagtgattattaatattgttggattagcatcttccatctttgtaactgttttgcactcattgcttttttctttcttttttcttttttctttttctttttctttttttttttgagacagagtctccctctgttgcccaggctggagagcagtggtgtgatcttggctcactgcaagctccgcctcccgggttcacaccattttcctgcctcagcctcccaagtagctgggactataggtgcccgccaccacgcccagctaattttttgtatttttagtggagacagggttttactgtgttagccaggatggtctcgatctcctgacctcatgatccgcttgctttgtcctcccaaagtgctgggattacaggtgtgagccaccgcgcctggccttttatttctttttaattggacattttatgtgattcaactttatctcctctcttatcttgtatgagcttcctattcttacagcacaacttatcacacagttctggaagtcagaagtctgaaaagcatctcaggggactaaactcaaggtgttggcagggctgtttcacttttttgaggttctgggagagcatctgtttccttgccctattgagaagccacctgcagtccttggcttgtggcccttttcttccatcttcaaagctagcagtaggtcaagttcttctcacattgtatcaactctgatctcctcttttgcctccctctttcacatttaaggacccttgtaattatattgggtctacccacataatccagaataatctctgtattttaacgtcatctgagtagcaactttaatctcatctgctaccttaattctggggattaggatgtgtacatttctgaggggaccattatcggggaatctgccccaatattcacgtaggttcttttctattttccttaagcgtaggccagcttgagaaataaagggacagagtacaaaagagagaaattttaaagctgggcgtccgggggacacatcacatgccggtaggttccgtgatgcccaacaagccacaaaaaccagcaagtttttattagggattttcaaaaggggaagggagtgtgcaaataggtgtaggtcacagacatcaagtactttacaaggtaatagaatatcacaaggcaagtggaggcagggagagatcacaggactacaggactggggtgaaattaaaattgctaatgaagtttcgggcaccattgtcattgataacatcttaccaggagacagggttttaagatcaaccagtctgaccaaaatttattaggcaggaatttcctcttcctaataagcctgggagcgctatgggagactggggtctatttcagccctgtattctcaaccataagagacgggcacacctgggggtgctgtttataagcgtatacctccaggcacgtattctctttcccagggatgttccttgctgagaaaaagaattcagcgatatttctcccatttgcttttgaaagaagagaaatatggttctgttccacccggctcaccggcggtcagagtttaaggttatctctcttattccctgaacaattgctgttatcctgttcttttttcaaggtgcccagatttcatattgctcaaacacacatgctgtacaatttgtgcagttaatgcaattatcataggtcctggggcaacatacatcttcctcagctgacaggattaagagattaaagtaaagacaggcataggaaatcacaagggtattgattggggaagtgataagtgtccacgaaatcttcacaatttatgtttagagattgcagtaaagacaggcataagaaattataaaagtattaatttggggaactaataaatgtccatgaaatcttcacaatccacgttcttctgccatggcttcagctagtccctctgtttggggtccctgacttcctgcaacagaccattattctgtcagttacgatgtagcatgtcaattatacttcttttaaaaagtttttaggaggctgaggcaggagaatcacttaaacttgggaggcggaggttgcagtgagccaagatcatgccactgcattccagcctgggcagcaagagcaaaactctgtctcaaaaaaaaaaaaaaaaaaaaagtttttaagctgggtgctgtggctcacccctgtaatcccaggattttgggaggccaaggcaggtggatcacttgaggtcaggagtttgagaccagcctggccaacatgatgaaaccccatctctactaaaaacacaaaattagctgggcatgttggcgcacgtctgttgtcccagctactcaggaggctgaggcagaagaattgcttcaacctgggaggtggaggttgcagtgagccaagattgtgccacttccagcctaggtgacagagtgagactccgtctcaaaaaaaaaaaaaaaaaagaaaaaagaaattctaatgtgtagaaagcaaaagttcctcttcaaagcttcccctttaaatcataaatgttattgatatcttttctcagaactaactttcttcaagtttcttattttatagtaataactctctgttaagccttatgtagcaaatgtgacagaataagcatactctgacttcagtatctgtgttaaacatgctcacaggcacataatacattttgtgtccttgttccttagtcaaattattcgtgctgaatgtgcccaggcatgtcccagcttgcagcctcctcccttatttgggaatattattactttgtaaatcctttcgtaagtaacttccttttttcctttgttcctcactgcctttacctgtttagaaaagttttgaactgttagccaatcgggttttagtttagattgtgaggtctggctccagccaatggagtcagaacacagcaatagggacctcatgcgtaaaggataaatattctagtgtcttttttactttgtgtgtgcttgtggcaggattgctgacgggcaccaccctttctgcagagagtaaacatcgccttgctaaggaaactttttgtctgattgctgattcttctctgcgacatcggggaataagcatttatttccaacatagtgtttactctagagtttacaatatacattttattttatttttcaattggcatataattgtgtatatttatggggtacatagtgatgtttctatatacgtaacgtatcagtgatcagatcagagtaattagcatatccatcatctcatacatttatcatttctttgtgttgggaacattcaatattctccttatagctatttgaaactctacaatatgttattgttaactatagtcatcctagagtgctatagaccagtagaacttattcctcctatctagctataattttgtaacctttaacaaatctcttcctatctcctcccttcgcccacccttcccagcctctagtatcctctgttctgatttttctgtgagatcaactgtttttcagcttccacatatgaatgagaacatgtggtgtttaactttctgttcctggcttatttcacttaatatcctccagttccatccatgttgctgtgagtgacaggattccactcaaattatggctgaatagtatttcattgtgtttatattccacattttctttatctgtttatctgttggacacccagattcattccgtatcttggctattgtgaataatgctgcagttaacatggggatgtagatgtctcttcgatataccaatttcctttcctttggataaatgcccagtagtgggattgctggttcatatggtatgctatttgtagattttgaggagcctctatactgttttccatagtggctgtactagttgatattctcacccgcagagtgtaagagttcatttttctctgcatcctccccagcatttgttggttttgttttatttgtctttttggtaatagccactctaactgggatgagatgatacctcattgtgcttctgatttgctgttccttgatgatttgtgataagtgaacattttgtcatatatttcttggccatttgtcttcttttgagagatggctattcagatcatttgcccatttttaaatctgatttttttttcctgctgagatgttttagtttctggtttattctgggtattaatccccttttggatgaatagtttgcttatattttctcccattctataggttgtcttttcactctgctgattgtttcctttgctgtatagaagttttttagtgtgacataatcccatgtgtttgtttttgcttttgttgcctgggcttttgaagttgtattcataaaatattttcccagattaacgtcctgaggcatttcccctgttttctttcagtagttttatagtttcaggtcttacatttaggtctttaatccattttgagttgattttcacatagaggtgggaggctagtttcattcctctgcatatgaatatccagttttcccagtatcatctattgaagatactgtcctttccccagtgagtattcttggcatctttgtcaataatcagttggctgtagatattgtggattgatttctgggttctctattctgttccattgctctgtatatcagtttttatgccagtaccatgttgtttccatcactacagctttgaggtatattttgaagtctgggagcatgacgcttccagctttataacttttttttcctctttgagttgtaagccacttttagtatatttggaaccctgtgggtgtggtggtgaagtgtgagggagggtgggagttctggaatctggttaaatctcagtctgacagtgggtctgggtctcacataggttcactcttacagtgggctgtgatcttcacaagtatttctctagcgttagagctcttctcccctgttatctattcctgccctatttccttgaggccctgacctttgcggatttttttgccctgtaggtatgacaggaaggctggagggggctggagtgggaggaatgccctttgcattcccctagttaggagaaggatctagcaaagtttttttcccctggagcaaatgactttgtggcagagaaaactctgggcttattactcttcccctcccctgccagagggatctctctgggatcttttaccttagtgcctggtggagttcctggaggtaaagcccacagaagtgtgggtctcgcacctcctgagactgcttccccgagtttctcactctcactagtccacaccgagcatccagcaccagcttatggctctggcagtttctgctccaggtaagcggatctcctctgtgtctttccaggtttccagcacagtttgccctgttagctcagttctctgatcgtcccaaaagagccattgattttgaattttcccagctttttctcatta

SEQ ID NO: 11597 - DNA, 6000 bp, Homo sapiens
cacaaggcaagatttgataaatattcagagggcagcaaggaagttttagagaaaataatatatattctacgtatagcctacagatattgatccagagaagggacatgcatgaaggcaagacaacagaagtgaagaaaggtagttagaaagtgggaggagaagagtcgattatggttcaatgtagaaaggcaagatgaagaactaggggagaatcctagaggaaggtggtaaggttgtgagcagccctccgaggggccacagagaaaacatgggatgaggttggcaccagccatttgcgtaggatcaaaagcttgtgcagctcacctggcgataaaccttaacactcgtgttaatcaaccactgtgtttgtgtacatgacactagtgtagttagttgtacgtatgttttgaactgtgtaagatccaagcagtgacacaatggtagggctaaaatgcagagacatgtgctattgggagattgaagcttaactttactgatgttagagaaaggctatttattgggttacaacaaatgattttacataaaacataatttttaagtattaagttgaaaagcccaaattgacccaattcatactttaactctgtttttcaaaagcctgaaatagcaattattgtgtgtgtgtgtatgtgtgtgtgtcctggatatttcctgtttgaaggtgtgtaaaaggtcttactacccagcccctagtggagagttctcttgcaaaaaacaaaaacggaaacaagaaaccaaacatgctttgagagatagagagtgagaaacagattttcagagtggagaatatgccttctatttatgcatttagcattgtgttttctcaagctacccagattttttaaaatttctccccgtttatgagttcaagctgataatatgtaaaagacagtgatgcccactgttttagggaagaccttccttcagagtatgctaacttagccatttcatttcttcaaatattagtatttggaaaagaaaaaacagtcttaaatatggttctgtcctccctcagcacccagagaaaagggaagtcaactacaggatataattctctcagaaataagaaaacctcttagctaataaaaatcatgcttaggctgctaaactcaatggatgtacttttgttattcctacaatgcttagcttgcaggtagaccaaaaatttgccttcattgtcattttaaaaatgactatccaacatattttgcagcatctgcctaatcccaatgacttatatttgttttgtaaatttgttctagggaaaataaacacacacccacacctttgtaataaatagggaagcactaatcatatgaaactagatagaaaaatgggttgggggcatttggtttggagcagcatggaagaattaaactcgacattaaataatttgcaaaatattttcaaaaatattttctcacacttacccaataagtaggaataaaaatctgcttcatcgccacagtgtacttcaggcgttcaaggagaaattgagtagagggaaatattgacatgtttccttccgaaccactacacctattttgaaatgcccattgggtacttttgctcctcttcggggtatctttttccttgtttgtgtgtgtgtgtgtgtgtgtgtggataaggggaggtgaaaggtgattagagacaagaattgaattaattatacatcataaacataacatgccatagcttgccagtctttaaaattgtatcacttcacttattctaacatactaaccactttatttttttatatgtgggaccacagtgtcctcacaccctcgactgcaatgtgtgtatccgtgcttaacacaaatttggatgtgtgggtgcataaacgtgcatgcacatacacacgaggtatagaacatttatttatttatttatttatttagagatggagtcgtgctctgtcgccaggctagaatgcagtggcgcgatctcggctcattgcaacctccgcctcccgggttcaagcaattctcctgtctcagcctcctgagtagctgggactacaggcgccaccatcacacctggctaatttttgtatttttagtggagatggggtttcaccatgttggccaggatggtctcaatctcctcacctcgtgatccacccgcttctgcctcccaaagtgctgggattacaggcgtgagccaccgcgcccggccagaacattctttaaaatgtccctagaagcaccgcgttcagtgtgcaaggtgcaagagtatagccaagcgcttttcaatttgggtaaagggcgctccatctggatcatccttgaggaacatcctcgtgttcatccatgctgtttccagtcctccccagcattccggctcctttcacacctgcatctttcagacgctcgctctttcctgccctccgtttcttctgcttaattgtgagatttgcttcccagcacaaatttttacttcaactctttcccctgttgcttatgagttttatggtgatttcattttataattttaagcagaaatcgcttatcatattttcttagataatttaattgagattttaaactttagttagattacagttacctacaatgccttgagaatatagtttttaaaagtggcacatatgctttatcccaatagtattctatctatgattaatatgcacacatctatcattgtattttgtataaactatattagtatgacatttagtttgtgtaaaaatatgcatgcatatttcatagatagcgtatgtatattacataagtgggaccctaactgcatctatatttagtgaaatgtcaggatcgcgatgctgcggtgaatagcatgagctttctttcatgtccatgttaggagaggcagcttcctcccatcaaaagcacagctggggcagaggagggggttgagagcaaggttttctatctatctaattgtggtgacttttaaagtttagttttatggctctgttgcctctgtcttcaaagtcaaatggagcagctgaagctctccccaccccagacccacctgcctggcctctcccatgcagcaagtttcgcttagctgttgcaatcctggttttacttggttttgtatttgctattttttaaagtgtttttaaactcatgtttcttcatagtaaagggtaactactgtggagtaaacagaagatgagcgtggtacaaattttggttaaaccaaaaactacacactggattgaaagcttggggaagggaggcaggtggaagggactgaaggaggtctcttcccaggagacttgttcaccggcatccagtattctcccccgcagttagggaaacagagggagcatgcagtttcaggcccaggcaggcctctctctgggcttggggcaatgccagggctgggggcgagcctgcagtcagccttgtgagtggcagccgaggctgttattttgaaaccctaagtggaaacaggcatggaaacccggaaggagcagggagccttaggcagtcctgggagatgaagccaacgccctacctccatgtggaaggaggcggcggaatgggcagggtcgggtctcacaggttcccccctctggagttggggtttcccggcccacgttcactctctggatgtgataggtccttcccggccgggaagggctggaaggggcgcgcaaggaggacgtggggacgagacgagagagacgcgtgcccagcaactccagaaggacggagaggagtgcagaagggagccggggaggacgcgggagggccgggaggggaagagaagccaggccgggcctggagcggaggagcggagcccgctggtgcgggtgtccacacaggggcgctggagcgcgccttcctgcggctgggcaggaggcaagcccgagagcgcgcggcgagtggagccatgtcgccctccctcgctctcggcgggcacagtgaggcgcaggctttggaaaagttgcgggcagccggagagccgagcctccgcctgcgttcatgataatgagaatggagtcgcggtcacagccgggctctctgcggggcgcatcgcccgcgaggggcgcctgggcctctgggcgtcctctgccgccccgcgacctttcctgccctcctccggagagaggcgaagggaaggggcggtttcggagggagctgggctgtggagggagggcggcctcttcaccagcgtcgtccgaccaccccgcgccctcctggtggctctcccacgccccattcgcaccccaggtcctcggggtgtctctggtgttgcttcaagttaggcaagaggagctgggggcgcggggagcccggcgccgcagcgcgtgcgtggctggggcgccccggggccggctgcaccttcagtcgccccctggccggcctgcctgcctcgacctccgcatccccttgcaccgtccgctcgcgtgctgcggggcactcgcagcactaccttcggtggggccgcagcaccctgagctcccgggactcccccaccgcccccgcacccacgacccgcgtggtcccagcccctccaccctcttcacgcaccctcgcacccttttgtgcgaccccgtgccctctccgggctgccaacccctgccacccaggtgccagtcccgggcgcggggaggaggccggtggggaagggggcggaggggccggggtggaggaggagctgcgcgaggggcctgggggcggggagcgaggagagcgctcggaatgtgtgccggtctctaggtggtgccaaattctggggcctaggcatttccctcgctttatgtttttggttttttttcttccttcaatctctttgattaggccgtacgtggctgtggcaaggagttggggaaaaaaattataaaaacaggaaagagagaaagcacagccagagccccggcttcgcgagccgccggggagggggcggaggaggctgagccaggcagagtcgccagcggagactcgcgagtggcgcgcgggaggagcggccgccggcgctgggcttgccttgctgctgctgctgctgctgcctccccaccgcctttttttttttttaatctggagcggggtggggagtgggaaccggagagaaagcaaaatattaaaaagccccaaagacagccagcaggagcgcggtgcccgatggcttcgctgtaccagaggttcactggcaagatcaacacctcgaggtccttccccgcgcccccggaggcgagtcacctcctgggcggccaggggcccgaggaggacggcggcgcaggagccaagcccctcggcccgcgggcgcaggcggcggcgccccgggagcgcggcggcggcggcggcggcgcgggtggccggccccggttccagtaccaggcgcggagcgatggtgacgaggaggacgtaagagcttctcgggggcggggggcggcggcgggttctccgggctgagcgcgcagcgagacgcgtcggcaggggaaattttttttggggggggaatcaggcgccctccccccgcccacgactctccgggcgcccccagacaggctccgtggcgccagatcgcggtcaccgcgtcccggagggagcgggtctgtgtctgcagccgcggcggccgggagttggtggctggagagagcggggtttgggtactgcgcctgctgggatctggaattcgccttacgttccctgggtgcgcggatgtctgtttttaacagcatgctgctatggttcctaaggagagaattcgatcggcctgtgcttacgagttggtttattttttatttatttcgtgctccgggaacacagcctcaggcaccttctctccctcccacctgtgtctggaatctctccatcgtgcccctcctctcctactcactctgtcccttgactcaaatgcctctccttcgttcctcttcttacttctcctagacactttttccccccagcggtggtgatggtgattatcctttccggaaaaaaaaaataccaaaatactggcatctgagccccaaccctctgtccc

SEQ ID NO: 11598 - DNA, 6000 bp, Homo sapiens
aacaggcttgagaggagtcagctgggagagtgagagcgagactgccctgcagaggggccgctgaggatggacccctgtaggccgtccacacccaccacgcgtgtcatcctcaggaaatgcaaccggatgctcggaatttcgcccctaaagcgactcagggcagtctcagctcaggaagacttctttttttgaccttctggcttaaagccacaaccccaggctgaggatgccacatcaacggcgtttcctcgccacgctgcaggcgtgactcacgtttctaagcctgcagggtccccgggccaagcgcggctactgagagcacagcgtcctccctcagcccctgctcatctgcacggagcaaagccgcagctttctctgctgtcagcgctttatacgactcggatgtaggctctgagcgggcacgggcccgccctcagacggcgacccgaggggcaaacaggatggaggcgcgctcccttggaggctgtggtctcgattttatctgctcctgggtggtgcgggtggtttgctctctaggcgtgagcaaaggccacaaggggcccgaaaaaatcacccaaggatgcaagcccgccattgcgctgagcaggggcctccccgccgccagagcccgcgcccctccagggaggcccgcgcgatcgagacccgccgcctcccggccaggcgcgggacaccaggcgaggggagccaggagccgggaggggcggcgccgggcccgcaaccccaccctgtcctgcctccgcctcctcccggcaggaccgtcccctcccaggccccagctccgcggccgcccactcgcagccggccagtcccgctcgggcccgcgtgccccgcagccgccacgcgccccgcagtccgtgccgaggctcccgcccgagtgcgcgcgggccggcggtggcgtgtgcgcacgtcatatgggccgccggcctcccattggttgcggccgcctcaccagaccgcgtgcggacgggctcgcgggcggggcggggcaagctcaggccacgcccctgggcggtgcgcgcgggcggtgggtaggccgggcaggctcacgtgatgcgggccccgcggcccgccatataaacccgcgcgcccgccaggcgctgcggccgtcccgggccgtgactcctcctttcccccgccccgcctccgttcggagagccggcgggcgggcgcctctcggccaggtacgcggccggctgggataggggtcgcgggcgggctttggtcgcgcagcagccggtcctccccggaggtaggcgggcgcgggccctgttgggtctttgggacgcgggtcccgctggggccggggatgctgctcgctgtgagcgcgggtcccgtccgccgctggccccgggcgggcgcacgggggtctaaccttggggggcggcgctgccgcctggcccgggtgccggggttcgcgtcccgcggggccttcctcgctctttgtctcttctgagtgaacttgatgacccccttcttccaggaagcgcctcttggacgcgtgtgaccgatgcccagattgcacgaccacttctggagctgctcctgtgcgcacagcgcgaggcgccgaggccccccgcgagccagcgccgcggggctggcggccaaggttggggagatgatcaacgtttccgtgtccgggccctccctgctggcggcccacggtgccccggacgctgaccccgcgcccaggggccgcagtgctgcgatgagcggccccgagcccggcagcccctaccccaacacctggcatcatcgcctgttgcagaggagcctcgtgctcttctcggttggggtggtcctagccctggtgctcaacctgctgcagatccagaggaatgtcactctcttccccgaggaggtgatcgccaccatcttttcctccgcctggtgggtccctccctgctgcgggacagcagctggtgagtacccctcctggttcttctggaagtaaaaagggtgtcttttcggttgaaagtacttttcagcctataagaaacatgcatttgaaactggaactatccacagattgaaagtgtgcatctccagtcttgggatttagagaaatgaaggaggggtagagaggacctggcacccccgagggcgggttcgggccacagctctctgaagtttgaggaagcacagtgatggagatgaggcagggagataattggctgttcaagcaggtgctgtgccaagctgactgagggcccttccctcctggcgtccgggtacagccccagctgtcatcccgcgccagccgccccggattggccgcctggggaactggtgagcagcgggactgaaaggccattggtcgcggcagcaaacatgctaccctgctggataactgaaaacaaacccgtcacatgggttcaggaggcggttgccaggggagcaacttctcagcacttccttttgccgggtcgctgagtaaactgtggtctgaagccaaaccgcctacaccctgaactgttagagctctgtagattacgttcttaaggaaaagagtaacccccttacggcgtttagattttcgtacacccaagcagtagcatagatgctgtacaacgtaacactgagtcagtctgaactgtggacacggggactgctgggtgtgtgtactagactttcttggctatcattgaaccgcttttatagaaatgttgagttgatcttggctcagcagatcacttactgctcctgtagtcacacagcatttgtttatttaacgagcttgtcgggtgctttctgcaacctcaactctataagctgttgaaatgttaatccaaaagtgagcaccacaagcccctatccttaagcagcttagagtctggtggggaaaacaaaccagtatgtcagtgactccagtgcagtgcagggagcatcctgtttgctttgtggctgacgtttgtcagcttactgctgaccataggcttcagatgctttgctgtgttcattccttacagcaataccatgtgtagcttcatttatagatgtggcaactgaatcacaggtgaagtcacatccaagggtgcgcaggtagaaaggggccaagccatcgttggtaactgctcctgctgccttggtaggtgtgtctcctgcactgtggaaacacattgcctcagttgactcactgaaaacagcaagcagcagagaggtttgtagcagattaacagagggctccgtgttgaagaactaggacaggtgtctgtaattattaagtagtgggtagaatgttttcatatttgttctcggagggacgggatcctctttcgtttttcgaaacactttatgtggctgtactaattgaacattttttgagaactatatctagatttaaaattccatgtttcatatacatttggcagaatagtttctttcctttaaccaaaaacttgatcttagaaatgaaatagtttagccttcagtatttgtaattggatcctcaagggtttctaggaatatctggacaatttctcatactctcatattctacttttttttaaaccatcagccaagagcataagtaaaatttttcatagtatgttttttacctatttatttattaagctatagtgaagtaaagttaatttggggggtccatttttcagaactccaaaattagaacctgatgaagtataataaattgaaaacaacattttttatctgaatgtttgatgcaaactgtgtttcttgtttctcagttgaacctaaaaggtatatttctttcatactagactgaggtgaaacaattgcagggttctcaagagccctgggacacagtgacccttgtgtcccagcatccaaccccacgggccggcaccccactcccccctacagacattcattcctgccttcatctttgccattttacttctcttttggaatgccattccttcccacctgtccaaattccaagttcatgtctataaagaataactattccagaccacagtgatctctttctctgtgtcccagttacataatccttataattttacacatgagaaaacaaacatgcagagccacgtcccatcagagggcaagctgggatttgaggctgagttttctcttcttggtctggtgttctttccgcagcttgaggcttgaccatgcgggaaccagatggagaataagcgaagcctatgtggggctgtctcgccccgtacttgcccatgtgcatgtgtgcacagtaggtgctcagtgcctcgtacagaacatgctagaactcccgaaaatcaactccagggccactctaggagcatgtgacccagactgtcaaagtcacatcagcaaatatgtatctcatcacgtgcccagccccagtactgggtggtggcaggagtgtcagagctgtgatgtgacagggtgtggacagatgctaacctttttattgtaagatagaaatcacaccggatgaaaagacaaggtgaactacatagtcatttaagttctgtgtgctttaggcaaatgtggatattaaatataaggttacatattgctcatattaatatgaataatccctgcttgattccttcctgtgtttactgagatatgttcaactacactaaataatagtgatttttaaaaaacttttctaaacagtacaattttgtgggagtggtactcaaagagaacaagaatataaaatcactctgaagttatagctgataattttttctaggaaaaggactggtttgagtaatgtactgtgttactaatgaccacgttgaaattctggaacttgaatctgctgtattctaacattgtcaacttttttaaaacagctgttgttggcctactgtacccctgtatcgacagtcacctcggagaaccccacaaatttaagagagaatgggccagtgtcatgcgctgcatagcagtttttgttggcattaaccacgccagtgctgtatccttaattttctgtgctacgtccagagtatcttcttaggttatatattgaagcgttttgttttgttatatactcaaatgactccatgtcataatacagacatgatggtggtacctacccatttcagattactaaaaagagaaagaagaatggggctatcgatgacttcacagtaaaatatattgttttatggtcaaaataaatatatatttatttatatttttatatatattatatatatttttaaatatatatataatatacataataaatatatatttatataaatatatataagcactttatatatagctttcagcaagtttattcttatggttaagtttttgactcagtgatggcagggagatttcaggtgatcttaatgattactgtaacctgtatccaacaaatcctttctttagctcattacacagtttttatggacagtgaattatctgtggtacaataataaaatacccatgtttttaacccttgtggttttacgtttttttatcttaataagagtcagcaaacttttccttaacttttatatcaccagaaattggattttgccaataatgtccagctgtccttgactttagcagccctatctttgggcctttggtggacatttgatcgttccagaagtggccttgggctggggatcaccatagcttttctagctacgctgatcacgcagtttctcgtgtataatggtgtctatcagtaagtgtgtgttttcaaatattggctttggaaagcttacttaactttcattaaaacatccactaagcttagatattttcatattttatttgttttttatatagaatgatacagatttaggcatgaaattctcaaaaatgctgctatccataacttaatgtaacgcaaaggaaaaccaagtagtagcagttacaaccaaacaaatatgaacattcgtaacattggatggttgatatgcgttctgcatatccccactacagagaatctgtgatgtagaattgagccaggtgaaattgactgctaaggtacagtttcttttctcgctccaggtatacatc

SEQ ID NO: 11599 - DNA, 6000 bp, Homo sapiens
agacagagtcagtctgtcacccaggctggagtgcagtggcgagatctcggcacactgcaagctccgcctcctgggttcacaccattctcctgcctcagcctcctgagtagctggaactataggcacccgccaccacgcccggctaattttttgtattttttttagtagagatagggtttcaccatgttagccaggatggtctcgatctcctgacctcatgatccgcctgcctcggcctcccagagtgctaggattacaggcgtgagccaccatgcccagccaacatgagctatacatttaagaaagattaataaaagcaacataattatttatccagtttttggtgaatccgtgcatgatggtggtcatagtggtggcggattaaatcaagaagtatatgtttacaaacaaaaattataaggagtacctcctactaccataaagttcaaaaacaaacaataacaaatatagcaggctcactgagtgcttttgtactacattgtttattgtggtacatatgtataattattgtatactactttatgaattattttaccatagtttgtattcattttccaacccacttacttcatttcagggtcccaggtggccagagcctatcccagcagctcaggttcaaggcgcgaactttcccccaactgcataggatgccattccatcacagggcgcgctcacccacacccactcacactaggacagttcacacatgccagttcacctaactggcatcgttgagatgtaagaggaaaccagagtatctctggtgggagattctccaagagtatctcttggagaagacccacgtggactcggggagagcatgcaaacgccatggatggcggccccagccgggaaccagtttcttttctcatcagtgttacaaccaaaggatgttattggcagacctgctatacacacaataagtttggttgcctctcagatgcattaggctaactgaaattggacccagaaggcaacatactatgtgactccatttatgtggctttctagaaaaggcaaaactatggacagagaacataagtgtgattgcactgcaggaggtgaaggaagcctgggggagtttgactgcgaagcggcagcatggcagaattttggggatgatggaactattctgtgtcctaattttggtggtggttatgcctcagaactgaacacctccaaaaaagagaattttactatatttaagttttaaaattccaaaaacaaagctaaggaaaaaaatcttgcctttccaaatacatgggtgattaaaaaagctggggggtgctggaacagtggcaaggtattgacacctggtgttttttcttttatttgtaggttatctaccttgcctgctcctatgccacagtgtacctgatctacctgaaatttaaggcaacctacgatggaaatcatgataccttccgagtggagtttctggtggtccctgtgggaggcctctcatttttagttaatcacgatttctctcctcttgaggttagtttaaaaggttacttagggccaggcatggtggctcatgcctgtaatcccagcattttgggaggccgaggcggagttcagcctccactttgggtggatcatgaggtcaggagttcgagaccagcctggccaacatggtgcaacaccgtctctactaaaaatacaaaaaattagctgggtgtggtggcacgcacctgtaatctcagttactcagaaggctgaggcaggagaatcacttgaacccaggaggcggaggctgcagtgagccgagatcacgccattgtactccagcctgggtgacagagcaagactgtctcgagggaaaagaaaaaagaggttatggctgggcgtagtggctcacgcctgtaattccagcactttgggaggccaaggtgggcacatcacgaggtcaggagatcgagactatactggctaacatggtgaaaccccgtctgtactaaaaaataaaaaaaattagctgggcatggtggcgggcacctgtagtcccagctactggggaggctgaggcaggagaatggcgtgaacccgggaggtggagcttgcagtgagctgagattgtgccactacactccagcctgggcgagagagtaagactccgtctctcaaaaaaaaaaaagaggttatttaggtctgggcctggtggctcaccacacctgtaatcacagcattttgggaggccgaggtgggcagatcacttgaggtcagaggttcaggcattcagcctggccaacatggtgaaaccctgtctctattagaaatacaaaaactggccatgcgcagtggctcacgcctgtaatcccagcactttgggaggctgaggcaggtgggacacgaagtcaagggattgagaccatccagctaacacggtgaaaccccgtctctactaaaaatacaaaaaactagctgggcgtggtggcgggcgcctgtagtcccagttacttgggaggctgaggcaggagaatggcgtgaacctgggaggcggagcttgcagtgagccaagatcgcgctactgcactccagccttggcgacagagcgagacgctgtctcaaaaaaaaagaagaaagaaaatcaaaaattagctgggtgtggtatcgcacgcctgtaatcccagctactcaggaggctgaggcaggagaaccacttaaacctggaggcggaagttgcagtgagccgagatcgagccactgcactccagccttagcgacagagcaagactccatctaaagaaaaaaagttaatttcatggtcatgtctggttatctagaatggacctatttgcatgtttgcagatcgtgtaggttttcatggagttttttgtttttattttctggtttggcaaactctagtgcaatgttcatgactggtgtaaaaaaatcgtagatgagaattaagcacccacatatttaggtgtctgctgacagtttactgtctgattcatttgaaatagaaacttgaaactgtatttcattatcttgacttcagtggtaccaaacacagagccctgcctgtcccagtgtgggaagaacaaggtctccctcctgtagcccacattttgtttgcttttcatgtacagatgtgcactgatgtcgtgtctgtgaccctgcttagcagcactctgcacctcttgcctttaggaaagctggtttgtggtgcccctagtactgtgcagtgagctgatctgctcctgagtgcctcttctttccctgctgaacaggcaaacggtgctgcttcacatcctggggccgatcaagtcactgtgctaccctgggtgtctgatgggtgctgggagtgcctggacttttctttttttttgagacagagtctcgctgtcacccaggctggagtgcagtggcatgatctcggctcactgcaacctccgcctcctgggttcaagcgattctcctgcctcagcctcccgagtaggtgggattacaggcacccaccatcatgcctggctaatttttgtatttttagtagagaccgggtttcaccatgttttccaggctggtcttgaattcctgatctcaggtgatctgcctgtctcggcttcccaaagtgctgggattacaggcatgagccaccacacccagccatgcctggacttttaaaatactcaaggaccctctgaaagtccttctatcatcatcgtgaataaagtcatacgctgggcagagaatttccataattacagttgtgacttctacccctttgatttaaccacaccagaaagcttaaggaataagaaaaatagtgaaaatatttcagtagtttggcaagatcagtcagtgaggaaaaacagcagtgaggaagtggaaggagcttatcaattatcagtattgtcaatcctggcggaaagcagggttgatttggtatcccagatctggagcaggacaagcttgtccaggagaaacctctgtatgtagattcatagaaaattgaagagggaagaataaacctggagagacaaggtgatgaaaattcaaagaggtagaggtgtccaggttacccagcttgtcacactggcagtgccttgcctcttaaaggttgcttaagtttctgtgatttatgccaggagtcctcaacccctgggccactgactggtactggttcatagcctgttaggaaccaggccacccaggaggagatgagccgtgggtgagcaagtgaagcttcattgtatttatagctgctccccatcactcacattactgcccaagctccacctcctgtcagataactggcagcattcaattctcataggagcatgagccctattgtgaactgtgcatctgagggatctaggttgcatgctccttatgaaaatctaatgcctgatgatctgtcactgtctcccatcacccccagataggaccatctagttgcaggaaaacaagctcagggctcctactgattctgcattatgacgagttgtataattatttcattgtatattatagtaataacagaagtaaagtgcacaatgattgcaatgtgcttgaatcatcccgaaaccatccatccaccctgctggtctgtggaaaaattgtcttctatgaaaccgatcactggtgtcaaaaaggctgggaccactgggttatgcagttgccaagctgttgttctattttgggccgacatgccccactccccactcatcttaggctgctttgtggtaaagaaagcaagagtgtttcctctgagctcctggtgggcagtgggtcgtgatggaagcttgccatttctcttccagatcctctggaccttctccatctacctggagtccgtggctatccttccgcagctatttatgatcagcaagactggggaggccgagaccatcaccacccactacctgttcttcctgggcctctatcgtgctttgtatcttgtcaactggatctggcgcttctactttgagggcttctttgacctcattgctgtggtggccggcgtagtccagaccatcctatactgtgacttcttctacttgtacattacaaaaggtatgttgggtgcgacctgcgttgtttctagagtgacgtgttcttttaggagtgcccttgcccagcactcttctaatctggcactctctcataaactggctccagagaaacactttcatgattggccaataacattctggatcaggatgttgtctttttaaatataagaaccctttttcttttgcaatagcttttcctaaagtgacacattttcactgtaaaagattcatctggtgtttcagtgaacattaacaccagatacctctctatgcatacacagacacatgacttaaactgtacattgctgttctatacactgcttttatcccctcacatttttcatgtcactagaaatctacataattttcagtagccacagagtgtttcattatgtgcatgtaccataatttatttacccagcccccattcatgggtggtcaggccgttactggtttgctgttaaaatccagtcattaaatcagcatccttgtgtatatgtgtttttgcatttgtatgaacataggacgtgtgaactttacaaatatttgatgaaagctatcatccttgttcagaaaaaaaaaaacatttatgccaggtgcagtggctcacgcctgtaatcgagcactttgggaggccgaggcgggcggatcatgaggtcaggagatcgagaccatcctggctaacacgtgaaaccccgtctctactaaaaatacaaaaaacttagccaggcgtggtggtgggcgcctgtagtcccagttactcgggaggctgaggcaggagaatggtgtgaacctgggaggcggagcttgcagtgagcccagatcgcgccactgcactccagcctgggtgacagtgcgagactctctctctcaaaaaaaaaaaaaaaaaagatatttacgcaaatgcacccaaatgcatgtatatagttttgaggggttcaggagcccctgaaaccca

SEQ ID NO: 11600 - DNA, 6000 bp, Homo sapiens
ccagcctgctcagggcttttaaattaaattacaggtcaggcatggtggctcacacctgtaatcccagcactttgggaggccgaggtgggcagatcatgaggtcaggagatcgagactatcctggctaacatggtgaaaccccgtttctactaaaaacacaaaaaattagctgggcgtggtggcgggcacctatagtcccagctacttgggaggctgaggcaggagaatggcatgaacccgggaggcggagcttgcagtgaaccgagatcgcgccactgcactccagcctgggcgacagagcaagactctgtctcaaaaaaacaaaacaaatacaaaattagccgggcgtagtggcgcatgcctgtaatcccagctactcgggaggctgaagcaggagaatcgcttaaacccaggaggcggaggttgcggtgagtcaacgtcgtgccattgcactccagcctgggcaacaagagtgaaactccatctcaaaaaaaaaaaaattaaattacattaatttttttttgagacagggccttgctctgtcacctaggctagaatgcagtggtgcaatctgggctcactgcagcctcgatttcccaagctcaggtgattctcccatctcagcctcctgagtagctgggtctacagggaggggccaccacgcccagctaatttttcatttttcttttttcaaaattattattattatttagggacaggatttatttatttttatatatttgcaaccaattctcactctgttgcccaagctggagtacagtggcatgatcttagctcactgtaacctccgcctcccggcttcaggtgatttttgtgcctcagcttcccaagtagctgggactacaggcgtgagccaccatgcccagctaatttatgatttttttgtttgttttttgtttttttctttttttttgtgagacagagtttcactcttgttgcccaggctggagagcaatggcacgatcttggctcactgcaaactccgcctcccgggttcaagcgattctcctgcctcagctccccgagtagctgggattacagtcatgcgccacgacacccagctaattttgtatttttagtggagatggggtttctccatgttggtcagtctggtctcgaactcctgacctcaggagatccacccacctcggcctcccaaagtgctgggattacaggtgtgagccactgcgcccggcaatttatgtattttttttagggacagggtttcatcatgttggccaggctggtttcgaactcctgggctcaagcaatcctcctaccttggcctcccaaatttcttggattacaggcgtaagccatggtgcccagcctgttcagggctacttttatttttttgagcagtatttggtcatctgggtacaggctgagcaggtagatagtttgacaggtctagaagcggggtgtggcactgaggcaaaagtagcagttttggggagagagcaaggatgttgcagtgagccgagatcgcgccattgcattccagcctgggcaacaagagtgaaacatggctctcggtgggatggagagggaagagaaagtggggggagatgatacatgtggagctataggacatttgtcatgttcaatggggttgaagagcaggtacagcgaggataactgggggagttggaacctgacagggtctactcagagagtaggattctggatccttgaaaacttcctgatacaatatatcctgtctatctcagagtctccagcacctaccacaatgcctggcacttactagatgttcagtagatcctcaatggataagtattccagagatggagtgcgggtaatgacaagatgcaggatacgggccaggcacagtggctcacgcctgtaatcccagcactttgggaggtcaaggcaggtggatcatctgaggtcaggagtttgagaccagcctggccaacatggtgaaatcctgtctctactaaaaatacaaaaattaactgggtgtgatggtgcatgcctgtaatcccagctactcgggaggctgaggcaggagaatcacttgaaactgggaggcagaggttgcagtgagctgagatcgcaccaatgcactccagcctgtgaaacagagcaagactccatctcaaaaaaaaaaaaaaaaaaaaaaagatgcagggtgtgaccagggaagtggagtgcctggactggaggtgacaatgatgaagtaattaattcatttatccaacaagtattttggggcatctactacgtggcaggtactaagctaagcaggtggtggtgagatagagactaaaacagtctaactttgttctcatggtgcttacaatccactggagaaaaccaatactaaactaacaatcattcacgactacataattatgactggaatcattgctttgaaagaaaagcaaaggatgtgaggctcagtgtggtggctcacacctgtgagcccagcactttgggaggctgaggtgggaggatctcttgagcccagtttgagaccagcctgggcaacatagagagatcctgtctcttaaaaaaataataataatttgaccaggcacggtggctcacacctgtaatcccagcactttgggaggccaaggcaggtggatctcctgaggacaggagttcgagaccagcctggccaacatggtgaaacactgtttcaccctttttaggctctactaaaaatacaaaaaaaattagctgggcatgttggcgggcacctataatcccagctacttgggaggctgaggcaggagaattgtttgaacctgggaggtggaggttgcagtgagccaagattgcgccattgcattccagcttgggcaacaagagtgaaactccatgtcaaaaataataataataataataataataattttttaaaaaagaaaaataaaaaattagcccagtatggtggtgcatgcctagagtcccggctattcaggaggctgaggcaggaggatggcttgagcttaggagctgaaggttgcagtgagctatggtcatgccactgcactccaggctgggtgacagagtgagaccctatctccaaaaaaagaaaagaaaaggggccgggcgccatggctcatacctgtaatcccagcattttgggaggtgaaggtgggctgattgcctgaggccaggagtttgagaccagcctagccgacatgccgaaaccctgtctctactaaaaaaatacaaaactagctgagtgtggtggtaggcgcctgtggtcctagctactcaggaggctgaggcaggagaatcacttgtacccaggaggcagaggttgcagtgagctgagattgcacgactacacaccagcctgggcgacagagcgagactccgtctcaaaaaaaaaaagaaagaaagaaagaaaaaagaaaagaaaagtgtgtaaagaaagactataaccaggatcctgatttagattgcagttcagggaaggcttcgttgaggaactgacgagtctaaactgccaagatgagtaatttgccaggcaaagagactgtggaaaaacattcaggctgagattcaccatttgcgaagggtctgaaatgtgaagatggtggcctcttggaggaagggaaagatggtccatgtggccggtgaggtggatgtagctcaggccctaaagggccttactggctactttaactgttttgaattgaattttcctgcctcatccctgagtgatcctccccactcccctccccataagcaccttatctcacgcttttgatgtgtagctttaaatacacatatggggcgggtcgtcatggttcatgcctgtagtcccagcactttgggaggatcgcttgaggccaggagttcaagaccagcttgggaaacacagcaagacttctcgtctacaaaaaatttttaaaaatcagcggttggtggcgtacacctgtagtcccagctgctcaggaggctgaggcgggaggatggcttgagcccaggaaccggtgattcccctgagtaccttggtgtaaagtgtctccatgaggcccacgtggaggatgggggagatgaggagggtctgctgcctgcccagttagctctttcgaaggaaagtgtttgggtgctgtgtgtgtgtgtgtgtgtgtgtgtgtgtgtgtgtgtgtgtgttgacgtcgggaggaacgaggttgggggagagagtttggcttgagccgggaagaacctacaggatgatgggcaggacccccagctatgggaagtcaggttttaagcagagtgaggtcctgagagtctccggcgccgccctggtggtgatgggagaaaatgggtccgcggagggccctgcactgcggctcgcgcctgtaatgccagcactttgggaggccgaggcgggcagatcacctgagatcaggagtttgagaccaacctggtcaacatggtgaaacccgtctctactaaaaatacaaaaattagccgggcgtgatggcacgtgcctgtaatccctgatacgagggaggccgaggcaggaaaatggcttgaaccaggaaggcggaagttgcagagagccgagattggtccactgcactccagcctgggcgacagagcgacactccgtctcaaaaaaaaaaaaaaaaaaaaaaaaaaaagcgtccgcggggagcgctcttttcctaaactcaggaacccctcgccgcccctgcccctggcgaccccacgtctctggcatccttccctcttccctccctctcctccgggcgcccagaaaagtccccacctctccccgcttaggcaaaccagccttcgggaacgggtggcaggctcggccgggatggccgctctgactcaggacattcgcgcggcgctctcccgccagaagctggaccacgtgtggaccgacacgcactacgtggggctgcaattcccggatccgtgagtgcgcgcgcgggcggggggcgcgcggggagggggacgcggctcggggcgctcaccagccccgctccccagggctcaccccaacaccctgcactgggtcgatgaggccgggaaggtcggagagcagctgccgctggaggaccctgacgtctactgcccctacagcgccatcggcaacgtcacggtgagcaccccctgcccgctcctaggatggggcgcggcacgagccctttcctgggtctcgaaggagggacgcggggagcgcgcctcaccgtcctcgtgtccccagggagagctggtgtacgcccactacgggcggcccgaagacctgcaggacctgcgggccaggggcgtggatccagtgggccgcctgctgctggtgcgcgtgggggtgatcagcttcgcccagaaggtaagtgtccctggacagagggagggcttgagcccgggaaccggagggtcggactgccagtgagaatcgttcagggtgctgtgagagggagacaggaaagaaccatgtggctggatggtaagaaaatataagctgggcacgatggttctcacctgcaatcccagcactttaggaggccaagacaggaggatcgcttgaggccaggaattcaaggcaacacggtgagaaccccctctctactaaaaaaaaaaaaaaaaaaaaaggttcttttttttttttttttagttagctgggctggtggcacatgcatgtggtcccagctactccggaggctccggtgggaggatcgcttgagcccaggagtgccaggctgcagtgagctatgatcgcgccactgcactccagcctgggcaagagagactctgtctcaaaaagaaaaaaaaaaaaaagagagagaaacagagaagggagggagggagggaggaaggaaggaaggaaaatgttggctggtctgggaattgaatcagaaggaaaaaagaaaatgttggctgggaacaaattgggtgttgggggaaatcagatggggaagggaacagaaacatggggtaccctggagcccggtggggtttgagggctgcctaggagctgctgaggttgggaagaca

SEQ ID NO: 11601 - DNA, 6000 bp, Homo sapiens
ctcagctgatgtggctcctcctcccttccagttgctttgcggagtcaggccagtgctcatgccggcctcacatgattggacgtcagtgcaacgaagtggaacctggttactactttgccaccctggatcactacctctatgaagcggaggaagccaacttggggcctgtgagtaggggagtgtgtggcaggtcggtaaagcagtgttttggggtgtagtggaacatacatgctttgtaaagaccccatttcagaagcatttttatagctttgtcagtgagcacaaaataaggatcaggaccatgccttcctgagaagagtcatatttaaagctaagtaattctataactcacaaattggctttggagcattcactgataaggcttttggttggtttaagaaatgtgtctttacaagaaacttttcttctctctacttatgctccaaagttatcaacctagcatggtaaatactgaggcaaggatattttttcatctattcatccccaaatttagtgactttaaatgtatgcctggctcttgagctggggtggctgaaacagctggaggctggctgggcatttctctccacacgaacacgacctttcttttttctttttttcgagactgagtttcgctcttattgcccaggctggagtgcagtggcactatctcagctcaccacaacctccgcctgctgggttgaagcgattctcctgcttcagcttcccgagtagctcgattataggcatgtgccaccacgcctggctaattttgtatttttagtagggatggggtttcatcatgttggtcaggctggtctcgaactcccgacctcaggtgatccgcccgccttggcctcccaaagtgttgggattacaggcgtgagccactgtgcctggcgatagtgagatttcttagatggcttccagcttccaaaaagaggaaacaagctgccagctctctgaaagcttggactcagaagtcctagaaagttcctcaggttctgttggtcacaagtcacaaggattcatggaaaggataacatagtttgcacctcttgatgggtaaggccacacacgggtacatacagatacatacagggaatgaaagagttgatcccagccatttttggatatgaccaaccacaggtattaaaaaataaccctgtaaacaattaatcagaattaactcatcagttgtgaacattcattatatcaagtttcttcacttgaaaatggagcctgaaactaatgccagtatgagagacagaaatccactagatactggactaaccttatggagaatctgggaagcaccttatgattcctagacttgcttataacggcatgtgggatgttctcttttttcttttatgcttactctcctggtcatatcaaataaggtatatcccaagcctttgagtgctatatccagtgtcccaagactgctccaaccacaaaactaaaaagaaaccagtttcctgtttggatatcagaaactttttacaatctattaggggagatttgactataaaaaatagacataaggtagccaccctttttgaatctttgggtgacttcggattactttgactattgaaaattattgaattccatttcaaatacagaataaccattgtttgccatgccctcagggggttagcatagtggagcggcaatatatccaggaccggattccctcctggactggagccggcttcgtccgagtgcctgaaggggcttatttggagtttttcattgacaacataccatattccatggagtacgacatcctaattcgctacgagccacaggtaaagaaaccacttagtggactggtggaggagggaggggagaatcagtagaaaaatagtacttctaatgggtattatatatagttatgaaatatggaggttgcattagaacagatcagattcctatagtctcacctcctccatggaagttaaaataaatgtaccattttctttctttcttttttttttttttttttgagtctcgctctgttgtccaggctggagtgcagtggtgccatctcggctcactgcaatctccgcctcccgggttcaagcgattctcctgcctcagcctcctgagtagctgggattacaggcatgcgccaccatgcccagctaatttttgtatttttaatagagacggggtttcgccatgttggccaggctgatcttgaactcctgacctcaggtgattcgcccgcctcagcctcccaaagtgctgggattacaggcgtgagccaccacacccagtcaaaacgtaccattttcttgaatccagtttctcaaacgtagtgatcttttgtgaggcactcaaccttgctgacgactgaggtggtgatgaggatgtatgagatcctctccttccctcacaacctggctgtgcagtgacagactgaagccccgaactgtaacgaaagactgaaggtgacggtgtaacagcagagagatgcatgatcctagaagatgggcatgcaccagccagcccgagccagggctaccaaaacgttttcctagagaatcagagctaggccttaaagtgtgaatggaattgtggaaagttggcacaaaagtaagaaatagtgtgagtggaagagagaagagagggttttgtttttattgagaatcattccacatagcttgatgagagatatggttggagatgctgttggcaaaaatactaggattagtaaaggaatttggactataatattcacaggaagctattgaagcatttcaagcaggggattgtcattatctgagctgctttaaagtggactgaaagggacattgggaagaggcagaaaacagttgagaggtgtttcagcatccagggcagaagggatttgggctggaaccaggggagtagcagaggtagtagtaaagagaaaagtgaagagcaactgtttgttttccatttcaacttggcaattgattgattcagagaggtctttttataaacaggcagtggtgggctaactatcttttcattgtttgtttcttattctagctacccgaccactgggaaaaagctgtcatcacagtgcagcgacctggaaggattccaaccagcagccgatgtggtaataccatccccgatgatgacaaccaggtggtgtcattatcaccaggctcaaggtcagtgtgacggtggtttggcagctcaacgggcttcatatgcaaattagtatttttctaatattttgcgagttttcaagtcaccatttcagagccagacgttgactgctgacttttttcctttggaattatcgatgcagagctttgtttttaatttttattttttggatgcatgaaggttgactttcgttgttgtctttcttttttgtttgggggcagatatgtcgtccttcctcggccggtgtgctttgagaagggaacaaactacacggtgaggttggagctgcctcagtacacctcctctgatagcgacgtggagagcccctacacgctgatcgattctgtaagtgcgagattgcttctggcatatgcaggaaagcctgggcggaaagtgcccagctgctctcagggtgttttgttgaggggtaatgctgaggccagcgtaagcagaatcattctttcttgcctccacggttactttgcttatactccaccccatggaaaggatttattccttctaaaaatataaaatgtcttttaaaaaaaacagcatttcactaggcgtagtgactcacacctgtaatcccaacactttgggatgctgaggcaggaggatcatttgaggccaggagttcaagaccagcctgggcgacaaagcaagaccccatctctaaaataaaaataaatagcatttaaaagccatcaagctgtgtaaaacatatctaaaatttcctgccaagagtatttaggaatagggaggtttatactttatttaatgagtctaatgatttctgttcaagggtcaaagaagcatttgggttttctacacgtttgcttgcttaaacccatgccatggggcaccactgtaaggatgtttggccgttctcatttcttcacagcttgttctcatgccatactgtaaatcactggacatcttcaccgtgggaggttcaggagatggggtggtcaccaacagtgcctgggaaacctttcagagataccgatgtctagagaacagcagaagcgttgtgaaaacaccgatgacagatgtttgcagaaacatcatctttagcatttctgccctgttacaccagacaggcctgggtaggtattgctgggcagctgcagcagctgctgtttctggctctgagtatatctggcacatgaagtacagtggagtgcccaccccctagccctgtgttaggcagcacaagggaaatagtgtctcagttacagtttgtctttatctttttaagtaatatttcagtgaaagagcaccactgaagatggaattgatattcaagaaatatgcaaataacaggtgaccaggggaaaagtccatgaggataaagcatttccataagcagggtagggagaggggaatggaatcagagaagcatcaaatacctgaaatgtatgtttttctctttgaaacgtcagaccatcctctgaaggtcactgggctttggtctaatgtcctgtgatatttgagctttgaaggcaaggggagaaaacattaatgacctcctgcctagaaaaactgttttgatctgccaactctgcctcccctttcttcccttccgctcatcatagggatgatactgttttaaaccagaactctgaataatccaaagtagttaaaggagaaaggatcagggagagcccgatgatgtgctgctccgtgtcatgggttctggcctctctttacccacagcttgtgaatgcgaccctcagggttcgttaagttccgtgtgtgatcccaacggaggccagtgccagtgccggcccaacgtggttggaagaacctgcaacagatgtgcacctggaacttttggctttggccccagtggatgcaaacgtaggttcctcaaaagcattgttatgcattcattcagattaactcagccattgtggcagggttccattgctgcagagccgatgcttccctcctgaagttgatcacaccaacccatgagcattctgaattggggacagggtgcttataaaaggagcatgtttccattgaatgagtttctcaaggcagttccttgtttgcctgtttctttagcttgtgagtgccatctgcaaggatctgtcaatgccttctgcaatcccgtcactggccagtgccactgtttccagggagtgtatgctcggcagtgtgatcggtgcttacctgggcactggggctttccaagttgccagccctgccagtgcaatggccacgccgatgactgcgacccagtgactggggagtgcttgaactgccaggactacaccatgggtcataactgtgaaaggtatgcagatgctgaaagtaaggagaatgtagtgatctctggctgagcagacagcatcttagaccaaccacagaattcatctccaccaggcttcagctcgctcattcatttctgaccacctcactattttctaggatcttgtttgtttatccagtacatattgagttgacatcctctatgtgccaggcaccgttctggtgctggagataccgcagagaacaaaactgacatgaatccgtcctcttggcgagtcaccctagagcttaccatagggctgtatagaaattctgtctgtctcagcagattctggcggaggataagagttgtgaaatgctcctgcctaatttaggcgaaaggagaaactaatccaaatgggattagtcattttaaatagctttgtttttcagaacgttttatgcaactacagtttccaggagactctataaaacatgcctaagtagatctgttctccagttagcaaatgtcagttgaataatcattatggatgtgctagatgtagagtaagaata

SEQ ID NO: 11602 - DNA, 6000 bp, Homo sapiens
tcacacacacctaactcaactgtgtaaaatatattcggaagaaattcagtcaaattaaaagcatgatataagcatgcttatagagtcaaaagaagaaaatgttttatcttgattatggtcaaaagagagaaaataaaggtcttttaaaaaagaatttatactagttaattaagcaaatctgcatgggcatgtctgaatagccattgatgctgcactttttcccataagattgatactttaaaataatacccgaaatgctcattattctgtggttttcttagaaattttgcatattatgactgatggaataaggggtttcacatttattaaacagaatagatgcaaactgaaaggatatgtatacacctaagtgagtactttcttttcaaactggtcatgtaggcaaataatgagttcactgactgagagatattccggtcttttgaatggatccttagcaataacgaatattgattctttgagggtggatttggtttttcagaaatttccactcagaaccaactcttgtgaatgagatgaataacaaatctaagtaatattttgggtgcaaattgagatgttatataaaacaatatggctgttttcctgatctggaaaggtttcttgtgtggaccgttttcttttttaacagatttctaaaaaatactgaaaatggcaacagccttgcaaggacagtttagcctctaaaagcagttcctttgaagagaaaatactcaattagatgtatacattctgttctgtttaaaactcagttttgtatttttctcattatacttaatgtaaaatgtatcctgttaacagtgaatactttaattggtttgggaatttgtttttattgagaatatatagtgaaaataactgtgaacacagtgttcaccaggggtttttagcatttaatgtgatgattattcagatttctctacttgaattttttaatgaatgaagatttttcaaagttaattattcatataattcctgattaataattgacagatcctaatttggggccacatgtaaaatatatgaaagctcacataacgtggcaattttttactctgagagactgcagcagttcccatctccccttaacctattgccaccaacaccattgatttgttttccagcgatggcaagccggcaggtggatattgcaactcagggctggttcattggtctgatgtgtgctgttgctctccttatcttaattttgctgattgtttgcttcatcagaagaaacaagggtggtaaatatccaggtaagaaagaaagattaaaattgctttataatgctacataataatccattaaactaaaaagatcatgggggaaatcatgtagattgtaatattttgtcttcccagagccatgagtttggactttctcttcaaatgacttttgatccctttttatataatggcaatctaaacattgtcaatgatcataaggcatttggaggagtaaatcaatcagttctctgaaaacattagtgagcctactttcttagactccacataggttatggatgctgaagtaacacctaaaaccaactggcaaggagagagttgcagggaaggttcatggagtttttcaaaggaagtaatgcatgaactaagtcttcatattgtgatgtgtaacattgctttccctataaggtaatggtttattcaatttagtgggcccattaaatttatattttctttacctgaccattttcccttcagtgacaagaaaaaaaaaatctgtgagagaatactcttacaaaaacaattttcaaccattaatatagttaacaaatagattggtaaaatagggggaaatcttagaaacttaaaaattatttatcaggtgagaaactagtcaactttatgtgttaaaaaatgtacattctattgggttgcctcaaaaataactaaaataccaaaatatatgcatggccaccatatatatggttatacaacatctacttgtgtatggaattatttttcactgctgtatatctcaaagaatgctttcatggactttgaataagaaagaacaggatcaacagataataataccattttggcattttttagttaaagaaaaggaagatgcccatgctgaccctgaaatccagcctatgaaggaagatgatgggacatttggagaatacaggtgagcccctgcttctctgctcttcatcttctctgcccacatgaacacagtcccgagaatagaactcagccagaatatgctctgcctggcatctcatattttcctcaaatagaagtttagggatacttccatgtatcagtgtttacatgtccctcatggtcaaacattttcatttttcattgaaaaactaaattttgattttagtcataattttggagatggaatgtctcccactttgtcatattttccatgggaccatgctgtattgatcaatctagcaaagccaatatgctactatgagcattaaaacaacaaaaaagaacctccaatgcctgcattgtaaagaaagctatacttgttatcttctaaacatgctgtaataaaaccagtgtaaacacactttttcatctagaatttgaaactagttttcctaaacaatacccatacccttgccctttaatcatgaaatggtgactagattgttttacaagctgttacttattaagaaatgtcgtagccctctaggcaatgtgttactcacagaactttgataatacattcttggcttgactccatcattaagggaaaatgttaatataacctatgtgctaaattttttaaaaatcttctctttaaacaaagataaatcttttcaagagaaggaaaagattactttagatttgtttaaattaaacagaaacaaagtacgtatttatttaaataaaatgtgggcattctgttattctaaaagtatacctttttaaaataccttttgtaccttgtttttttctttttagaagccccttgcttatataaaataccttttaaatatgcattaagcccattttgagacattgtttgcaagatgaagaggcttttaggtgaaataaaatatttcactattgggattaccaggcaacatttgtagagaagatatttatgttaagttttacctgtctctagagctcatttttggtttttccatgtcactatcatgtcaatatcatagaatttcatgtgacataatcctaaggataaaaaatgtagaactgattgagaaaaagacatatattttcaataaaatcattttcatatcattttccaggcagatacctgtgtttttcctttattatctcagcccctaagtttttatattgtgatctcttaaagagagataactatggtttcaaaaagttctcagaatttctgtatctcatggtacagaaaaatgcatagtgagggttgtcttgatgtcagaagttggttctggagctgaaggtgtatgaaaacctcatgcagcgtccacacccagttcacccaagagggttttgtaacacattagagcagcctacagaagcccgtagcctagggcatctggatgagtagaactttgctgaaataattcacccttctacatgtttctcctgtaaagcaggtaagcttacaattactaaataacttcttatttctaagagttcttgtggctgtaattatctacaggatatgcataccactcccttatgtattgtgatgaagcaaaatctttaatgtggccctgaaaaaaaatgtatttgcatgaattggaaataaagcattgtccttcatacattctccacatggtgatgggttcctgttctacattatcatgcctcagtgaatctagcaacatactactcaccacctgggtctcaaacatcagcttgctcttacagcgatgtgaaaccatgatctgaggtcatgtgactttcccagataactgctgcctactccattaaaacttgactaaaatcaaggttgatatttgggtgatggtatactggaagcccaaaccccaccactatacaatgtatccacgtaacaaacttgcacatgtaccccctggatctgttctaaaaaatggaggttgagttttatgaactagcttggaatcaaaagactgttagttttactttcaactcagccattgcctgtgattcatagttctatgatttctgttttcttctatgagccatctactaacaactttaatagaattttgtgtctggagcagtacgtggcaagtatttggttactggcctcataagcactgtgtttacatctatttggtcatatgtctttgtcttagtgttaatttatatgtgctatgttggtaaagtgttttcaaatagctgtctttaggccttagtttctcaggaaagaaagactttgcatttgggcttattgagtgcaaacccaattgacacgaagacaaaaacacttgtacatttgtcatacatgtaatgacataaatttgggaggtgctaagggaaataaggttctgatgggtgtcttcaacttgaaacataactcaatgatgtaattttttcaatgaaactaaaagttcataaggacaatcccacaagcaaaatcacttccccaaaattccaaccacattttttactttgatttacaaagatacggctttgtcctttgatttcctgacactacctcagaatgttttccctttggtttattttctatttgaagaaatccaaaaagtgtttattatcttagaggctgtaattaatgaaaacagttccaactgtttattaacagaatcttttatttttaatacatttaagtgtcattcacttcctgagatcaccaggttcctgtctctgttttgcactttctggaagttttgagctctgtattatttattgattcttattctctttcattccaaaaataaattattatgctgaccagacacatacaaaattaggactattgcctaggtgtaaattaattccatttctgatttgctcattctccagtttgatgatgaaaccgtttctacatggctggctctaagccagatgatatttcatagtgcaaagagggatagaacctcactggtggccaaatgtgattatatgctataaccctgtgcccctactctgacacccacccccaagcagttaccctctgttggaagcctgcagctttctttgtttgtttctttaattatacagacagtaggatctgcatccttactagcatatagaaaaatcagagaaacaatgcaaccaagagtgtaagtatttttttattctttagatccattttccttaaaaccagaataaacctaggtcataaaccatatgcccatgttacttgaactcataacttactacataattggtggctcttgccacatgaatcttgtcattcatgtgaacatgggcttgtggcaagcatgctaacccatgctcataaggcttgaatgatgccaagatgtgtcacattcgttatatacattagagttattttgctctcaaatgtgaactggcttgtgagtaaaataataatggacttttagcgagtgggtaggaaagagtatttgggtcatgaatgttacttgagctgcaatgtggtttggccatgggagggtggtaacaacaggaaaatcagacagaattatcacagatttacctgctgttgccgaattttactcagtaggatttaacagatgtgcacacttctgaacaaagtgctattgaaaaacaatttgaactccctaaaaatttattcttagggaaagagaaaggaaaggatatattccaatgatttgtctgccgtcataaaactgagggaatgaaatgttttatgttagaatttttaaaaaaattttctaaaatgcccactgtctcctctattattttacagtgaactcattctgccagtatttatgagtgcctactgtatgccaggccttgggaatattcaaaccaatagaatttggtcccacacagggagtttatagcctagtgatggatgcaggga

SEQ ID NO: 11603 - DNA, 6000 bp, Homo sapiens
atatttagcctgaaaggcagaacaaaatgcttctcttcttttaaaacttgttttgtaaagattaattaagcttctatgtagttattttctgtactttattgattcaggattacttgtactccgtaaatgtgttgaattatttacacatcatgggcagctaatgctaatttagaacatacccagtgggacctcagagccctgaaatgctaaatgtaatctggggatcagtaacattccattcataaaatgtgtcacccacaggttaatggaaataaacaatagggaagacaatggatggattatgcaaatacactgaaaagattaagcagggggaggggactacaagaacccaatttgtgttttatttaaacgtggattaaggtttataatatacaaaatgattaaaggtactttgctaatttgctaatgctcttaaaagcaccactgcacagaagaaactatcaaaataaattggttatggctttcttgtgcgtgtgggtggagagtagcggagtatgtagcagcaagattaagaaaggacatttttagcagtaaatacaatgataaatgtgatattctgttaaaaaaaaaacttgagtgactagatttatataacatttatttgcatctgtgtgagactaatgaaagtttcacgaatataaaatccaatcctaatataaattaaactgctgttttgttttaaaaaggagaaatcaatctcttctattaaaaaatagttgtataaaacaagttaaacttaacatatgtgcttttgggggaaatatgtttaaattatggtgtgagaaatataattttattatatctgagaaaatatgtccaccaagtgcctgatttatgcaaaatgacatggagatacataaacttctttccaagttattagtttgcagatttctaagtcagagcaaggtgccatcctaagtacagcccagctgcctgtagcacttgatcctgaggtgggaactgcagtcctgggaggaggcactttgctgaatctggttcagcaaagcaaggagctccaaaaagatgaaatggccctgatgttcagtattgtttaagtggaaattgacctgaagcaggaccccctggtaaagagcaataaacctgttaccatcaggtagccatgaaattctgagtagcccactcacaatccagccttgtctgacactgatttcagaacatccccatgacctgtccttcatttgttggtgtgcagtaggaatatgtagaactagaaatatttgggacaaatgactgtattcaaaagaactgcagagggtttatgtgtattgtatggggaggtagaaaattagacatcatggtagacaggcaaatgtcagcaaaggaaagagctggaatcttgctgtggtatatgtggccaccctaaaccacaagtagccacaggaggaaatgagggaaattatttcattttctcttagaacttgaataacaattcttaaacaagaaattattgcagaatgcatattatcgctttactcatgacccttgaggttcttttatttactgtattcttttaaaacaagtatcatcaaaacgtttaaaacctttttcatcacagcttatacttttattgtttaagtctttgaaatcctagggttaggtaaacttttaatagttaaaatttccctggatgagttcatgctataatattttctgtttgtttcatggttcttcattaatgccaagtaatacaagcaggaattatttagcagtcttgggtattaaatgtttgactcttttgttctttcttttgtttttaaagatactgttttccctttggacgacctgaaggtgctctaaaagctacactttcattacttgaaagggtatgtttgaacattactttataaatactatttgctttctcagttgctgtgtattttagttattgaactagggagacagaccccgttattctatgctctctactgattccatcacaagtcatgagtttctcaccttttcttactacattcagactctgtctacagcacttcattctccctgaagcctttctgaagcctcacactgaaatcctatcctcatattatggcatctttttggtagtaatcatttttcctacctctttatttccctcatgaaatacttttttttcagttaagaataattgtttttgcttctcagactttacagttgtcttttattatcctccaactttatttgtacttctacctgtcgtagtcctcatgccaacaagtttatcatttaccattcacaaatatatcatttcattcattcaatattcatctcagaatttctttcaattattccagtgtatgtgttaccttaaatgaattcacatattatagaaatgtttctcccccacaaaataaccagcaaacaagatttttaatccaggtgaaaaaaatcattttttaaggaaaatatattctctattcctatttttatgacaactgaagtttcaaagagcagtattttttcatctgtctgtaattttattcatatacttgttagatgctaacagttaaataatgtggccaactcccatttcttaccagaattaaaatgaatttctagattcatctgtagctcataatttgattattgtaatcctgatttattgacttctaacacttgatcttgtccattttctgctgaattaattttagatactatattgtttattagcatctctattaaaaagcaaagagagaagacattgtccagatattacatctccatttcattgatttaagaacttgggagatgaggactacaactgatgattaaaatgagatcttaggattacagattaattttatttttatatccctgtcttatccctgattgttgtggattgtgtgatagaaatgtgattgttgtaattatgttttattagaatttttataatactgaaagctgcacataactcagatttttcaaagtattcatgtcatcctattcattaaggtattatgaataaaaatccttaaggattgctttattttttggaacaacatcccatcgtgggtacctaatacagcttctccatgtcctggtttccatggcagagcctcctttctgccccccagtagggaagacttagtgatggcaggatgccctcctgccctccattgacaggtggcaggatgaacagggacctttattccagttatagtcactgatcacatctcctgctgaattgagacagaaatgttaagggtcatttcttcatttttatttctctttacttactgatattgaaaagtaaaacaaaaatatgcatgtgaattcttgaaacctatgatacctcggaagaacatgggatgcagcaggaaatcgaggttggcatctccctttttgcatttgccagccctttacctgtactttgccagaaagtaagtttctggttcccagataatatgaaatattacctgggagacatatacattctaactttaacagccatttttgttatgtaaagtttgttgccatgggaagtataatagtaacgttcgtggttccgcatatgaaacaaaattaatcttaaagtttagtaataatcacatttaatggtgcatgtatattttttactatgcacaaaaggatttttctggctgcaaagtctaatgtgcagtgctaattaaagtgctaaatatttgtcagaataattgaatttgatagagagagaatgataaagtttgctattttcaaaaaagaaaaccttgcctaacaaaatatttaaaatgtcatcaaagagtagcctttaaaaaatgttgtcaaaggtcactgatacttggatgattaaataaatcagggatgataaaatccttagtgctgaggctgacttacaagagaatgaaataatacagcatgaaatggatgttttcatattctttcaatattcctttcaatataagacatagaaatagagcacttacgaaagcattgtcttctctatattaacattctgccatatgttttgtaatctgaatgaaagtaaagcaagaataaatgcattaaatatgcagaaagatagttttactaatagtgtaatcaaaacttaatgtgagcagttttatcattatgaaggttttaaagaaaattatgagtcaatgtaacagtgtttataaatacattacattttgaattctggatgtaattgcattttccccttgcccagtaataacatttttaaaggaaaagtccaaaaacacattttaggagcccaacagagaataatcagttattttttaaaaccatagaaagtttttatgtattttaacattcgatacttcataagcattcatttcactaaggcaaagaggtctccttctccctctttgaatacactgccgtggtattcacagcaaatcacaatcattaaaatttagtgagattagaggtcttgattttttttttttcagagctcaaagattatgcttattcttaatggaatttttgttattgttctcaaatatattgctcaaaagactcaaggcttttaaattagggatgtgcaaaacaaactattatttgtcccgagaactgtaatctttatctgaaacagctgctttaatggtgtcatgggtccctggaagaaaagtgacagtcacactgaatggtgacctggtctaggggaggttttgatatgcataaattaggcttaggaggagctaaggtgggaggattacattctcagttgggaagtgcattgcagacccattacatccccccaggttacctaggacccctctccctaataatagtcagatcaaggacaatttgtgtaatttgtctttagtatttattttatgcaacatctgtcttttttcttccatctgtctatccccaaccctgcccctcacccttccacttcctctctctgtaggttttaatgaaagatattgccactcccataccagcagaagaggtgaagaaagtggtcagaaaatgtctcgagaaagctgccttgatcaattacactagactcacagaatatgccaaaatagaaggtcagtgcagtgagcaattgtcgaagtggcagtgagagccaacaatgcctagtaactgaattttctatgagaagtcctttcctttcctgaacaatcctgtgccatggcaaagggaaatgtctcattaaaatctcagctggtgaactgaagagctttttcctattcattgctttaatatgcctcctgggactctgcttgaatgaaagacccaggattcgtgcttaagttgtcctttgttcttattttgagttttgaaaaaaccaaaaggtgttttcatgggttgtattttttggcagtactttaagtatgtctaacatttaaactataggcagcaaaatctttcctgatcagtaacagtgtagtattatgtaattttattttctgttctgcagtatcactcaaaaaagaaacttgttgattattgagggctgaaataaactcatagaacttccttcggtttttaattgcttgcaatgtactgatgcatttgaaagattagatctcttgagagaactgtgctttttttttttttctttcttcaggctttattcattaaggatactaattttttaaatgtttagaaataagtagattggaatttgtggcaaagtcacaaaatcagcttttattcaacagttttattcaacacattaatttatgtaattaaaagtaacaggcctcacattttttgctcaaattgtcataaaactggctttcataataatacatgcaggattaactaatagagggaaaaaatgcagttaatgttaaatacttatctgaaaataaaagtttcttacctgaaaataaaagtaaataatcctttataaaattttagtaactttttatataaaatggtactcaaggaatcatagatttatgaagcagttgatattagtatagttttaccaaaattcaggtagggaaaaagattgatgataattgtttgtgttattattccttt

SEQ ID NO: 11604 - DNA, 6000 bp, Homo sapiens
acacacactggggcctatcagagggtggaaggtgggagaagggagaggatcaggaaaaataactaatggatactaggcttaatatctgggtgatgaaataatctgtacaacaaacctccatgacacatgtttacctatgtaacaagcctgcacatcctgcacatgtacccctgaacttaaaataaaagttaaaaaaaaagaggaggagaagacatgggatttctcactgctgtcggcagagaatgtctgaatggggatgcatatccactgctccttcatgtatcatcccgccatgttggaaacattcagaaatttgccatgttgggcatcttcagtcccagagtttttcctgagaccaccttctatcccttgctgtccatcttgtacatttaaaacctcatttcccccccacccagttttgtttctcctttggtccccattttcctgacactccagtgctaaattgaatgtaagtactgagtggagagacagcttccactttcgtaagtagatttccccacatttttaatagacaaatctacagaaaaattggatggccttgattcctaattcccagattcccagcctcctgctcttctctgtattcctccacttctggcagcttcttagctccctattcttgccagagcagctattgctgctgctatattctactcctcataaaatgcattagccctaaaaatcattttccattcattcatctctgaataatgctagctttgttgagtcttggtgttggtcaatacatgagattaatgaatttataaactctgctcctgctttcttaccagagatggagggcaggttgctaggcaaacctccctgcccagtccccagtttctatctggctttcattttttgctttgctggggagataactttctcaaattcctacttacatattctctggtatctgagtctatgtagactatgtaaaataacagttgtagcattcactgtagtcaggatgttgatttaggttggtgcaaaagtaatatttgaggtgccaattacatctctttcccttaccggttctgaagcagttagtaaacacatgcaaaaatctggtaagttcagaatatcagctttctgctagaagttggtttggagactggctggggcctgaacatacattgggcttcctaaaacatccccctgaactggaaagatttacccagccactgataaatgataggcctctcctcaagaaagcaagagcttcatgtgtcaccagcaggctgtttaagaaagaaagagtgggccgggcacagtggctcacgcctataataccaggactttgggaggccgagggcagatcacgaggtcaggagatcgagaccatcctggctaacacggtgaaaccctacctctactaaaaaaatacaaaaaattagccaggcgtggtagtgggtgcctgtagtcccagctacttgggaggctgagacaggagaatggtgtgaacccaggaggtggagcttgcagtgagccgagatcatgccactgcactccagcctgggtgacacagcaagactccatcaaaaaaaaaaaaaaaaaaaaaaaaaggaaagaaagaaggaaggaaagaaggaaggaaggaaggagagaaaggaaagaaggaaggaagagtggctaggtatagtagctcatgcctgtaatcccagcactttgggaggctgagagaggaagattgtttgaggccaggatttcaagaccagcctgggcaacacagtgagaccatgtctctttaaaaaaaaaaaaaaaaaagctgggcatggtggtgcatgcctgtagtcccagctactcaggaggctgaggtgggtgggtgcctgagcccaggagtttgaagctgcagtgacctatgatgatgccactgcacttcagcctgggtaacagaatgagaccctgtctgaaaatgcaagaaagaaagacagaaagaaagagagagagagagagagagagagagagagagagagaaggaaagaaagaaagaaagaaagaaagaaagaaggaaagaaagaaagaaagaaagaaagaaagaaagaaagaaagaaagaagaagaaagaaagaaagaaaaagaaagaatgaaagaagacaaaaatggggcaaactacccttgcttggcattctgtgccactaccttttttcatgaagggtagatgcttctttccacacttccttactttccataccaatacttccataaaggtagccgtttctattttataaacagttagaaatgagaaaagaggacaaaactgttcaaaaaaacagttcctcccatcttgtgcccttcctcctgctctttgctcctgaggtcacatctctcagaatgcactgtgccaccccagcaccctgtcctccctgcccagctgttacctggggtgtgaagtctccatctgaatgtggaaagttatgtaggtgaagggataagggggagctgttcttaggccctgtcatagatcaacacccaaggagtagtaggcagggaggatcgccctgagttttgatcaatgcagcccctgtatctctgaaaaaagaagacaaacaatggggattcacattctcttttaccagatggtctctgtttcttcaagcaaatcctggcatttccatgaacccaagccttgtaggtttttttcagtctagatttatctgccttataagtggcagcattggattgcttattaagcttttggtcatttttgcaagttttaatctttttctataccttcaaaacttgctgcttgaagctaaaaaatttgtttcctttttcataatagcatcccttccaatgatatcatcccacctgtggccacttcctcctagttctctttcaatctctggccactccttttccatgttctttacaaaattcatttatgatgctcttttttggatgtttacatagtctggggcatggttctatgctttagtctcttgttagtccaccatttttcctacttgatcttatctagtccaatggcttcaattagcacataatgcttgaggctgacttccaaatgcataattctacccaaatggcttagtctgttcaggctgctataacaaaataccataaactgggtggattataaacaacaggaatttatttctcacagttccagaggccgggaagtccaaaatcaaggtgctggcacattcagtatctggtgaggaccggctttttgttgtgtcctcacatggcagaaggagtaaagatgtgcttttgaagccacttctataagtgcactaattgcccccacaaaggctccacatcctaataccctcataattagggactcagtatcaacatatgaatttagggaggcagaggacataaacattcaatctatagtaccaaacctgtctctcctgagctccagtcccatattttaaactacttactagacaacatcctcacctctgcctcatactcaactgaccagaaacaaaattcatcatttatcccccaaacttgctccattccctttgttctctaatttggtaacttgcacctccattaactcaggtaacaaagctaaaaatgtgattatattccttatctcatgtattcaactagttaccaagttctattaattctaccctcctaacatctttcatatatccttttttaaccctcttcactgccactaccttgctttagagcaagcttgtccaacccatggcccatgggccacacgtggcccaggatggctttgaatgcagcccaacacaaattcaaaaactttcttaaaacattatgagttttttttgtgtgatttgttttagctcatcagctattgttagcgttagagtattttatgtgtggtccaatacaattcttccaacgtggcccagggaagccaaaagattggacaccctgcttcagagcccatattaggttttttttttttttttttttggtcataaactgcagaaatgaaccctaagaaaataaaggatttatttgaaagaatattaggaaagctcacagaactgaagagaaaattgtgtagtcttgctttaggaaggactagatctggggcagctccggggacctcagcaggtagagctcagagctcagagtcttccagcctgggataccacatgaggtggctcaggtgcaatcatcttacagctctgtgggtcattagcaaactttcaaattcttagtataacctggttggccacctttgaatcaatcatccagagctaggatgcaggagtgaatggcactaattggtgatggctatagacccttataatttctcaacccctcctcagcactgtcatagacttctcaaggacctctttgcatctttctaatctatagttcttctgtctttccaatctatagttcacatgccactatttttgtatttctaaaatatatattgttcaataaggagattatacctcatttaaaatctcttgttagcgcttcattactcagaataacccacaaacttcctatcaaatagttcattttaggatttggatcctgtcttcctctctagtctcacctctcactacccttcccctaaatcttatgttcctggcatattgcaattacagtattttcaattcccctaaataagccaggctttgttgtattctcatgtttttgcctctgcttctccctctttctcaaatgtctgtcctctcatcacctggttaattcacactcatcttccccagctcagtttaggcagtagttccaaatctctctcagtctcttctcagtatgggttaagtccccttcctcattgcttccatagtaccctaaatttagatctaatttggcattctactctgttgcaatcaaccgtttctttgtctctcttcctggctaaactgtgagctcctaaaggagctcaagaattacatctgatttatgctttgttctcatcacctaggagagtgtctaatatgtcataaatgttcagcaaatatattgaaataagcaaacactagttttgaatgcataagatacaaagcactgggaggggggcacaaatatgtttaaaatttacatttccacttttaagggactcacagcttaagaggcagacaagacccgcacataagaaaagtgaaaacagaactacaagacactatacaatgacatgcacaaaacccagtgactatagtctagagtttgggattgcattaatctagaaaatcttctctttaaaggaatgacctgagtagtaacataaagaaagaagattcagggctgggcatggtggctcatgcctgtaatcccagcactttgggaggctgaggtgggtggatcacaaggtcaagagatcgagaccatcctggccaacatggtgaaaccccgtctctactaaaaatacaaaaattagctgggcatggtggcaggcgcctgtagtcccagctactctggaggctgaggcaggaaaatcacttgaaccagggagacagaggttgcagtgaactgagactgtgccactgcactccagccttgtgacagtgtgaggctccgtcagaagaaagagaaggagaaggagaaggagaagattcaaatggctgaagagattggggacagcattttaagtatggggaataagaaaaaatgctcactgtatttgaagaatgcagtgaaaacattggcttaggtagaggtagattaagagatggtgaagatgtgtgtgtgtgtgtgtgtgtgtgtgtgtgtgtgtgtgtgtgtgtagagaagtcataggctggcaaaataagagattggcagattttgtttaaatatgcctttaagttttggccttttcattctctgtctccaacacagaacacctcagcattctagattgcctattcatcacaaattccctctgtctcctccagaatccagaaaagaataattacgatattttcaaaatggaaagttcccatgccaaagactttgccttcttcaccaaactatgatttcgtgatgttcttaaaggtagtgtacacca

SEQ ID NO: 11605 - DNA, 6000 bp, Homo sapiens
agactccatctcaaaaacaaaaaacaaaaaaaccccatcagtttctgcctctcctgcctgtggttcaccagtgccagggcccctggagtgccgccctcccgagctcgcccttgctgcccagcattcaccagcgccagggcccctggagtgccgccctcccgagctcgcccttgctgcccggcgttcaccagcgccagggcccctggagtgccgccctcccgagctcgcccttgctgcccggggttgtgtgctgccttcacggccaacttggtttttgtttcttgggggttttttgtcctgctttgacaacaacattctgcctgtcctgtatcctactaagggccaaactggacttgttttttatgcttcctcttattattgagatgtaattcacacaaaaattcagcgtttttaaatgtacagctccgtggctattaacatattcgcggtgcagccatcaccactgccttaccccagaatctttctcaccccagctagaaaccctgtgccgcaagtagccatcctcacagccccagccttttcactgtaattggtaattattgtgacggaaggtctgctcttcagggcctgagagctcacctgctgggtgacaccaggctcaatcggatgctttattcttcattgagaaaaaccaacaaaaagttcatttggagtagctctctctctagcagtagtgggggaaggccagtattttaagaatttcccagtttcagtaagtaaaaattgtgtgtcctaaagcagttgtaaactcttaacactcaatttgagaaagtacaattaattaagaaaaggactagtctaaaagtaggaggttctttgtatatgtaaaaacttgagaagtttaaaaacactttttttatccgaaaattttattagctggtattagataatatccttcatcattttcaaacttatgtattttaatggcttaactaattatctattttttaatttttgtgggtacataggtgcacatatttatggggtatatattttgatacaggcatgcaatgtgaagtaagtacatcatgaaaaatggggtacccatcccctccagcatttatcctttgagttacaaacaaaaatactctaagttatttaaaaatgcacaattaggccaggtgtagtggctcatgcctgtaatcccagcactctgggaggctgaggcgggcagatcacctgagattgggagtttgagaccaccctgaccaacatagagaaaccccgtctctactaaaaaaatgcaaaaaaaaattatccgggtgtggtggcacatgcctgtaatcccagctactcgggaggctgaggcaggagaatcgcttgaacctgggtggtggaggttgtgttgagccgagatcgtaccattgcactccagcctgggcaacaagagcaaaactttatctcaaaaaaaaaaaaaaaaaaagcacaatgaagttcactacagtcaccctgttctgctatcatatggtaggtcttatgcattcatttttcgtagagacaaagagtctcgctctgtcgcccaggctggagtgcaatggcgcaatctcggctcgccgcaacctctgcctcccggcttcaagcaattctcctgcctcagcctctcgagtagctgggactacaggggcgcgtcaccacgcccggctaattttcatatttttagtagagatggagtttcaccatgttggtcaggctggtctggaactcctgacctcaggtgatccacccacctcggcctcccaaagtactgggattacaggcgtgagccactgcactctgcctcattctttttttctctggacccattaaccatccccactttccctgagccccaactccccttcccagtctctggtaccacccttctaccctctctgtccatgaattcagtggttttggtttttaaataagtgagaacatgggatgtttgtctttctatgcctggcttatttcacttaacatagtgacctctggtagccatccatgtttttgcaaatgacaggctcgctgtatcacccaggctggagtcagtgacgtgatctcggctcactaccggttcaagcgattctcctgcctcagcctcccaagtagctgggattacaggtgcccgccaccatgcccggctaatttgtgtatttttagcagagatggggttttgctatggggttggccaggctggtctggaactcctgacctcaagtgatccaccggcctcggcctcccaaagtgctgggattacaagcgtgagccactgcacctggcctgctctcactgttttttatggctgaatagtactccattgtgtatatgtacgccattttcctcatgcattcatctgttaatggacattgaggttgcttccagatgtgagctactgtaaacaagcagtgctgcacaaagatagaagtgcaggtctgccttcagtagactgccttcctttctgtcgggggtgcacccaggagtggcattgccagatcatatggtagctctgtttttagttttcttggggacctccaaaccactctccatggtggttgtactaatttccatcccaccaacagtgcgtgagggttccctttctccacatcctcgccagcatttgttactgcctgtctttaggatagaagccattgtaactggggggagaagagatctaattgtagtttttacttgcatttctctgaatatcagtgatgtcgagcacttttcttggaaacattttaataaatcctgaagtggtgcagtactattgcttccaaaatggtggaactggacactgagaccgatctgaactttgctttaaggtggcagcatcttgagtactcgctgttctgaaacttacgaaaccaaaacggcgctgatgagtctgtttgggatcccgctgtggtacttctcgcagtccccgcgcgtggtcatccaggtgagtggccgccggtggccggagctgctcctcttcagcatggactcggttagtgttcacgggtcgtaggtccacagctccatggaacttcgtaagatgaacacgtctgtggaactggtaccacaagaagtggcagcgttcccacaccgaggagtccccggtgtccccgtgtagcctccacgctacacatctgttggcttgggtttagcgtcacacagatgggaccgtgtggcacatgctggtcctgtcagccttcctccctccctcttttgggtgttccagccatggtgttgtgagtggcagctgttcctgctcgggccgtgggtcttccgtcacgagagtggcagctgtgctttctcaggtgttgagagacaataggtggggaggccctagctgtctggcctcggcatgggccttcacccccccatccctccggcctttgccccccgtctccccgggccttctcccccactgtctccccaccatctccccgtaccttcgcccccactgtctccccaccatctccccgggccttcgcccccactgtctccccaccatctccccgggccttcgcccccactgtctccccaccatctccccgggccttcgcccccactgtctccccaccatctccgtgggccttcgccccccccccgccccccgtcccaccgggccttcacccccaccgtctccctgggccttcgcccacccctccccgcccccttctccctgggccttcagtccccgtctcctggaccttctgctgtggtcctcgttgtgcactgcttttctgtggcttcatttaatactttatactattggctgtacaagtttaaagcactaaaggatggagaatttaaatagatttattttgcctcaatactcaaatcctgcctcatattcatgacatgttttgaagaaaaatccaataattacttgtatgtggaacaacgccaagacggctttcactaggaaaacacaagtccagcctgaaagaattcatgaagtgcctgtgacctgacgttgaggatcacatgggactgtcgtcatcatgatctcgtccccaggctgccccggcggaactgtccggtcagcgtgactgtttggctttctgcagccatcagcaccgcacgggctcaccagcactttgctcctgagggcacagccggagcccctcctcactgcaggcagacgcagcctctgctgccacgaagccacacagccctgcgcttggcatgcggctgctttttctgtgccagctcacgagtgccaccggcacagtctgtgtcacctggcagggccaacaggttttctgcacagggttgccacagtgttcctgcatggcggtcctgctcctggccataacatccttctcacagggcttggtgatcctgaccctcccagaggagctcactggcctgcagtgttgtcagtgtgatgctggtggggatctggtggtgagagcacagcatggcttcagtgtcttagagactgagggagagggtggagctcagccctcccctggcacagttctctctcagaaggaagtgcacggtcactggaggggcagacttcatataaatcaccaatcactgtgctgggactggactgagaaactgtcggctcctgggaagtaaagagaatgtttacagaacatagggatagcagatataagggaccagctcccaccccaggaccaaggtggagcctcgccagagcgtctctccagaccgttgggcggagggtgtggcccagctcactgaacgtcagggaggttgctgtggtgccacacggtggaatgtaccagcatgctgggaaagcctgtgcacaacagggtgactcaccgggcgtttggctgcaacacccccaagaggggtaccagggaacctcagtgtccacccagcaccctgagctggcaagggctaggctttgggctggcaaagggagagcagttcaaggctcagctccgtcttcacagcgcggtagaagacggcttgggggctgaggggcagtaaatccacagctggcatagaggagaagccggcgggtacgtgcccatcgttcaccatctcttctaaacacgaatgaaatgcgtgtgtcgtcctcacacactgaaggcaggctgcgtgcacggtctcctcctccgttgcgcacagcaacgtggctgcctgggcgcagcgtctgcaacttgtcagtcagtccctgtgtgtgcctggggacgctgtgctgcgaacagtgctctccggtcacatctgccctgcacctggaggtgggggtgcgatcgcaggccagaggcagatgtgtgcgcagcaggccgaccttgccaggctgtgcttctggggctgcaggctgcaccgtggccgggttaggttagaacgtgcattttcccagggcatcagcagctgacccttgatgttggtcggatgggggggcagtgctggttccctgtggtgttggtcggatgggggggcagtgctggttccctgtggtgttggtcggattggggggcagtgctggttccctgtggtgttggtcggatgggggggcagtgctggttctctgtggtgttggtcggatggggggacagtgctggttccctgtggtgttggtcggattggggggcagtgctggttccctgtggtgttggtcggattggggggcagtgctggttccctgtggtgttggtcggatgggggggcagtgctggttccctgtggtgttggtcggatcggggggcagtgctggttctctgtggtgttggtcggatgggggggcagtgctggttccctgtggtgttggtcggatgggggggcagtgctggttccctgtggtgttggtcggatggggggacagtgctggttccctgtggtgttggtcggatggggggacagtgctggttccctgtggtgttggtcggatggggggacagtgctggttccctgtggtggtgtcccttcttgctgtgcagggtggagggcatcttgccacgaccaaggaccattgaccttcaccttttctttgaagtatgttgtatgtctcacccatttttctttaaggttctg

SEQ ID NO: 11606 - DNA, 6000 bp, Homo sapiens
agattcacatactgttgtaagaaataatacagagagatccccatgcaccctttacctggtttgccccagtggtatcatcatgcaaaacaggacatcacagcccagatattgacattgatacagtgaaaacacagcagagctccatcaccaaagtattctcatggctatagatgtatagccaaatctacttccctctttccaaacctcacccagtccctggcaaccactaatctggtttccatttttatcattttgtaatttccaaaattctatacaaatggaattatccagtatgtaaccttttgagatttgctttttttaaaacccaacataatttcctggaactttattgatttattgaagtaactgcatcaatagtttgttcctctttgtcacagagtagtattccatggtatggatgtaccacagtttgcttaaccattcacccattaaaggacatctgggttatttcaatttgggctattatgaataaagctgctataaatattcatgtgcagatctctgtgagaatatcagttttgtttctctgggatgcatgccaaagggtacaatttcttggttgtatgatagttgcatgtttagttttgcaagaaactaacagagtggctgtaccattttacatttccactagtaatgtgtgagcaatccagtttctctacatccttgcaagcatttgatgttgtcactgctttttagttaggtcttactgatagggatatagtgatatttcactactggctaatgatgttgaatatcttcttgtgtgtttatttgccatgagatgaatgaaatggtgaaatatcatttcattaatttttaccaatttttctaattgaatcccgtggttttcttatagtgagttttgaaaattctttatatattctaaatactagtcctttattggaagtgtagtttacaaataatttctcccagtctgtagcttgccttttcatcctctttcatgtcatgtttcagagagcaaaggttttttattttaatgagttccaatttcctgttacgggttgtgttcatgtcaagtctaagaattcttgcctagtcctagatcctgaagatttcacctatgctttttgcttttttacagcaccatatgttgaaaaggctatcttccctccattggcttgtttttgcatctttgtccaaaatcaagccaggcactgtagtgcttgcccgtggtcctagctaatcggaaggctggggcaggtagatcacttgagcccaggagtttgagtccagcctgagcaacatagtgggacccccatctcttcaaaaaaaaaaaaattagtagagcatgcttgtgtgggtctatttctggattctctcttctattccattgacctatgtgcctatcccttgtaactctccttttaagtttatacttttcctgggcttctgacatttaaaatcggaagagaaatctgcgttttgattatgttcctggaaacaataactttctttcaagatctgaggaagaggaagactctctggaacagtggaaagaacttgtccttgtcctgggaatcaaaagatgtgaatcttgatttctactaaagatgaccctaggtgaatcatatcatttccctaggcctgaatttcttcatatataaaatgaagggatttgaactaaataatcttagttcttttcatatgactcaagtgaatttccaattacaaatacttattgataaacacaaatgtcctcccctcacttaatgtctatttccaaataggagcaatctcatagaatcacaggacatttggcttttgtcagatgtgaaggcccagagaagacacatggcctgaggtcacacatcctgtttaataacagaaccaaggctagaaaacatgttccatgactccgactttgctgctctttcccattctctctgcctcctggagaagaagggaacgtgttgctcccttctcctaccagagaagaggaatagaaggaataggtcagagacatgcatccaatatggcttctctgagcacccactcaataccacacctcatggaggatctctcccaggatttaagagaagaacaagacagagtttctctcctccaagagtctatagccaggccaagacatagaaccacagaaattaatgggagaacaatttaagaccattggctgaggaatacagataattgagctttgggctgtaacaaaataggttaagacatttattatcttagtcagtcccgaggtaagcaagactagagcaacagcccaacagtttcattgaaggctccatttcttttcatctttccactctgacacccttaatgtgttagctgtttcctcagatttgtgtcctcatagttaaatatggctgccatagctctgggcatcacatcattacactaccatctccaaaatcaattctgaggaggaaaaaattgagtttgttctcacatatctcttgttataaaggaggaaaacctttctcagaagttcccagaagactgcttctcagctctcactggccaggatcaaatcatctatctgctcctgcccaaattgtaaggaaaactaggaagtgatactctggaattttgaactgttagagtagaaactctgccagcaaggggaaaataggaggaggcgtgcaggcgggaaacagcttcttggaggcaaccaaccagtctgctacaattctcaaaagaaagagaccatgtgaccaccagactggtcaggcaaggcaaaattgcagacactaactcaagattagaaagatttttaaaagaactgtaatattacaaacctagagcaaccactcagaacaaagtaagtgaaagaggtatcactaacaagctagttgtagagataaaatggaatccaaatgtaactccaaagagtacaggaaaagaaggaaaaaagaacaagtggaacaaatagaaaacaaataacaaggtagtacacttaaaatttcatcatattgatcattacattaaatgtgaattatctaaaccctgcaactaaaaggcagagattgccagactggatttttaaacatccaattatatgctttctatgagaaactcacttcaaatataaaaatgcagacaggtttaaaatgtaaggatgagtagaaacatacatcaatctgaacattttttaaagtaaaagaatggaaaaagatataccagttaaacactaagcattcatatcaaagtattctttagaacaagggatattaccagggataaagagcatcaattcttattgagaaaagggtcagttcatcaagaagctgtaacaattctaaatgtatagtatgcacctgacaacaaagcttcaaaatacatacagcaaaaactggaagaagaaacaggcaattggaaaaaccacaatatagttggagatttcaagatttttctctcagtaactcaaataacaagtagaaaatcagtaggaacacagaaaattcaaaaaaacactatcaactagcttgacataaatgacatttaaaaagaaaacactctacccaacaaatgtagactacacaaagtatatggaacattcaccaagacagaccattaaaaagctgtttatcagtaaacttcctggtactagtacgtgtcgcttggaatcttgaaggcattcctgagcctggcattcctttagccaagtgagtagttcagaatgggaaaaaaaaatgcaaaaatctgaagattattggcatcagtgttttcctaataatattgtatcaaatttaaatattcagaggatgtgtattgagaagccaagtgatggctaaaaaatattgactttcaaaatttttctttgattcatttaaagttcataaagacatagggtctgaatgcttgtaatcaaggtatttccaggagacttcctttaaaaaacaaagcaccctctgtttacttgatgcactgaatatattatgtatgtgcttttcaacagtaagaaataaaaagtttctttaaccactgtgaggtgattactaaatgaagaatggaatttgtttcgaatattgatacaggatttcatgatgtgctgggcaatgaaagaccttctgcttacatgagggagcacaatcaattaaatggctggtcttctgatgaaaatgactggaatgaaaaactctacccagtgtggaagcggggagacatgaggtggaaaaactcctggaagggtaagtcaaaagattcaaaccaaacacctgcaatttcctacttcagtaagtcttgtagatggtaaagccttttagatcacacggctcacgtcatttccacgaatgacagtgctctcattaccaagtggggaggcacctggacttggcaatattttctttagcccaacactatcacttcctaaaccacaagtaatctccttagaaatttccacattggtagctcttggaatacttttgaagggtgagcagatttagctttaaacctatttagccaacctgggaatgatcatcttcagaaacccagtcaccccaaagccatttttactgtctcaaaggtgtggcttatcagaaacggaaaatctttctttttagataaaagaatgcatccttcagccattggtttcgagatttaaaaatgcagacttctaaaacttgtctccttaacccaacagagctgatttgttttattatcataggtaaatgttcttgctgtgattagagaattcttaactggtctgatttattttttaatttatcttctagagtgttgtactctgaaagctaaagtgaggaatacaaaatataaatttaatatattataaagaggcatatgggtcctctggtccttattaataaagttagctctaaatgtttatgaacgaaaggaaaaagatgctggatcatcgagccccacttttttataccctaggaggccgtgtgcaggcggtcctgaccagtgactcaccagccctcgtgggctcaaatataacatttgcggtgaacctgatattccctagatgccaaaaggaagatgccaatggcaacatagtctatgagaagaactgcagaaatggtaagaacacagtattctcctaaactactggagacccagtttctaaaccttaatgatcacaggtgcttctgtaagtgccagatgctgatctcatcccttgccactgcactccatgagctggatgacagagacagtgagtgtgtggtcctacccagtgccttcatcaacatcaacgtcagccagacctactgcagcaaaccagtggctctcccttgcttggagccctcttcaaaagccacatcaccacctcctgcttttccttagtgtccagttgactggacagagaataccttgctgagtctcagattttgcttttattacttggaactcttttggctactcaaagaatagccaatttgacagatgtttgctgatcagtctaatttaggctgacaaggatttctcaagcaaatgctgtgtagctggcgcaaatgctaaaatgtgtatattttggttttgctttgctcttagtgaaagaaataagctctctatctatgttaaagaggaccaaaggtgcaaatacatcaagggaaattatcttgtcagaatggtacatgctcaaaaaacggagttaatggccggataccatggctcatgcctgtaatcccagcactttgagaggccgaggcaggtgtatcacctgaggtcaggagttcaagaccattctggccaacatggtgaaaccccatctctactaaaaatataaaaattagccaggcgtggtgagatggagtcttgccttgtcacccaggctggagtgcaatggcgcgatcttggttcactgcagtctttgcctcccgggttcaaatgattctcctgcctcagcctcccaagtagctgggattacaggcacccaccaccatgctcagctaatttttgtatttttagtacagacggggtttccccatgttggccaggttggtctcaaacatttgacctcgtggtccg

SEQ ID NO: 11607 - DNA, 6000 bp, Homo sapiens; identical to SEQ ID NO: 2484

SEQ ID NO: 11608 - DNA, 6000 bp, Homo sapiens
ttaactttcttaggtaaaattgtgaccacattaatttcgaaatgttagttgtttagcataggtgaagtcagcaaactttttcagtaaagggcctggcagaaaataggctttgccagttgccgcagccactcaactcttctagtatgaaagcagtcacagacattacgtaatgaatgacattacataaatgaatgagcatggctgggtgccaataaaactttatttacaaaagcaggtagctggccagatttgctagtccctgcaacaagtaattcagcagcaccttagtcttgaagtgccctatgaaagcatctaggcccgtggctgtgcggcagccggcccacaggcgtcttcttgttgcatttttttttttgccaacagggcccaggatttcagctctttaactgacttctttatacctgctcccacctgttattttgttcctgtttctgttatccttatccatgagtcattgggtaggagggtagtttaacatgctctgccttctctgtccttgaaaataaatgcacatattctctatactgttgcctataagaaattaaaaacaatacatgtgaagatagagtccagaattcaggtgcctttttttttccttttttttttttttttttttttttgagacagagttaagactctgtcgcccaggctggagtccactggtgcaatcttatctcactgcaacctccgcctcctgggttcaagtaattctcgtgcctcagcctcccttgtagctggggttgcaagcgtgcaataccatgcccagctaattttttttttctcttgtactttttagtagagaggggctttcaccatgttggccaggctggtctcaaattcctgacctcaaatgatctgcctgccttagcctcccaaagtcctagcattacaggcatgagccactgtgcgtggcttcaggtgcctttttgtattgagagcctggatttagcacacatgtccaccatttttcttgatcaggtttgacccacatgcagccaacgggcaaaatgtggtttcccttatccaccagggtgagcccttcctgaaatgtttatcaagagtttctttttctctcttcagcagcttgttggtgtagtcacctctcattgtggatttttaatcaatttgatctaaacatggaaaagcaaattttactttccacagatgggcaggatgtagtgaaagtccagagaaggttctcaccaaatgtgtgcagctcggaagaaaaaggttgtggtcctcatgtcccgttattcatttggtgtcttggggctgttgatgttacaagtcagcttcattgcttaatgtgattgtgagattgcatgttttctttgtgtgcatattttcaactaggctagtttgtgaaattagtaatgttttacctgaaagattgagaaatcaaaaacatcacagctataaaactggcatttggctgggtatggtggcttatgcctgtaatcccggcactttgggaggctgaggcaggaggatcacctgaggttaggagttggagaccagcctggccaacaaaaaatcagccaggcgtggtggcacgtgcctgtaatcctggctacttgggaggctgaggcaggagaattgcttaaactcaggaggtagaggttgcatgagttgagattgtgccactgcactccagcctgggcggtagagtgagactccatctcaaaaaccccaaaacctggcattatcaactgcagagtcaacctgtataattttaacaaaacagagcagtatttctgttctcaattttcagagttggcaggaagatcagtattcaaacactgcagcaagtcacacagtgttattccttgtcactcagaaagcctctctccagcaccaaggcctgactgagcctgcgtctcttctcttacaggcatgacagcaagcgctgtggcggctttgatcctcatgacgtcctccatcatgtcggtcgtggggtccctgtacctggcctacattctgtactttgtgctgaaggagttctgcatcatctgcatcgtcacgtacgtgctgaacttccttcttctcattatcaactacaaacgactagtttacttgaacgaggcctggaagcggcagctgcaacccaagcaggactgacgcccgacagactccaccctaacagtctcaagcccctttccattcagtttattttgcagcaggtttttattattattattattattattattcacaacagacactttccctaagaatctcaaactgatttttaaaaatccggtaaattagaaggggccctcgctattttctgtgtcagtcttcattttaaatatggatacaaaaaggatacgccgagccaatcaaagacaagctttaactttactttgaagtgtttctgaaatgataaaatgtagccctagccccctgccctcaattgtaaagtgagcaaccattgctagtaattctttaatgtgtataaattcaatttcaggtataacaaatgtgatcatgacatgaaaatattctagaatagatactgtattaaatattgccatgtttacaatatgtaatatgtttttagccgatggatttaaacatgtagattcaactagaatccatttgtgatatttgtaaataaaggtagaaatattagatccatttctgcagaacttactgtacagtttagttggagtgtagcactgaagaactgtcagctcagcgttgactgaggagatagtgaaaatagcctatacacagcatcttgtgaaaagtactggcagccgtggttgcagcaaataatagggcaaaaaaaataataatagggtggtcggttccctttcatctccctcttctgaaaggaaaaaattgaattggaacgttcaagtccagtttgtgttcagtcataaaactgggccagttgttaaccttacagaatgagtcatgtggccagaccttcaagtccaaggccttcagacactaaggatgggaaaatgggtatttttctttggagaaaagctggaaatataaacatggcatttttaggtaaagtttcttccactagttgaattttcatgcagatatttttccttaacgttggtgccagtcaagcaaagagtattatgatggaaaagaccagtccaagccccatcgctccggagtgggagccagtgttcttgctaattgtttctttctgcactaaccactcagatgtctaatttaattgttttgcagtcaaatactggatttgtaaccttcagggctgacatgctgcccagtttgcttcatcgggagaatagcaacaggtagacacatctcaaggctaaatctgctcatgtcgccactgctctcataatgacacacatgcagtaagaagacttttgtaaggggatttgagtacacccaaatgaaattgtgacaggatgtttgtatggttaacatctgatatcagaatgttaaaagtgccttctgtcttaaatctcaaaccaaatattttgtgtgttgaccttgggcagaagaagtgtccttccctcctttcttcaccgtcaggtagaaaacctgcactctgcagaagggtcctgtgtgatcacttaatcctctggttgagaagcagcagtaatgtttttgcttccaacctgattaatcattttatgttgaaaatagtcaatgagaccagtatctcttgagtgctttatttgccttctctttgaagggaggggacgggctctgctctgtaaactcaaatgtgtagagtcagcaacaattccgtagcttccaactgactcagaattgatgcaacgtaggtcttctggcccgaggcaggtatcaagtccaaatcataatgaacttttcaccagtttcaaccagtttcttaaaagagagcttaagtcaagatttcatcaagacttgtgttttcccatgaatgtgaatctttcaatggctgttggagtatgtatgtactgttcttgcattctgaagtagttaaagaactctagaaagtactgattggccatctggtgtctatggagaaagaagtcctcacgtttgagggctgtacagtgaggccatcttgtagcagcgcatccagctctaccaaggcagtcctctggttcttttttctaagctacagtggaaatggcctaatggttaaaactgtggtatacatgacatcggttgtgctaaacaagttcctcgtgtcccaatatccaatggtttttcatcctattttgtatcaatcaacagagtatagttaaagcttgtcttgatgttgcattcttgcaaatgtcttcaactcttacctgagaaaacatggcaaaatggtcagccagacccttccagtttttcctttgcttttctaagcctcggggaaaccactgtttcagttgtataaaaacttttgccacattcctatggcccagtcgaattaataccctttttctcactgagagaggaacacgtactgcctgtcataacagcattgtaatgccagtgtctcagtaacagaatcctggtgggtgttaattgggtgttttttgccctggagaattcagattcctttctatacctccgattctgcccagaagagggggggaatcaccagtgttacaaaattagaagattgttttgcctgttttagactgaatatttgaacactgcagcattactagccaccagtgttaaaggacagatgaggggaaacatttgtttttagcagtaattccatgcctcatcttttttaagtgatttgttccaaatgaagccatttattgacttgatgttcacaaatatcatttgaagaaataacaggaattggggttagatgataaattctagggaatctaggtgatttggaggatttcatttgttttgcattacagctagttgctctcactaaaggtaaatttccggtgaaataactcaggtttaactagctgtgtgcccagaatcactgttccttcatacatgtgtcctctccttaaattcattactttcaaatgatgttcaaagcattgactattttcattcaaagaaactacattcggccgggcacggtggctcacgcctataatcccagcactttgggaggccgaggcgggtggattacctaaggtcaggagttcaagaccagcctggccagcatagtgaaaccccatctctactaaaaatacaaaaattagccaggcgcagtggcacacccctgtaatcccagctactcgggaggctgagggaggagaattgcttgagcccgggagacagaggttgcagtgagtcaagatcatgccactgcactccagcctggccaacagagcgagactgtcccccccccaaaaaaaaaagagagagactgcattcaaagaggaccaagactacagtgaaattaaaactgtttgctggctgggcatggtggctcacacctgtaatcccagcactttgggaggccgaggcggttggatcacctgaggtcagaagttcgagatcagcctgaccgacatagtggaaccctgtctttactaaaaatacaaaaattagctgggcatggtggcggcacctgtaatgccagctcctccagaggctgaggcaggagaattgcttgaacccagtaggtggaggttgcagtgagccacagttgcgccattgcactccagcctgggcaatgagtgaaactctgtctcaaataaaaaaataaaaataaaaactatttgttgacttttgtttttcatttagttttggaaaagactatttgcaaaagtacagagttatcttcagcaattacttcacaacttagattggtaccaagagtgacaggagatcttgtcttggaagatcattattagatgccaacaaggagacccactgtgatttctggtaacctatttggggaaaaagacctaatgacctaatatgcaatttctgtcctcgtgtctttttctctaacacacagtcatgggtgaaacatttcagacacctcaggcagcacttatggtttctaattgtgagaactaccct

SEQ ID NO: 11609 - DNA, 6000 bp, Homo sapiens
gtgcacaccatcatgcctggccaattaaaaaaaattagagatggggtctcattatgttgcccaggctggtgtcaaacacctggcctcaagcaatcttcctgcctcagcctctcaagtagctggaattacaggtgcaagccactgtgccaagcaggagtctgcctttctttcttgggttttttttttttttcccagcctgtcatctgattcacatattttccttggtcacataatacaattttgctttttagtcctgggagctcttatcttttattaaagacatttttatatgagttgttttaagtaagtagtcctctgccatttttgtttttagccttttcctcatagttggggctattcctcttgttatctgtctttgaagttatgggcaatgttttgtttgtctttatcatcaccattagtaattatctttcacatttaaaaagcagttcttgatcctatctatctctatttatcagaggcaagaatgaagtagtttcttttgattccttattatgtaggagatattttaggatttcttacacctgccccacacagaaacatagatatactcttgattaatgtattattggcctttgcagtgactcacgcctgtaatcccagcactttgggaggctgaggcaggtggaacacttgaggtcagtagttcaagaccagcttggccaacatggggccaaccccgtctctactaaaaatacaaaaattagccgggcatggtggcaggtgcctgtaatcccagctactcgggaggttgaggcagggagaatcacttgaacccaggaggcggaggttgcagtgagccgagatcattccgctgcactccagcctgggcaacagagcgagactccatctaaaaaaaaaaacaactatatatatatatgtatatttacacacatacatgcatacatatatatgtatataaatttggccttaagaaccaagaaaaaaaaaacgtgtttttttttagacagggtatatgtatgtaaataaaatatatcctgtaagtaaagtatgatatttaatatagcatgtgtaatatatagtgttataagatggtagaaatacacacaccacacatacacttaaatttatatatataattttttcgctgctgtgtcattgatcttggcctccatcatggtgcgtgaacacgccatgccaggagctttatcctcttcaggctatagaagttgaaggataggaaactaattcctagtccagttccctcctgcatgctggcattcttccactattgctctggtgggataaggagaaggcttttcttattgcttaagccttttcttaagcacacctcattgcctgctcttccatcactttcgccagatggaataagcaagaaaacaactctccaggttcttcttttccacatgggagctctcactcttggcacatggtactgctgcagcctctattctcattcatgctctcacctagggcacagtctcaaagctgatctcatacaccaaaagacgcctggggccgggcacagtggctcatgcctgtaatcccagcactttgggaggctgaggcgggtggatcacctgaggtctaggagtttgagaccagcctgaccaacatgatgaaaccctgtctctaccaaaaatacaaaaattagccagttgtgatggtgcctgcctgtaatcccagctactcaggaggctgaggtaggagaatcacttgaacccgggaggtggaggttgcagtgagtggtggtgcatgcctgtagccccagctacttagaaggctgaaggtggaggattgcttgggcccaggaggcagaggttgcagtgagctgagagcatgggcaacacagtgagaccttgtctcaaaaaaataggacacttggattagaatgttcatagcagcctttctcataatagctccaaagtggaaacaacccagatttcaaccaacaggtgaatgaataaacaaactgacatattcattctatagagtaccattcagcagtaaaaaggaatgaactactggtatatgcagcagaatgaatgaatttgaacaagtatcttgtagaataaaataagccagacagaaggagtacctactgcatgattccacttatgtcaagttctggaacaggcaaacatcatctctggggtggggagaattgcctggaaagagtcaggaaggcacttttgttggggatgggtcttcttttggatggtagctacacaacagatgtttatggttgtcaaacctcgttgaactcaagagttgtgtattttcttttattttttgagatggagactcactctgttactcaggctggggtgcagaggcacaatcttggcttactgcaacctccgcctcccaagcttaagtgattctcctgcctcagcctcctgagtagctgggattacaggcgtgcgccaccatgcctggccaatttttgtatttttagtagagatggggttcatcatgttggccaagctggtctcgaactcctgacttcaggtgatccacctgcctgggcctcccaaagtgctgggattacaggcgtgagccaccacacctgtcctgtgtattttctttatgtaaattatatatcaataaactaatggctgtactttttgcaaaaacaatcagaacagaaaataaggatatatagtatatataaatgtatatataaacagaaataaaatatgagtatgatttttaaaacgcaggactgaagttggtcctagctcgggcatggacgcgagtcttacactgtggcatctgctcctttttctttctggttcagaaagaagccagacctgagctgacacttgcgggcagctggagccagactgtcctgccttatttccaggtggctgggcttttctatttctaagggtaaaggtgtgttcaggtcactgtaatttttcatctagtgccatcagatttgtgcacgacttttattccagtggggtgtgtgtgtgtgtgtgtgtgtgtgtgtatgtatgtgtgtgaatgtgtacacaggctagtgccttctttgggatatttacccaaattcattttggatgtgaggagatctatttcagagtttggtagcccaattcaaccctaagatataaaatatgattttaaaaagtcatagctgcccgggacattgggccagaaagtagcactggtggtgtggctgtggaatgtcatatctccattgatgggcacacgagggtttttgcactagtgactgacaggtgttaagtcaccacccttgcaactgactatcggagttccaaatgtgagaggtcggaacattttagtcactcacctgcggagagagggagactatagggccttagaccagtaaggcttttagaccacctgggcccgcccctcattctacaggtgagatctgagcctgcggggaggcagctggagaagggtatgtgtgggaccagctggtggcccgccttgacccccggtgcaatcagttttaaggccagtgctcttgcatgttaataacttttctcttggatggtgttttaatccgctgggactaaatgattctgtcataaatccttgcagacgagaggatgggaactgccgtttatgaagtcacctgcaatgtgccaagtactcaacacatgctacctcatgaattcctaggtagtggacctaggaggtggcaattatttgttccattgtacagataaggaaaccgaggctgatgcagaattggggtttgttacaccatgatttttcccaggctccacgcattccacagatttacagtctcagttttcagttttcattctggaggtatcggacaggtgtctgctgtgtgcacgtcctgagaacacagtcctggccctcgtgggatgtatagacattgccactgtagcgctggaatcaatgggatttactgcagagatgaccgtgggggcgaggttaatgccaagggtcagactgaaccctatgtccttcctgtgtgtctgcttgtagatttctggagggaatgtttctttttattattacaattttttttttaattgagatggagtcttgctctgttgcccaggctggtgtgcactggtgtgatcttgactcactgcaacctccgcctcccgggttcaagtgattctcctgcctcagcctctggagtagctggaattacaggtgcctgccaccatgcctggctaatttttgtatttttagtagagaagaggtttcaccaaattgataatcaggttggccaggctggtctcgaaatcctgacctcaggtgatccacccaccttggcctcccaaagtgctgggatcagagtcgtaagccactgcaccctgccctggagggaatgtttcaacctcataatcccggcctctcaaagcctgcctctccttcatgcctgacaccggagggggaacaatgactgccatgttcaataaaacttttgtgggagatgatttaaattgctttgatgacacccttgggagttgggactccttttagtaatttaggttgaaggaatgtgtgctttcatgaaagagaggaaatgtatctggactctgggcttgaagctcttctttctaagaggaggcttgttggatttcaaaaccaagacgacaccacctcttggtgtgctggcagacacagagagaggactgtctgtcttccctcctgtgtccctctctgccacagctgaaatggctgatcttttcagaatcactgactgggggatgttcatgagcttggacaggataacaaatggaggtgggttattttctcatcctaataagtgagaaacagctgttcttcctagcttggaaagcaagtcatttgttttctacacacacacatgcatgcgcgtgcacatacacacaaccacacacacaaacacacatggttatcaacatgctgctaggaaaaattaaaaattgcgcatcatatttctaaaagaggaagcagagaaaagggatttccagaattctaaacacgcctcccatcactgcgtctcctctcagctaggactttctgtttgcacagccgaggcctgcagggtacattccagaggtggacttggggctggccttgaacttccagaccctctctcccctctctggccggggctggggaaatgtcagctattctgagggccttggaagctggactcagttattttcggtaatgtatcatcaaccacttattccacttttacagaagctatttgtaaaatgaacagtgtttaatgtatttatatttaaagtaattattgaggtcaggcatggtggttcacatctataattccagtactttgggaggcagaggtgggaggatcccttgagccctggagttcaagagcagtctgggcaacataacaagaccttatctctacaaaaattaagaaaatcagccacacgtgatggtgccgcctgtagtcccagctactcgggaggctgaggtgggaggatcccttcagccgaggagttcgaggctgcagtgagctaagatcgctccactacactccagcctggatgacagagtgagaccctgcctgattactttttttttaaagtaataatactttttaaaaaatattttttaattattatattaaaatatatatttaatatatactaataattatatataataatatataataaaatatatatttaaatatgtatataataaaatatataacatatattttaaatattgtttaattattataaaaaataattacttttttaaaagtaattattgatagagagggatttacttttgccattgtgttgctgttagtcttgtagtccttttttctgtctttcaactgatgtataatttcagttaagtaagatgaataagttctagttacccaatatgcagcattgtacttatagttgaggcataaactcatttagtactttaatttggcccaaatacacaagtgtgcgcagtattggacacttaaaaatttgttaagaggatagatcttgtgtgaaaggttct

SEQ ID NO: 11610 - DNA, 6000 bp, Homo sapiens
tcctttgagaaccagtgaggtagtgtcagggatctgaagtgattgaaaatgccgcttatatattcaatccttggatccctttgatgaatttttgtattctgctcttttatatgcctgtaatcccatgttttttaaaccattgtgctctggcctttcttgctgtttgagcgtaacttcaactgttattgccgtgagcagtcttctcaagctcctcctgggcccggcttcctgatggtggcctcactgaactgttctgctgcttaccacttgtctgaagcttcctcttttccctttttgaactcttattaagcattgctggcttcctgtttgtacttatatgatgtagctggtactgggtaagaaatcactagcagcttttcaagtaggaaagacggtctgaggtgacagtttagtggctttgtaattaggctcagcacttacgagactatttgcagtgtccgctctgtgccatctactttgctgctggtctgtggaggaagcagagatgaaaacaccgtctttgctgtcaagaactcacctggtggaagaggcagatgtatggataatcatcacatgatgataaatgccatcgttgttgcaaaagtcataaacgttacgacagcatatttttaaaatgaagttagtaaattaaaatagaaaatttaatagaagcaagactaaattagtttactgggttatcttctttaatttacttctatcctctccgtagacagtctggcacaggtttgaatgtgtcctggctcttcattactgaggctaacgttccacctaatatatgcaaaagtgtgtccatcccttctacctttattcgcattccattacttttatagacttttcttcttttgctttcataattaatactggcagttgactttcttttcaggggtctttcttcacaaacaaatttttttcattttcttttctttttttttttttgagacagggtctcactctgtcacccaggctggagtgcagtggggcaatctcagctcactgcagcatcctgagtagttgggaccacagatgcaaaccaccacacccaactgatttttcagttttttttgtagagacaggggtctcgctatgttacccaggctgggctcaaattcctgggctcaagcgatcctcccaccttggcctcccagcatgctgggattacaggcatgactaaccatttaaccataaagaatgtttttttagtcacttgaaaagagactttgtcgtgttgagggtcagatgctaagttatcagcaggctcagtcatgtccctcttgatttttagctctggaagagaaatggccccagttcatcacccttctctagcccagcctcctcccgctcccagacaccggagaggccagcaaagaaaataaggtacttggcattctcctgcagttttcatttgctgcgtggacaggcgggggtgaggaaaggtgggaaacgaacctggctcttaggctttgtgctgctgtgacttggagaatcaaagaaacttaagtccctgagaggtacaatgcagtacccacccgaagtgctgtcatccctacagtcttggatactgactccagtggcctctggctgtcgcctcccactccagcatgagggatcgggtgcaagcacagaggccatgcagagtggagagcagagagagtcaagtcagcgggcagtcgccttcaggttcttgactcgagctgaccccctaggtgcttgcagttggctggaatgccactccctcagggatcacatctgtgtctagaactcccagggacttgataggttgtaagtaaggtttgaagattattgttttgtgcttgttttaagacaaaagctgtcttcatggcctctgtgaacagcctcccttcattctgttggaatttcctgttgactttttttatcctggcatactgagatcttaaatgatggttgttttagacattggccacttggtagttaggagggtgtgagaaattatttaatacttcagccaagaagcctttctagactaaattgttccttttttcctgacagagaagaggagctgtgtcatcattccagttcttcaactccattggcagcagacagggagtcccagggagaaaagggtaggttgctgagccaggaggaggggctgctgttggtggtggaggtgtttgtggaggatgtagagattaatacctattgaaaaaaggtcttgagcattgctatgtctaaggcatgttagatacaaagagagagatttcctctccttcagaagtttatagtctgatgagggagaaaggctacagacagggactaacgattggatagaggtaagctcagtttgagtcacctgtgggtgatcccagtaattactgcacagtaagcggtttgtgtgcgcgccttaatcttgcaaacaccatccaagcaaccaaaccatagaagattgaatcttttcagagatacccattgaaaactcaatgtgaaatgcgaagtgggtagacacaaccatccatttctggaagagggaaggaagcaaacgagtcttgatttctttctttagctgcagatacaaccccaaggaagaaacaaaactcgaattctcagtctacacctggcagctctgggcagcgtaagcggaaagttcagctgctgccttctcggcgaggggaacagctgaccttggtatggtcttgtccatctactcctgccctccccggcttagctctcctaagtattaggaacgctaaggacaagtttcttctgattttttttctaatttatttttgtttttgttttttgagacaacatccctctgtcacccaggctggagtgcagtggctcgattttggctaaccgtaacctctgcctcctgagttcaagcaattctcctgcctcagcctcccaagtagctgggattacaggtgcttgctaccacgcctggttgattttttgtgtttttagtagagatggggtttcaccatgttggccaggccggcctcaaactcctgacctcaagtgatccagctggcttggcctcccaaagtgctgagattaccggtgtgagccaccatgcctagccttcccgttttttctgattggcctgacttcttctttttcactttggtagcctccacctccccagcttggctattcgatcactgccgaggacctagacttagagaagaaggcttcattacagtggttcaaccaggccttggaggacaagagcggtaaggagcacagattgttgcacactggagaggtttcaggtgtctgttttctttggttttattttggtgtttgaaaaaatgggtttctctgggaaaatcccaagtagggttccatgttttcttgtggtctttctcacctgagatatccgtgttggtcttcacgggaactggacagcagggaccactgcaattgagggcaggcattcctccatgagctgtgctgagagcctgctctccgacaggcatgtggaaagaagtcccagacaagccaggactgcttcacctttctttctttcttagatgctgcctcgaactctgtcactgagaccccacctatcactcagccttcatttacctttaccctgcctgctgctgcacctgcctccccacccacctccctcctggccccaagcaccaacccactgttagagagcttgaagaagatgcagactcccccgagcctgccaccctgcccaggtgagctggagtggggccgtggatccagccttctgagcagcatccccggcttgagttggaataagggcgtcgtgcctgtcagtcgctggagattgctctgcaggccgaacgcaccctggctcagcacaccggagcgggcccacgtttaacagcgccagagcccgcatcaggaagtgttagagaaggggtgctgcgacgctcaggatctgaagcctggctcgtagctgccctgagcctcgccttcctcatctgtcagatgagaatgatcttccctgtgcggcacctctgaagtgtgaatgtggtggcgtggtcaggatatccttgcctgtcagaaccactggtccagaacagcactgcttcctttccctccagcacttcgagggctgctggtgttcccggcccaggccttcacggcactgcgcgcgcacacctctttatcagacggtaacctggggttcgtacgcaccctccctgctcaagggcagagacttccccattcatagttgtgtgctcttagcgcctggcaggtgagcttagtaggcaaataaagtatatctagattcatacgtgaacttcagagttcagacaattggactgtcttagtctctacacattaggcccccatttaggccccattttatccccttctgtctgatgatctgtgaggtagaaataacacttccttgatttactgtacaggcctgtagtgtagacttagctgagtttattgactgactcttggatcccaggctctgtggtaggcgtggggaggacactgaaatactgaataccatcatctttgaagtgtttattccaatttcacattttctattcttcttccagaatctgctggagcagcaaccactgaggccctctcacctccaaagacacccagcctcctacccccgctgggtttatcacagtcagggccgccagggctgctccccagcccctcctttgactccaaacccccgaccactttgctggggctgatccctgctccatccatggtaccagccactgacaccaaggcacctccaacccttcaggcagagacggctaccaaaccccaagccacatctgccccgtcccccgcccccaagcaaagcttcctgtttggaacacagaacacctcaccttccagccctgccgcccctgctgcatcttcagcacctcccatgttcaagcccattttcacggctccacccaagagtgagaaggaaggccccacaccgcctggcccttcagtcacagccacagcgccctccagctcctccctccccacgaccaccagcaccacagccccgaccttccagcctgtctttagcagcatggggccacctgcatctgtgcccttgcctgctcccttcttcaagcagacaactactcccgccactgctcccaccacaactgccccgctcttcactggcctggccagcgccacctctgctgtggctcccatcacctctgccagtccatccacagactctgcttcgaagcctgcgtttggctttggcataaacagtgtgagcagcagcagtgtgagtaccacgaccagcaccgccactgccgcctcacagcctttcctcttcggggcgccccaggcctctgctgccagcttcaccccggccatgggctccatattccagtttggcaaacctcctgccttgcccacaaccaccacagtcaccaccttcagccagtccctgcacactgccgtgccaacggccaccagcagcagcgctgccgactttagtggttttggcagcaccctcgccacctccgccccggccaccagcagccagcccactctgacgttcagtaacacgagcacccccacgttcaacattccctttggctcaagcgccaagtccccgctcccatcatatccgggagccaacccccagcccgcatttggggccgctgaggggcagccaccgggggccgccaagccggcccttgcccccagctttggcagctctttcacttttggaaactctgcagccccggctgctgcacccacacctgcacctccgtccatgatcaaggtcgtgcctgcgtacgtgcctacgcccatccatcctatctttggcggtgccacgcactcggcgtttgggttgaaagccacggcttcggccttcggcgctcccgccagctcacagcccgcctttggcggctccactgctgtcttcttcggtgcagccaccagctccggctttggagccaccacccagaccgccagcagcgggagcagcagctcggtgtttggcagcacaacaccatcacccttcac

SEQ ID NO: 11611 - DNA, 6000 bp, Homo sapiens
gcccttgaggcccacaccgatgctcccaacttactttccagccctattccctcacctgtctggcttccgactcctcaagttgagttttccacagatacttcctccccacacacacacccgtttttgtccctgctactctccttttgcgagagctctctcctcttcataggtctctaagcttttactcacccttcaggtctcctctccacctgccacctcctccaggaatcctgcctggtgtgccccaggtagagttgatttttcactctccagtgctcacacagagcttgttttccctgcgtgggagctgtttatttaaattcaggctggcctgattacaccctgatgagctccatgccagccctgggcctggcccagtgcgctcagcatgtccttccagaaagaatgaaggaataaaaaaagacgaagagtaataaataggagagtaggggtagaggatgagccccagaatcagacattaggcagggtgtggataccagtcttgccattattctggtggccctggaatgtcacatcagttcccagagccttagttttctcatctctaagatgggaatgggctaggcatggtcacacctgcaatcccagcactttggaaggctgaggcaggaggatcacttcttgaggccaggagttcgagaccagcctgggcatcatcgggagaacctgtctctacaaaaaaataagaagttagctgggtgtggtggtgcacacctgtagtcccagctacaccagaggctgaaggtggaggttttcttgagcccaggagtttgaggcttcagtgagctacgactgtgccactgcactgtagcctgggtgacagagcgagacttcatgtcttaaaaacaaaaacaagagaacaacaatgatgcccctgcactgttttgcagtgagataaaatgacttcctgttattcaatgttatccgaaggcatttaggttagtgcctggccccgaagcaggtgctcaaaacatggtttactggctggcttgctccctgagaggccagggcagaggtgcctggcaggaggaggctgccctgaatggggagagggaggggtggggctggagaggattgactcctccatcagattagagggtcttcaggaattccaccgcccttaggtcctcttcctccctcgcctctgggaaattggagtaaaatccagtagagacaggactgccctgaagtgaggaggcgggagccggagggagtcggggaggtgggtgggaaggagggtttatggacctccctgtgaagtgggggaatggcctgtgaagggctggacagctgggtaggatggtgggaatgctgaaggtcacggtaaatacgggcttgctaattatttatttattagagatgaggtcttgctctgtcacccaggttggagtgcagtggcatgatcatggctcgctgtagcctccaactcctgggtttaagtgatcttcctgcctcagcctcccgaatagctgggatttacaggtgtatgcgaccatgcctggctaattaaaaaaaaaaatttgtttttgaaaaagggtctcactatgttgcccaggtaggtcttgaattcctggcctcaagtaatcctcctgcctcagcctcccaaagtgctgggattacaggcatgagccaccatgcctggccaggtgttttgaaactgacagacataaactgaaatcgatgcaccgatttggggtaaagtaatttaacaacggtcctctaagtcctgtcccctgtgtaagcctcctccccttcacacagtcatctcttctgagtctctctaactaagctctctcaccgagtcccctccctttgctcagcccctctccccatccttgccaccagaagtgccagaccctgggactccagccaggaggcatcagtatggtctttcttctcttccttagaagaaaccccagaggtggccaccgcccccacccacggcccacgtggtgcccaacctgggggcagcacccgctcagccagtctcgccagactggtcagccaggcctgccatcacccagcaccaggccgagggggtggatggtccgctggtgtgggcggtcaggctgagggccagggactctcctgttcagcctggtgccaggactccaatctgagctcaaggacttcagaaagaaataggatcttgttgcctaaagaaagaaaaaaattccatcctttactattttttattttttgagttggagtctcactctgcctcccaggctggagtgcagtggcgtgatctcggctcactgcaagctccgcctcccaggttcacgctgttctcctgcctcagcctcccaagtagctgggactacaggtgcccaccaccatgcccgactaattttttgtattttgagtagagatggggtttcaccatgttagccaggatggtctcaatctcctgacctcgtgatccgcccacctccgcctcccaaagtgctgggattacaggcgtgagccaccgtgcccggcctactgttttttattttttaagagacaggatcttggtctgtcgctcaggctggagtgcagtggtgtgatctcagctcactgcaacctctgcctcctgggttcaagcgattctcccacctcagtctcccgagcagctcccgaccacaggcacacgccaccatgcccagctaatttttagtatagacggggtttcaccatgttggccaggctggtctagaactcttggcccaagtgatccttccacctcagcttcctaaagtgctgggattacaggtgtgagccactgtgtccgccctaggaatcaatttaatatacactggcttccctggctttagtcttcctgttcccagaagacgtggagtacgggctctgggagctagactgctcagctcacagagatctttttggctgcaggacagtggtccatcactggccctggggctcagatgccagcgggagcttggggttagaagggagactttgtttttgcccctttgctagggactcccagggagctgaactcagggcaagctgcatgtgtgtgtgttacaactggggacttggggccaggcggggtagctcacgcctgcaatcccagcattttgggaggctgaggagggcagatcacttgaggctagaagttcgggaccagcctggccaacatgctgaaaccctgtctctactaaaactacaaaaattagctgggcgtagtggcgagcacctgtagttccagctactcgggaggctgaggcaggagaatcgcttgaacctgggaggcagaggttgcagtgaaccgagattgcaccactgcactatagcctgggtgacagcgacattccgtctcaaaaaaagagaacaaaacaaaacaaaacaaaacaactggggacttggccaagcccctggaactctggggacaggggtctgaaaagtcctagctcccacctgttatgatcaggatccgaactgcgcagcagctgctttgcgtacggaactttgctccctcctcttgttattaaactttttggctcacaaagcatttttacttccttctctcatttcatgtgtatctcagactggggagtgggccccagtgttctcattgtacaaaggaggaagttggggctcagagatggaattggcttctccaaggtcacagggctggtaggatggcttatggatacacagcttcccagcttttgtcctgagctttttggctcatgaagcattttcacatccccatctcatttcacgtctgtttttgtttttgatcctggagggggtgcaacatcctcatttttacaaaggaggaagctgtggctcagagatggttcctgggctggaaagatggtttatggggtgggcagagatgggtgagctgatctggtggtttttatccttgatagaaaccagcaggtgtggccaggcgcagtggctcacgcctgcaatcccagcactttgggaggccgaggcgggcagatcatctgaggctggaagtttgagaccagcctggccaacatgctgaaaccctgtctctactaaaactacaaaaattagctgggcgtagtggtgtgcgcctgtactcccagctactcgggaggttaagccatgagaattgcttgaacccgggaagtggagactgcagtgagcagagatcgtgttgtctcaaaacaaaaaacaaacaacaaaaacaacaaaaaacaacaacaaaaaacaaaaaaaagcacgtgatccaattctgtcagcacaaaatcacacagtgcatgttataaagaagaaaaagaaaataaatgagtgccaaccctgtactctctgaccccaaaaccaaggtgatgaatggcagatgtcttataaggtgttcctgtaaaagatcttcgggctttgggaagagggccagatgcaggcctagaggtaaatttccttgttttcctctgccttagggctatgggagctggagcggagaggagagaagcaccttgcctttgctggtgtttttcccgcagcaggtgggtgggactgagccaacggtctcttggcatcaacaaagcatcaacaaatctctctccagctccacttgtgctgagctactggctgatccccaaggacatccttctggcctctccttcacacctgggtcccctagccctgcgtgagctctgtgcttcttcccctgccctgtgtctgctctatgcctggagcctctgtacctgccctctcctcaacccccaacccctccctgctctcagctcccgatacgcgtggctatgcctgggagggaaggacagcttcttagggccacaggtggactgttgtagggcttgcatgctcccctcccccatgcctgcttctccaagtggcacttggctgtgtcccaggaaagcaagggcaggaagtggcagggcgggggccgggggccgggggggcaggaggcgggcggggggttggggggggcaggttctggccatctggccaagtcacgtgtctactcagaaagcttgttaaaggctacctggctgggaccacaggtaagaggcacctggggaaggaggcacccatgctggagtgcccacccgtcctgggcaaggccctggccttctctgggcttcagtgtactcctttgagccaaggcaataaaagtccctgccctgctgactggcaggaggctgtgatgaggtcatctccaggaaagcacttatcgccaatcatgatgttacttatctctggtgttattcagcccataggctctgtgtgtagagggagccttgtaaagaaagccccagggaggcgtggtctgggcagaaaccatctctgtttgctttggtgtgtgtgcctatgatgggggtcaaggtataggagtgtgatttgaaactggagaatgcttcgttctttccatcatcaaacatgtctttttttttctttttttttagatggagtctcgctctatcacccaggctggagtgcaatggcgcgatcttggctcaccgcaacctccatctcccaggttaaagcgattctcctgcctcagtctcctgagtagctgtgattacaggcgtgcgccatcacacccagctaatttttgtattttttagtagagatggggtttcaccatgttggcctaactcctgacctcgtgatctgcccatcttggcctccgaaagtactgggattacaggtgtgagccactgcacccggcccaaacatttctttttcttttcttttgagacagagtcttgctctgttgcccgtggctggagtgaaatggtgcgattatagttcactgcagcctcaaactcctggccttaagcgatcctcccatcctggcctcccaaagtgctgggattataggcatgagccgcagcaaccactcctcacatttcttgagcatctgtgatgtatcaagccagatgctgggcactgaggttgcagaaggcattgttcctgtcttctaggagccccaggctagcagggaagacggatgtgtatagagttaaccacaatacc

SEQ ID NO: 11612 - DNA, 6000 bp, Homo sapiens
aatcgctttccacagtagctgaaggaatttacattaccatgtggttgtatcagcctattttctacccgtaaaatttggagacttcaacagccttctttcattttgtatccatcctctctttgtccctttcagaacctcaggcccagagggtggagccaggagccatagaggattattcacagaccttgaaacctaatggagtttacccagttggattttgagggaactgagactcagggaggtcacattgctataggaatagaaatatgagtctcactataaagtcaatatatttttttcctttaccttactgcttttggggtatgatgggttatatagtatattttttgataaaagggaacatattagttcattaggagaatatagtattttctggataatagtatctgagaggaaattatgcttttatggagaatattgaataatgattaaagagtattcaacaatggtttgatataagatacagaaaatttattcatttcttaaaatttcaactttaatacattgtgacattaatacatgtctaaatgaagatctttatactaagcagatgagaagtacaaatatagcttttgggttagataagtctatataagacagatctaggagacccaaagggatatatttgtaatgtccattaaaaaatgccaagatatactgcccaaagcaatctacagattcaatgctattcctgtcaagctaccaatttcatttttcatggatctagaaaaaactattctaaaattcatatggaaccaaaaaagaacccaaatagccaaagcattcctaaacaaaaagaacaaagccagatgcattacattaccagatttcaaactatactataaagctatagtaaccaaaacagcaaggtactggtacaaaaacagacacagagaccaatggaactgaatagagcactcagaagtaatgctgcacacctgcagccatgtgatcttcaagaaagttgacaaaaacaagcaattgggaaaatatttcctgatcaataaatggtgctgggatagcgggctagccatatgcagaagaatgaaactagatccctatttttcactaggtataaaaatcaactggatggattgaagatttcaatataagatctcaaactataagaatcctagaagaaaagctaggaaacaccattctggacattggccttgggaaagaatttatgactaagtcctcaaaaacaatgacatcaacaacaaaaaaattgacaagtgggacctaattaaactaaagagcttctgcacagcaaaagaaactgtcaacagagtaaatggacaacttacagaatggaataaaatattagcaaatacaaatcttacaaaagtctaatatccagaatcagtaaagaacttaaacaattgcacaagcaaaaaacaaataaccccatttaaaaatggacaaaaaacatgaacagacatttctcaaaagacatacaagcagccaacaaacatttgaaaaaatgctcaacattatcagagaaatgtgaatcaaagccacaatgagataccatgtcataccagtcagaatggctattactgaaaagtcaaaaaaatagatactggtgagattgtgaagaaaagagaacaactgttggagggaatgtaaattagtttagccactgtggaaagcagtttggagatttttcaaataactcaaaacagatctagtatttgagccagcaatcccattactgggtatatatccaaaagaaaataaatttttctaccaaaaatatgcatgcacacattaaatgcagtactattcacagtagcaaagacatggaatcaaccttggtgcccatcaatggtggattggataaatgtgatatatacacactatggaatactatgcagccataaaaaagaatgaaatcatatcctctgtagcaacatggatgcagctagaggccattatcctaaacaaattaacataggaacagaaaaccaaggactacatgttctcgtttataagtgggagataaacattgggtactcatggacataaagacggcaacaacagaaaccgtagattactagagcagggagagagtgagggagccaaggactgaaaaactattaagtactctgctcagtactgtgatgatagtatcactcacacctcaaaactcagcatcacgcaatatactcaggtaagaaacctgcacatgtacaccctgaatttaaaattaaagttgaaattatttttaaaaaaccataagttttaaaaatataaatacataaaaatagccagaaattttatgaagaatgcctaacattatatctgattattccacaatatcaataatagcttctatgatccgcagcagctttccaggtaatgtttttgtttgtttgttgattggttggtgttttttcttttctcctggttactctatttcattagttcaatatagtttttatgttttatttgtttttttttttgccattgtcaaaagttaacttcagttatgcacttataccttaaaatatggttaatatccaagtactaaattcaaatatcttgtgtaagttctctttagatttatttaagaaattgttagccaggcacaatggatcatgtctataatctgggcacttcaagaggccaaagtgggaggatcactggaacccaggaagtcatggctgcagtaagccgtgattgtaccactgcactccagcctgggtgacagagtgagatcccatcttaaaaacaaacaaacaaacaaaggaaaaaaaaaaaaagaaggccaggcactgtggctcatgcctgtaataccagcactttgggaggcctaggcaggtggatcacctgaggtcaggagtttgagaccagcctggccaatgtggtgaaaccccttctctcctaaaaatacaaaaattagccggccgtggtggcccacacctgtaatcccagctattcaggaggctgaggctggagaatctcttgaactcgggaggcagaggttgcaatgaactgagatcgggctgttgcactctggcctgggcgacaagagcaaaactcggtctcaaaaaaaaaaaaaaaaaagaggaagagagagaaagaaattgtcattaaaagcatgaggtaaatttccaccgagaaaatgttactatttcagttaaacaattgtacacagaacgatggctaaaactgacatttatttctgtattggtcaaattttaatctgtcctttaataaactcctctgctaagaagttgattcttttcttattattgaatcttattatgtctctttgataatcagacaatgtggtataaatcctggttttaggctatcctttaacttaccattaatttgctatggattgtactttggtaagtcttataaaactttcttctatgtaactctgagaactatcttcagatgatcaactatttatatagggagtctaaatttcagattataataacactatttcagtgcaatagctgatatttatctagtacttactatgctaagtacattattccattagattcccatatagtctatgagatgaatactattacatcaattttaaagattaggaaaatgaagtttgaagaaagtaagcaacaaatttacataactcctaaaagatggagagacttatgtttctgttggattttggagcccacactgccactcccatatggttcttttttttttttttttttggagacggagtctcactgtgttaccccagactggagtgcaatggtgtgatctcggctcactgcatcctctgcttcccagattcaagcgattctcctacttcagtctccctggtagctgggattacaggtgccagccaccatgcctgggtaatttttgtattttagtacagacaagttttcaccatgttggccaggttggtattaaactcctgacctcaggtgatcctcctgcctcagcctcccaatgtgctgggattacaggtgtgagccactgcacccggccactcccaaatggttctgatgccttaagtggaactaccattgagtcaacacatattcatattatgctgactctatcccagatactgaaaaggacactaaggatgcaaaggtgattccaacagacatggtacctgtctagggattgttcagtctagacacaaatgacagccatggaatgctccaattaaaagaaaaatattttgagtaaaactatttaaaacactggtaatcacattatcaggattcattcacggccgggcgcggtggttcacgcctgtaatcccagcactttgggaggccgaggggagtggatcacgaggtcaggagatggagaccatcctggctaacacggtgaaaccccgtctctactaaaaatacaaaaaattagccgggcatggtggcgggcacctgttgtcccagctactcgggagtctgaggcaggagaatggcgtgaacctgggaggcggagcttgcagtgagccgagatcgcgccactgcacaccagcctggatggcagagcgagactccgtttcaaaaaaaaaaaagaaagaaaagattcattcacagtaaacaaacaaacaaacaaacaaaaaactcttcgttgatttcaatctggaaatgaaaaagaaaagaagaaaaggaaaggaaaaagaattctgactcattgatagatttgtttagaaatgtttttcttttttctgttagaaagctcagagttaaagagtggacaagagaaataacattttttcaactcttccattttctaaataaaacactgccactatacattggagtatgggatattatttccactttaaagataaggaaactgactcaaatacacggaaaacaggatttagtaaacgtgatttatttggaacgtgatctcagatccacagaggtgagaaaaacaggaaaggagaaagaaaaagtgctgattgagagtgtggtctcagctggagacgctcttaactctgattgcatggagacactcaggagcacaaattgcaccacggggttagtccatcacggggttagtccatccaaaagcaaggaggcagcctttggtacccctgtgccagtcaatattcattaaagggcagttttttcaaggaagtcggagctagctgctggacactaacagtcaaatctcaaaggagctgggagagaaatgcacaagcaggtaagggggttctggttaggggacctacaccatccactatgcgtttatattttagtgcacctacagtctatagttgggtaccgaataccatcagttgagttgctttgaattcacactcgtgtattccccaggcttaattaagagcacgtggtgaatgggaggtggtaatgactcagtataagattacctagaggctgaatacctagtgggccagaaagctgttttgtgaaaagataaaggttagattttgcctttggtcagttatttggaattatacccaacaccttacttttccaatcctttagttaacacctactataaaaatgctgcctaatataattgcaatgataaagcctatgtaaactgtagttttatatgagttgtttactcctaattatggtgttgtctgtcaatatggagttaccaggtggtgtgggcagtcacctagaggtttttccatctgaaaaagattgctttaagatcatggtgttttggactctctcactatttttttttttattctttatcactgaagaaagaatgaggcctatagtagtatatagaacaccttattaaaatgaatcatttacacacatcttttatctaaaaacaacattcaataagtgtgaattgaatcaaacctgttgggctgggataaaagatgtaaaatccaaccacgtgattctctcagataaatgccacaatacacattcctgaatatgttggatttagtaatatggtgcatttagtaaaagtgttttgttttttcctaataaggcctttttgcttgaggaaacaaaatgcagaaatttt

SEQ ID NO: 11613 - DNA, 6000 bp, Homo sapiens
cagaagcaccggtgagacctgggccctgtccacgtccccctgacactgggctggccacatgccgtgcagagctctgaccatccttgctctctcccagccctgcccctaggctccagccatcccacaccagctcctaggcactgagagcacgagcatgggtgaggaggggggctgctttggggatgaggtggcaggggtagggggggccagggctgggcccaagctgtacagactcacttgatcctccttcccccgcgcaggcacccagccaggcctcccaggctgctctccacgtcccttatgccactatcaacaccagctgctgcccagctactttggacacagctcacccccgacagggggccgtcctggtgggcatcactccccacccacaccgcacactggccccagggccctgctgcctgggcctccacatccatccctgcacatggcagctttgtctctgttgagaatggactctacgcttaggctgggcagaggcctccctgcactggtcctggcctcactcttttccctgacccttggggcccagggccatggagggacccttaggagttcaatgagagagaccatgaggccactgggctttccccttcccaggcctcctgggtgccacccccttacgttattcttgggcctctaataagtgtcccacaggtgcctggccaggcccacctgctgcagatgtggtctgtgtgtgtgcatgtgtgggtgtgtgtgggcacaggtgtgagtgtgtgagcaacagtaccccattccagtcgtttcctgctgtgactaagtcagcaacacagttcctctgacatgggccttggctgtgcttctttgggggtgaagagattggggaggaagtctccacccctgggaggcagaagccaggtgagaaccagagtgggttggggcctccttgcagggctgggtttggcccagggagagggcagtgtcccagtcttagagatctgtcctggcttcttggggtggcggggggttgggggagcttcctgagggacacctgtggcttcctagacagaattgggggatcccagcgggatggtccctgctgcaatcccaccatgtcctaggacagcagcaagggttcctggggcttcagcctgagaaaagtccctgtgatttgacctggcgtccctctgccgggctccctgctgtggcctgggctagagtcctgatgccctccttccacagctggcatcaggcagggctggaaagtaggaggacttgcctgaaatctggctggatttcagagccttgctctgtcacccaggctggagtgcattggcacgatcttggcttacttcaacctccacctcccgggttctagtgattctcctgcgtcagcctcccgagtagctgggactacggatgtgcaccatcgtgtccgctaatttttgtattttttttttttttttcagtagagacgggtttcaccatgtttggctgggctggtctcgaactcctgacctcaggtgatccacccaccttggcctcccaaagtgctgagattacagacttgagccacggtgccccgcctgaataggagcttcttaatcaaaatttcagcatggctctgggtcaaaattgaccagctgatttaataagttgatgtaaaaattttacagtcagctacccctgggagggggagtctctccctagtcagtgaggcaccagatgccagagcattggcaatgtacaaggggctcagccctgtggctcatatgtgtaatcccagcacactgagaggatgccttgagcctgggagattgaggccagcctgggtaacagtgacaccacgtctctgcaaaaaagaaaattaggggagaactgtggtgcgtgcctatagtcccacctacaggcagagcgagaccatgtcccccactaaaaagaggccaagaatgcaggaaatatagataatatgggccctgtgatgggtggaggccaaatagatcaatacagaattgaagaagacacagagcacttgtatttcccttcaggcatagcgcgctggctaggactccagtaccgtgaagggaggcagtgagagcagacatctgtgcctcattcctgatctcaaggggaaagcaagaacaaggtgggtgccaaggaggggcaaggggctggggcaggcatagacgtggctggtgaggaaaggaggatagttgttgggggaaggtggggacatacaagcagcagttctcaaaatgggcagggtcctggccccctccctgcctctgctgaacactgcatcccatgcctctcccatggccacctgctgggctaacgggctggatttagactctgcccatgttggaatcatgccctcctccagggccggtgcctcccaaaacccccctctgagagagagccacagccccaggcttagccccaggccctgtcactgctgttgggggagggaggatgaaccatccgggaggcctcacaccattccagagcagaaatcctgacacaaaaggaatctcccatgggggttcagctgggtccagagcccggaaagtgacataaacacgcaccttgcatctaaggagaatgcacgtggcggtaccgggcctgaggcccctggggagtatgtaccctccagagctacccagaggctgttggctaaaagttctatgtggccccctccttgggcagcctggtaagcaggtgaccttctagctgggtcccatgggccacgggcaaggcaggaatggaacgaagagtcagtcctcagtggctgggtgttgtatcccatgcctataatcccagcactttgggaggctgaggtgggcagatcacttgaggccaggagtttgagaccagcctggccaacatggtgaaaccctgtctctactaaaaatataaaaattagctgggtgtggtggcacacacctgtaattcccagctacttggaaggctgaggcaggagaattacttgaacccaggaagcagaggttaccgtgagccaagatcacaccattgcactccagcctgggcaacacagcgagaatccatctcaaaaaaaaaaaacaaaaagtcctcaggcagggtgggccaccctcttgaggccttgcccaaacagccagggggtcccttgtcctcttttcggcccacctttgcaggtgggaccagttcagtccaaagccccggtgcctcagtttccctgtgggttgaacaaggagaatgaggtgtatagggcctggctcagacggaggggtttcctgagcatggggagcctgtttcctcagacctgtgaagggaaggagggtggatcggcctgactggccctgggaagcacagaggagcctactgggaccagggaagagactgacaagagaagggaggcctgtccctgcctgcttctgtctcaagaagattgttatcacttcctctggtgaaatcctgccttcctgtccccacggcccctcagctgatgccaccttactctggagaggatgggcagagcctcctatggagggagccctgtgggtcaccaaagctccagtgaccacccccgggcaaagacctgcagatcccctgttagagacgggcccaggactttgtgcggggtgcccactgttgctctgagccttcacttcctcagggaggcttcctcaggatctcgaacctgcggaaggaggaccagtctgtgtacttctgccaagtccagctggacatacagatcagggaggctgtcgtggcagtccatcaaggggacccacctcaccatcacccagggtgagtccagctgccctggcaccaaggaaccttcctggttcagccataggctcaggtgtgtggagggaatgacctgaggggctgtatgagggaacaacctcctggggctcccctatgcctgagttcctgcaactcagaagttgaggcccagagatccaggtagagggggctccagtcctgggactgccctgcaagtcatgtggcctgggacagggcttctccaagctctgtcccctcctgtgtagggcagggaggtcagaggggaccctgcagatccagtctcatgtctgggggtcaaggggtggcctcgagagggaccagtctctgtgtaggggaccgtcagccccctcaccccttgagcaagactgtggtccctgcaccaagggagcaggcctggggtgggaagaggccagctgggctgtggtggtgcctggggactgcatgggagcccctgccagggagggagagggacagaggacaagctgggggctctggtgcttgggctgggggctgagcgcctgtgacctccactggcttcctccttctcctctctgaggactgaatctggggtgcagcagagcacagactcaggcccgcctttcctctccctgaaagagcctgcgctggccttggacagagaaagggatgagaagtgaggctgagtgcggtggggtctgcagggatccaggtgggaggggcccagccagccaaggtgaggcccagcccctcagcaggaagatgggcactggggcccttgggcagggctgacttgacacttttgtgtgacttgagccactgtgcccagcctgaacaccctttcctggtaaaacactccacaaaccaggaagagaaggaatgtactgcaacaaaataaaggccagtcatgcaaggcccatggctgaaagtctttcagtcattttagatgaaagactgaaatctttgcctccaagatcaggaacaagagaaggatgcccgctctcactacttctattcaacacaggatttgaagtcaggccgggcacagtggctcacgcctgtaatcccagcacttttggaggctgaggcgggcagattacttgagcctatgagtgtgagaccaccctggccaacatggcaaaaccccatctctactaaaaaaaaaaaaaaaaaaaggatttgaagtcctggccggagcaattaggcaagggataaaaaggcacctaaggcccttttgcaataagaagccagatggataaaggaagtgctggtcaccctggaggtgtactggtttggggaaggtccccggcccccacagccctctggggagcctcaccctggctctccccactcacctcagccctcaggcagcccctccacagggcccctctcctgcctggacagctctgctggtctccccgtcccctggagaagaacaaggccatgggtcggcccctgctgctgcccctgctgctcctgctgcagccgccagcatttctgcagcctggtgagtacccaggaccgcccaggtatggtctctgcccaaaccacaggaggggccaacccaagacaaaggcagaacatctggggcaggggccaggctcccacctccagcaaacaagggcgggtcccataggggtgggtgccgccatctcttccccctccaccctcccccatgcctgaagagtgggagacccaggccagaggtcagtccagccacctgtcacacgactgcctgtgggtgaaggtgtgggagggtctggggtcaccctctttgtgtcctgaggtggtttcaaggtctctcccccactcactccctccttcctctaggtggctccacaggatctggtccaagctacctttatggggtcactcaaccaaaacacctctcagcctccatgggtggctctgtggaaatccccttctccttctattacccctgggagttagccatagttcccaacgtgagaatatcctggagacggggccacttccacgggcagtccttctacagcacaaggccgccttccattcacaaggattatgtgaaccggctctttctgaactggacagagggtcaggagagcggcttcctcaggatctcaaacctgcggaaggaggaccagtctgtgtatttctgccgagtcgagctggacacccggagatcagggaggcagcagttgcagtccatcaaggggaccaaactcaccatcacccagggtgagtccagctgccctgacacctgccttgccc

SEQ ID NO: 11614 - DNA, 6000 bp, Homo sapiens
ctcaaaaaataaaagaatctggaatcttcctttcatttattcaagtagtctatgccaaatcattctaaaaggcagtcgccaaagacaaaagaaagagtcattctcctctgttattcataatcttttgatttaaggaaaagggattttcaaatgtaaagtgtctcaaaacttctgtctggtcttagtcctaaatttaaaacatttacaaattcaggcagcttgaattactacctcgatataattttgaacttctatgtttgtaaaattgagattctccacataactttttattaagagtatgattcctttataccatgcatcaaaatagtcatatctttatgtttatttatgaataaattacgatagaagcatttagcattatgaattgtttctgattatccaaaatatttcttgttgaaaactatttgaaactcattctagtttggatgcaaaaaaaaaaaaaattcagaaaatgcattaaggttttagaacgaacctcttgatttttcctttgaagtatatctgatttctgagtttttttcattttccttctagcttggtaaaaattatagattattccccaacttttcttggggataaagtttcttaactttaggtgaaatttaattgtatgagtccataataaaagatcttgtgtgggataaagaaaatggatttttaaaataatgccttacagtgtaagacatttttcaatttggaagaaattcttgatagttaattccttcaaggaattaggtgaagtataacagaacaacttttaaatttgaatctttagaaaacaacgcgacacattttcacttcttggagctgccaaaagagggccaatttagtagtaattacccatattttggagaattggacaattttttttttactttagtggatttaataaactatatgtggatgtcagggaaaggagaatccactagtgttaggaagataggaaagaatgaactcccaaaagcactttacaattttctgcaagttaaattagttagtattatcacatccctcatgtggctacttactgctttttaggcaaaataaaatgggccagaaaagaaatttaggaattctgggctcaaatattaattatttagttaccttatttggggctaagctgtatttcatttaaaggcgtcaggaacaaacatcatcttggtcagttcctccatctgatgactgggggcttgattttgaaagcttgggtggcaaattggtcatatacttggaaactgtgagatttcatcccctaaagggagagcctgagtgtcgaaaagtgaccaaatgcctgtggattgttttttttttttttttccttgtttttcattctaagtaatattaattatgtgtccaggtgccctaggtatttcttggtactgggccatttatcttgagaacttacctgcctctcacaccgtgctctgggaggtcatagccattactgtattatctttgtaggtgccagtggaaatctaggtcctaaaacctataaaatattttgtaaatattttatgcagcgcacatctttgtagatccactctgccagtgggtactcctgggtttttacaatggtggggctaaaaatcaatctgaaacaatacaaaagaaacaaaatagtctttggaaataaatacaatttgcttttattctgtgtctatacttgctcaagaaaaataaagtgcactttaaaaagttttttttaggtctctgctgtttcactcaacgcagataacttttgatcagtggtttattttgaatgaatttctttttacaaagtaacgttttatggtgctggtgaaagttattctaaactcctcccttcccaccaccccctgcagagagcaacaaggtttatgtaacccaaaactttggtgggagaactcaactgtatttaaatagaggttaacctctgggccatccaatatagtgtgtctgtactaagtcaggttagcatgtaaataatataaatataaccagaaatgtaacaacggtatttaatagtcatcagatttatttctaaaatattgccatggattcagaatactgaattccaaccagatgtatttcgggagtattacacaggtcatatatatttcacttttttggttcaaacccaggggatctacacgataattagattgagaacatctgcatcaaatccaaaccatttccctgatccttccttgagccttccccatgggagggatttctttttttttttaagcccctgcacattttgtctagccacctttagcgcaattcctaggtctcgcctgcctgccaccgcagaaatagacatgccaggggaaggcggaagcacccccccccccacccccgccgcctccccgagtgtgcaggcatccttagaagtcgcatttccccgggacaggaatgtccctcggtggcaatgccgcttcccgccagaagcctgactccgggacagggcgtggcaggcgcgggggcctgggcgcgccggtgggcacgtgcgcggggacccgaggacccgaggacccgagtgtcggggcgccgctgccctctaccgggcggcgcggtcggagctacagcgcggcggccggccgactgagcgcgcgggccggggcgccccacacggaggcagcccttggccacccgagatccacagtgccctgctgtgcgcggcgtcaccgcatctagggtggaggctcgcaacgtgccccccgacgccagcgcgctcccacccaccggcgagtcaaggttgcgttggggagacagtgaaccccgttcccgacatcaggggcctccccttggggaaactgaggcccctggccagctgcgcaagacctggggacacgcgtgttctctaaatcttgggactttcatttccagcctcttcctccaaaaatgccgaattcactgcgccaaccctcgaactcacttgaaaagcaattgttttccacttgcgcgttttattttgtatcctatgcagattctatttacatatgcattttgagattaaggaatttggggacttgttttaactaattactcgttcagtgaagtacgggagagtcaaagaacagtattcctactggaaactccaagtcacacgtgtgtataatcaatgaaagatgacgatcataaaacgtgtgctttcgccagctttccgcgaggagagaaatcaaaagagaatttattttttggtttgcattttagcatttctgtaaacttgggaccacgctttccgttttcagtgagtgcacccacactttccaactttctgcgcccaaagttgcaacaaaccaaggtgtctgaaccacaggaagtttcttgggctgttccgctgaagcggcgcggggggacacagaactgggctcccagacttttcctgtcgtggcctaaactggaacggcttgggcgaatgggggctgccgggacccccagcgctaccgccgttggggtgcgttcgggtgcgacgctggcaccgccgctgtccgggtgtggggcatccacgcgcgcggccccctgagagggtcagggctgtttccccctcaactccactcctccaaacatgccacgctgttcctggtcgtgtcggtgtcccggtcctcgctgggcgcagagggatcagagtgttgccgtccaccgtcggggcgcctcccacgcacgctgctgcggggggcctgggccacgcaggggtcgggtgtggggggtcccgggcaggtggtagcggcgtctccgcgctctgtacactaaccactacaggggcgctccgacgttccccccaaccggagtcttgaaggcgctgcgctcggccaccgcgggcgatcgcgatcccagcgggagaccccccccacccccgcagccctccccaggtgcgcggtgccgggggaccccgggcgctgccctccagcgccccctcggggccgggtctgtggccggcgcgaccgcggactttggggggggttgtcccgaggggcgggggtcgccggtcggcccgcggaggggagggggagggcggcggtgggggggttgggggagcaggggccggggccgcgcgcgcgaggccgggccgcggccgccgcgccctggggctgcgactccggctccggctcgggctcgccatggctgcggcggtgccgtgaggaggagtccgcgtcctcggtggcggcggcggcggccggctccaggccgggttttggcgccgcccgcctgctgcctcctggcggctcctgaactccagccccctctctatcagccgctcactccgtctcaatatgtctcaagatggcggccaatgtgggatcgatgtttcaatattggaagcgctttgatttacagcagctgcaggtcaggctcctccgcgctcggcctcgcgcccgggggtgggggctgcgggcggtcgcggcctccgccgggggccccgggctggcccagccgccggggggcccgcggcggcggggaggaggggggtgccgggcaccgcggggccgagtcggggccgagtccctcccgctccccggcccccattgatcactcgcttgatcggaaattgatcctctttgttcaattcatcgatcagcccaagatggcgccgggagccgccgccgccaccactgcccccggtgtctgcccccaccccgggcgcccccccgggccccgcgccgccgccgccgccagcgccgccgccgccgttgccgccgcgggaccggggagggggcggccccggcggcccgcggggtgcgcgcgcgagcggggagcggggagcgggcggcggggggcgggcggcggcgggcgccgggagggggccgcggcccggcggtggcgcccgcccgcccgctcgccccgcgcccccggcccgccgtattcccggggaaagtttgtggggagttgctgcggggggtgaagcgcctgcctctccaggaggagccgccgccactgccgccggcgcggcggagctggggctggtggcgctgtggtgccgccggctcgggggagggtcagagcggccaccggcggcggcggcggcggcgcggcccggctccggccaggcgggcgggtggccgggcaggcgcccgcgctcgctacccccggccggccccggccgccgcccccggctgtcaccggcccgggccgcgccgccgctccggcaccccgcgtgtggctcccggcgcggacccccgggtttgtttacgtcccggggagcgccccggggccacccgcgcacctcgcggccgccgcgctcttttgtgtgcctgtgtcggtgacgcggacctgttcctccgtggcggacccccgcgggggctctttggggaaacttggcgaggggcggcgggggtgccccgcgcgcagtgtcgctgggtcccggtgtcccggaccgccgggtgcgggcgcgggaggaggaggctgcaactttcccctaggcaggccccaagctgttcccccgggtgcccgggcagtgtacgctgcctccccgccgccggtccgagccgcgatcgccgcgcgcctgggggctccggcggcccccggtgacctgcggcgccgggtcccttccttgcgtcccctcggggcttctgccctctctgcagggcccgccatggagcgcgcggcgggtgcgctcggagatgccttctcgggccgggttctcgaaagcagagccccgggggcccgttgggaccgtggcatgccgggcggtggtccgcgcgcggagtccccggcgccgcggggggaccgtgccggggctccccggcccgcgcccgagtcgccgccgtgcccaaggggcgagtgcctgcctgccaccccccgcccggaggagcggcgcacccttagggtccgccccgcacgtgccagctcggcgcccgcggcgccgggacagccccgggactctgccaggtggatgttgtgcgtagccggagccaggttgaaggtgagcggcgtgtgggccagaagtcccgaggttgcaggcgcggagggaaccggggatgtcggggggtgcccggg

SEQ ID NO: 11615 - DNA, 6000 bp, Homo sapiens
atttgaatcttaaatttgtggactaaaatgtgttccctcaaccttagcaactattgtgctttaggcagtattctcagagcttcaaatacatcacctcactaaagtttacaaactcctattgggtagatatcagtagtatttttcattttgtaaataaagtgaagttaatttaaataaatagtaggaaaagaaaactcttagccatcttgatcagaaagatttttaaaacacaaaatcgctgtttgcttgctttttttttgaagaaaataagtgggaaaaaattatttaaaatactcaaagtggaaaagcccaatccacagaagcttcaagttagaacaaggtgaggaaggggtcaggtgatgtggcaagtcttcatccagaaagccatttccttccacatatgaaatgggcaactgtaggaaggaggcctcaatgggattcagcagatgcaatgaatagcagaaggcctatggggtggtgatgctgataaacagggtaaatactgagctgaactcagagatcattaaaagatgacatgtttatgcacttacacacagatggttaaaatgttggcatgtttatacacttgcatgtaaatagtcaccgctctgaaatgtacgttgcccttcccctgaggacccttaacttcctaatgattcagcaactaaccagcagtactctaatgcacagctccagtgccacggctgaagtttgaaatgattggttggtggctctgccatactgattataatatcatacctggtgataactcctattataacccaagctggaattccttctctgaacgcattgccagaggcacatttgggaagtctcggactgctgagtgttgggaaatgttggaaagatgcctgcttcttaacactattgatatcattgagagtggtcaaacctttagattccaaatcttatagtggtagttaaaaaaaagtagccaagaatgtgaaaagaacccatggtggtagggatgggaagaggaagttgtaccagagcaaagcgacatagagaaggagatgagagaacatgaaaagcaacgaatttcacaattttgccataagctgaccctgactagcctacttaagaacctcatgtctcagaagttgctaacgggttctctagtgatttatcaactgtaaaatgtttcattatccaacaatctccttaggaaaaggtatttttaatgtatttaagctctagtatcctcatcgctcagatggttggtttggttcgcctgagtggcttttagatctgtatttctagtgccctctaatccatgggatgacctttaatgctgcttccaaaaaagaaaaatattagagggcaaatgaattgccaaatactcattttttaagtaaatgatttggagaaagttattaactcgcctccaagcccaaagttacctgtgtgagaatcaaacaaaaacaattttgcttatatcatctattcatttccaattttgtacctatgctaacaatgttcttcttctccttttatttctcataaatcgagagcagtttccctaagtcagctattataaccagactaagatgtgtttctctttggtgccagcttcttgttgaggcaggttaatgaagagattgtggtttttcctctcattaggaatgcattttggcattgacaacgcttcactgatcattatgattccatgtgttgctgttgattagacttttctacatggactttcccagcgagattgctttccctcggttgagtactagttaagcgttcacttaaaggcctccctggaaagtccttttcttgctggaatgcaggacaagctccctctgtgttcctgttgacttttttcacagttaacattactcatcacagctgaagactgaataacaatagatgggaagtggtttccacatttttccatagaacgtaaccccagttgacttgtatgaaggaaaaattaaatgaatttatggcagtcattagaggtgggctaggtactatagaacatattgaacctgacagtccttttctagtgtattgtgtttgttaatatttgttaatataatttgttcaaagaatttagaaatgcaatctgacagaaatgaaattaagaaaacgcaactttttggccagttgtagtggctcacgcctgtaatcccaacacattaggagactagggcaagaggattgcttgaggccaggagtttgagaccagacagggtaacagagtgagacccccgtctctacaaacactttttaaaaatattagcagggtgtggtggtgcacacctatagtttcagcattctatcaggaaactgaagtggatcacttgggcccaagaggtccaggctgcagtgacctatgaatgcaccactgcattccagcttgggtgacagaggacaccctgtcagaaagaaaagaaaaaaagaaaaggaaggaaggaaggaaagaaggaaggaaggaaggaaggaaggaaggaaggaaggaaggaaggaaggaaggaaggaaggaaggaaagaaagaaagaaagaaagaaagaaagaaagaaagaaagaaagaaagaaaagaaaggaaggaaggaaggaaggaaggaaggaaggaagaccctaattatttgtttactcataaataagcttattttaaagcattccaaattttttaacttttattttaggttcaagagtacatgtgcaggtttgttaaattttgtgtcacagggattcgttgtacagattatttcatcacccagctacaaagcctactccccaatagttatttttctgctcctctccctccccgacgctccacccctcaagtgggccccagtgcctgttttttccctatttgtttccatgagttctcatcatttagctcccactaatgtggtatttgggaaaatccaacttttgaaagatctttagtctgctaatcatgaatggccaacataattacaggcatgccaacatttgtaacattgtgacactttccctgccattcttagttaaaactgatcttttgttccaaaaatttttgctaccaacaatagcctgtcctttatagttcttttatacttttgtgtcttctctctaactaaataatcaactctttcagcattccatccatttccctttctcctccctcttactcccaacccacattcccctctccattttaattttaacctgtgccccttcaagtgtactccagctttttttttaaaataatttcaagtgatactttgacttttgactgcatatggaagcataagtaacatgtcctttcatttttggataatgagtttcctgattaattacagctcaagagtaaaatgactgattactatttaattcattttgtgcttctttacaataaagtaaagacagaagccccagattcaggaacagacaaaatactttaatcgctatcacattttttttaagtctagtcaattagaaaagtcaaatctttcctcacagccaagcacattaaaaaaaaatcttctctggtaataaacttgaagctttaaataattctacaattataaacattttgtgtattttgcaaatatggcataacctgttggcataaaattccattgttccagaaaatatcggtaataaaattatagaaaagttaaagatcttcatttcttatttcgaagcgtttgggagacatttcagaaacggatgggaaatgttaaattctgcatgcctgcttaagtttccatccacaccgactagatgtaaacgagtgtcaccaaaagtacaccacaggcacccacacagattccttccataagggatccacaaagtttagatgtgaaatgtacctaaaggttcctagccgtctttcatccctccctctgtgaaacagggagacacatgtgttttaaggcagagatggaacttgggcgatgggcggggggtgggggaggtgggaagggacggcttaggacagggcaggattgtggattgtttctgccgccttggttgcccatactgggcatctctgcaggcgcgtcggctccctccacccctgctgagatgatgcactgcgaaaacattcgctctccccgggacgcctctcggtggttcagagcagggaaaatgttgcctcaggtttaaaataatctgcccaagcaccccagcgcgggagaaacgttctcactcgctctctgctcgctgcgggcgctccccgccctctgctgccagaaccttggggatgtgcctagacccggcgcagcacacgtccgggccaaccgcgagcagaacaaacctttggcgggcggccaggaggctccctcccagccaccgcccccctccagcgcctttttttccccccatacaatacaagatcttccttcctcagttcccttaaagcacagcccagggaaacctcctcacagttttcatccagccacgggccagcatgtctgggggcaaatacgtagactcggaggtaggcatccgtgggggggcgccggctcgggcgtgcggggagtgtccgcttctgctatctgcctctccaaatatcccgactgctgccctggccccagccctctctccacttcggagcactcctctggcgttggcaccgctgaggaatgggcctgggcggggaggtgaagagaagccaggaatgttttatgttttcctaatggagagggggcctagggagcccctgagctaggaggacacggaaaaggggattggggtcctgagattgggtctgttgggcccaggacgcgttttctggatgggtctaggatgctcccttgtcgcgggacccccgcggtccggccctgcctgctgggggttcgaagaggtggagtgcagggtggaggtgttatttacccgagtcctggggacagtccccgggactctccgccaggcgcccagaccggcaggtcccgcaggcggcgcgcggtgtgtttgcactttccaaagttcttgaaccatctcaagaactccttctgcatcttggcgtctggcaggggtgttccgagagaggtagacctcccctccccaaactgccaccatcacttccaacgccctccacgcgctggagctctgcccgggtgtggaaacctcgtcttccaacacgtagctgcccttcagccacccgcccgcagcctgggagtgccctgagggtgggtcgggggagctgcgcaggtgagactgagttctaggacatttagggggtctggtgcctggctccgccaaaaatggggactttcgggattgtgatcatcacggcggattgagcagggagagccgtggagggacaagagagggccgaggcagggtggggggcgcgggcaggtgcgagggggatgcggccaagaagcagcgataaagggaacattccacgggtcgggcggctgctgttggatcttagataaagctggaagggattaccggggcaggggtaatagggaccggggacgggaacgcgaaacaggtgaagcgctcagggcgagagcgactcggcttagggagtccgggagaagcctgcggctgccccctcgccgccgaggtcctgcgggtcctgcgggtcctgcgtgctgagccggggcgtgcgcgggcgggggccttcggaccgcgcggcggggcctgccctgacccctggcggcgggcgggggaggcaggcgcgccctgcagagtacagaggggtgtggtgtcctctgcgagatcctcttaaaaagctggctacgcgcaggcggtttctgtgcacggagccgtagctgtcggagcggttagttcgatttcgagctcgaggtttcccccgccgccaggctgacttctcatcgcttgtttttctttttgcatttttcctcccaccgccgttgccgccctccccgtcctggccgtccgccctccgccctctgcagggacatctctacaccgttcccatccgggaacagggcaacatctacaagcccaacaacaaggccatggcagacgagctgagcgagaagcaagtgtacgacgcgcacacca

SEQ ID NO: 11616 - DNA, 6000 bp, Homo sapiens; identical to SEQ ID NO: 3467

SEQ ID NO: 11617 - DNA, 6000 bp, Homo sapiens
ttgcataatacatttttagtacactgcttttaaagcaagatcagagtatgctattttagatgattttaattttcatacttttgttctaaaataagttgtaaactaattctatttaattataaaatgaattattaaatctgagagtaatgtgacataagcacttctctctgacacacccctgtagaaaggaattagttaatttccacattcatatcagcttggggagctttatttattattattatttaattaattaattaattaattttgagacggagtctcgctctgtcgcccaggctggagtgcagtggtgcaatctcggcttactacaagctccgcctcccaggttcacgccattctcctgcctcagcctcccgagtagctgagactacaggcgcccaccaccacgccaggctaattttgtgtatttttagtaaagacggggtttcaccatgttagccaggatggtcttgatctcctgacctcgtgatccacccgcctcggcctcccaaaatgttgggattacaggcgtgagccactgcaccaggccagggaggtatttatgtatttatttatttatttagttttattactaagttttgagagttaataatgaagttaaaaaaaattttaatttttttgtctttctttatcttaatgttgcctaaagagggcagtgtaaaccatcaaaatacattttactttatgcctgctgttacacacttttttaagttaaataatgggcattaatatgtacagtatgtataggtattgtatcacaagatgtaaaacactaaacatttttctgtagaaatgaatttcatttgtgaatgtattttatgcaaattagcttactgaccagatgtttcttagagcagattatgtgcagtgtttataatacagatgtctgctttaaatgccaatggaaagaagagggaagttcaatcctattaagtatagaaaagtaatactttcattgaattggtcataagaattttataatttgcttttattaaatgtgaacgtatcttaaagtttaataatgaaactatttaaatcttaacatcaagttaaatgataggctaatgtaacaaaatgcactcattgtataaaagtgaatatttgtaatccagaacatagacatcagtctcattagaatatttttcctctttgcgatttcatctttttaattagttgtatattttttcttcagtgcagcagcaattaaaagtttgtacattttgatagaaaactttttctgtattctgaattgatacctatttaacattgcattttaaacacttaaatgctgatatgtgagaatgaataatgaatccataggtcactatagtcattagtgctgtcatatatatgaactgttatctgttctcaattatagtagctgctttttagttttcattagatttatgttaaaagaaaatatcaggaatccatctatctgtcttaccaggtagtgacattgatacgttcttgctagactatgctattatagaaggatatatataatgagatgctaaacctaaaattattgactaaagcttagcaaatttctcttcagtgcactaattagttttatttaattatcaagagtgtgttctcccactaattaggataaaacaatatgaatatgacatccaacattatcaagtaacataattagtgaagtaaataagatcaaacaagattaggggaaaattctggcctatttttaaaactgtatctataaaatcatatgtaatctgtcttatccaataattgaatatatccctttatcaaatgcatgcagactagctctgaaacttaagattttatggtgtatttctagaatgcagaacaatttacaggatgtgttctttaaaatactatagataaggcaaatattagtatccacaatttataaatgagtacactgacacccaaagatactagattatttgatccaggtcacatgagtaaatacaaaactgagcctggaaatgtctatctcttaaagattatgctttcatgttaggggccaattaaataaatgtaatgcttaaattgtaataccaaaattatactatcttattctcaaaacatcttttaaaatgttaatcttagttttttatttcttaattacctattaattaaatattttaatttaggtaactcatatatactactgagccatctcaaggagatattttagtctcaaataaataaaaataaaatcagtaaaattaattcctcattatagtacacaaagcaaccaactgattgtctgtgctttcataagatatcctattttgtgtaaaagagctaggtttcatgccatagtttgatcattctgactccttaattaaaggatttaagatcaaatatcccagagcacttttgagaaaagtttatacacaagactatatgtgtgtgcatgtgtgtatacagtgtctgtatataaatatgtgtatatggtatatttacatatataatgcattatatatcttacatatatgacatatatgataggacatatctcatatatatgtatgctatacatatataaatgaaatatgtaattatatatatatatacccatatacatgttgctttgaaaatttgtggctattgaagacctgcataattatataagcttacttcgtacatatattaatctacatcactggttctcaaactttaacatagatcaaaatcaactggaggactcgtcaaaacacaaattgctgacccttacacacagagtttctggttcagaagattttgtatggtttgagcgaagcctaaaatttgcatttctaagttatgatgatgttgatgctgctattctggggatcaaacgtcaagaaaatctgatatagataataatattaaccaccatttgtactaaatgaggtaccaaggactttgctaagtgaatgttttcatttattactgacacacttactttccatctaggtaacaatagttacaatagaaaaaactgtgaagacaaccatgtataaaataagatgtttttctaaattttataaggaaatgctcattgcattcaccatcaggttatttaggtgactagatgattctaaatgagtctccacaaaataatggccagagcttaggattaacattttaaaaaatggagtcttgggcttttctcacaagaatattagctacaactcagggctgagttggcttagaacattttcactttttatacagttttatgatttttaatcacacctttgaattccatttttcctagtaaatgcatttatagttataagaccaaacatcttgggaagtgtgtgtgccatttatattcctgtgatacattacatttatttatttatttatttatttatttatttatttattttgagatagagtctcactctgttgcccaggctgtagtgcagtggcgtgatctcagctcactgcaacctctacttcccgggttcaggccattctcctgactcagcttcccaagtagctgggattacaagtgtgcaccaccacgcctggctaatttttgtattttttattttttttagtagagatggggtttcaccatgttggccaggctggtcttgaactcctgacctcaagtgatccgcctgcctcagcctctcaaagtgctgggattacaggcatgagccaccacgcccagcctgatacattccctttattaatggattaaattcctgtccctttctgctatcacccttgatcaacagaagaaagctattattttaaatcttaagttctctccaattagatatattttaatgctatatatgtgcacttatattagtctcaattttcttaaatacatatttaagttaagtgaagtttctctgtctcctattacttaagcatcagaagtgccaagtgcataagaaggcatgtagattttgatgggaaactcaaatgtggttctttcagaatgtctgcaggtagatataagggctttttgtagcactgtcagcatgctgtaatgttagaaaccgttctcatgctcagtcatcttggtttcccactgaacacacctcaaagcaaagaggaaggattgttattggccacaaacactcactgttctgaaactctttttttaacaacttggaaggtaatctctagttaaagtgattttcaaagtgctagtacagtaatgtacctgactggcccccaaaataatcatgtgtcatcttttaaaattaactcaaggaccaaattcggatttttaattatttacacttgcatatttcagaagaatttcttagatctacatattcctccaattcacctgaaattgcatttttttttttttgtagaataaaacaatgggtaagaagaacattcaaaataacatttaaaaccaatctatatttaaaattgaaatcgattactggattgaaaggttatcctaatataagaagagttatcccaagatttttttcttcatgaaattattaattgcttctaactatttacctaatgcagggttaaaaataatcctatttaaatttattttagaaaattaatatatatggtgattcagtaagtagcgctgtttttcctgaccattctattttaaatcagtagtgatttttaaattacactactttgatttttcttatttagcaaggcttttcaaggcaatattatgcttacctgttgccaaggcacccctatctgggtgccaatctctgctgggatgttgtagttcttcttgtctaatagcctgccttacattttaaactttgttttaattaaattggcttataattgtagacattctttgcatcaaagagtcaaaattttaaaggtaagtaacagcaatgaaggttgcaattaatcagttgaaaaatgctgtgacttttccttcaccttaaatatcaattctctcaattttctctgactacagaggccagtaatagtagccatgagtctcgtattggtctagctgaggggttggaatccgagaagaaggcagttataccccttgtgatcgtgtcagccctgacttttatctgtctagtggttcttgtgggtattctcatctactggaggtaagttgagtatttgttttggaaaatttaattcataaaactcagattttgcccatatttcatctgaaaggtcttcaaagcatattcaaaatgtattttacctgagagctgccattaatttattcaaggtaaatttgtgaatccaaaggcacaataatgaaggagttaattgttcttcatacatcaattaaagataaaatggagaaacttttacccgttactatttaacacagtattttgacagttgtactttcatgttaatctaattaatagatatcatcatagcatttaacataagtctaagcttctcgttagttgttataattccaaaaattaagaaaacattttttatataataacaagtattgtttttcaatgacagaagagtttgtacaagatgtgtattaactgcacatactgataaaaatgataacctgtgcataaaagtaaaatcaagcaattaaactataaatataattagagactacagctaatgactatcttaagatgcacaggcatttaagatacatataatttgctttggggatgaaatatagcttcgctgtcaataatctattaagtccctaaagacaagaataattgtacccatcataaaatttccatcctgtggaaagcagaacacacagcaaattagtgtatttatgaggaacataggtcagtataactgtgtctgttagaaaacaaaggctttatgatgatataaggaatcatatgtgtaaaccaagaaagggcatagcatagtacttttataaagtatagcatacttttattttaaaaaagaattttgttcagaagatacataatttttttgtttagcaacatcattctgtaactttgtatcagcactctttatgtgttctctcaaaatatattctcgtgtttttttctgaaatattta

SEQ ID NO: 11618 - DNA, 6000 bp, Homo sapiens
tgacctcaagtgatcctcctgcctcagcctcccaaagtgctgggattacaggtgtgagccaccaccatgcctggccttattgggtatcatttatagctgatttccctcaaagttccttcttttcctgtgccttttcctagttgatgagtctcagggacactcctaccttgtcatcaactacccagatgctcagtcacctgttgctttagcattgagttcctgtttctcttgtctcaggtgagaatcatagagcactcctattttcctctgttcttggtgaggaggcaaacacaattacctggtcttctcattcataagtgttaatatgcttaggttatcatgggatggtgtaggggggcagagagaagtacaaatattaatacatctttataatgtcattaaaaagctgaagttgcagttaattttctttttggaggacatgtgccatacatttatgatatgcgttatatgctagatgtattatttaataatagcaataaaagcaatattggttattaatgttgctcgtaacttgttgacgtaacaaacatgttaatagctaaagtaagttggtttgagtttggtactgagaagtaatcttgttaattattgcttgtttgatttttggtaactgttcttcctccccttttgtgcaatgaaagtacaatcagcctgtttggtcagactaatgtataactaccaaaaactgcaaaaatatctggattctatattaataatgtgttttgccactatttgttttgaatgtcacttatttaaatgttatgtacttattccattaattcaatttaaaagactgaaaactttccaggtaagtcacactttataagtcagaaaaatatttcaactgggttgagggaagaaagcttgacgtctgagtttgaatggagtgtatgtttagttgactccttcacaaagttgcaaagaggtagtcaaaataatgcaatgtacactaaggcttgagtcagtctgacatgctgatagaatcaagatccatgaagactttcttgagtaggttccttctcagaagcacatatgtagtgatactcaccatcactgaggcacagcaccatcatcagatctgactccactgcagtataaatttgatgagtgcttcatttccaccagaacaattccttcatagctcgcatattttggttactttttgtctcttaacttcttgggaaagttttaatgttagcagttctgtgaatcattaaatggtcctgggcgtggcccttcttttttgataatttttactgcctttcatacgggagtggatggtcgcaagggacaatattattaataataataacaggaacaacttacatttatggaataccttctttttgccaggtataaagacaacaaattactctctaagttctggggctggggcccatgaattgagctgacaaaagacagattaagaaaataaaagcatatacattatatttaatatttttactgcacattgaagcctttataagaaaaatgaaaagccaaagaagcaactcaggccaagggcttatatacgttttaaacaaagaaagctaaattgtggggaaatgataaaacaaaggaaaagagtttaagcttctagaggcagtaatttgtgggaaagtgactagaaaatacacagggaaatctaatggaagataaggaagattttagtagttttgtttgtaccgatccatttcagtattgacccccagtctccagtgataagaatgttctcttcctaaaacagggagagcctctttcacatggaaaattttatgtcatacctgaggcagaaagaggaaagtcagagagtccttcctgcctctgctgttgctcaatcaccttcagcctaaaataatcaacatgctgggctgggcacagtggctcacgcctgtaatcccagcactttgggaggcctaggcgggtggatcacctgaggtcaggagttcaagacaagcctggccaacatggcgaaaccccgtctctactaagaatacaaaatttagctgggtccagtggtgcctgcctgtaatcccagctacctgggagcttgaggcaggagaatcgcttgaatccaggacgtggaggttgtggtgagccaagattgcaccactgcactccagcctgcgcaataaagtaagactctgtctcaaaaaataaagtaaaataataaaaataatcaacatgccaaagtagcatattttggggtagcatattttgaattccttcatttcccccatctgaaactttaccataagtttctcataataaaatctgaattagtggctgtggagagaagaatcagtttagcagctgagtgatagatcttcaaaagaagaatatgtagatcagaatgagaataaataagcagaaaagtgcaaatctaagcacatttctccatatcccattaaaccaatctcccaactctgggaataggtcagtctaatcaaatggttgagcctcattatcttatggagaatattaatcttttttgttcaaaggtataaatcagataacgtttgtcccaactgattcacaaagaggcagcattttcatcaaccacacaagatagaatgaccagtgttgttcatgaacaaaaagtggaacctgtaattcccaagatctagtgtgttccacaacttttgttattggtcatattgatgtctccacaccttcattttcacgtgcctctgtcagtttgtagaagcagaaaatgttgtgaaacatttgacataggagaactgcaatctggctttggcagctaaaaggcttgattttgtcacctgaccaagttaatccagatttttgatctatttatatacaatttctggtgctaaggagcctaatcaggagagcagccgagctatcccacccaggttgtgcaagagtggcctatgaaccagccaacacatttggtgatttggcaaaagtttgtgctataaaaggtagttctagaatcacttattgtcaccggatagaaagtcctgactgtgagttttccaggttcttggagtgttgaacaaagaattgaacaaaacgcacaaacaaagcaacaaaagaacgaagcaacaaaagcacagatttattgaagtgaaagtagcctccacagagtaggagcaagcttgagcaagtggctcaagagcctgactgcaatgttcttcagggttttaaattaaactaaaagaatttggttaacacccctaggtaccctttagagacctccaattggttacaccctacgcaaatgaaggattgacctgtgaccaatcagacactgaagtggaggcttggtttgagaccaatcagaggctgaagtggaggcttggcctgtgaccaatcagaagctgaagtggaggttggcctgcaaccaatcagaggctgaagtggaggcttgggccacaaccagtcagaggcatttctcgttcgtgaggtaggggaggagggttttgtagaggtcaggaactctggtcccttttcacctgggcatggagaggtggggttttccttttggtccaattccaagaagtcagccaatttgtcctcaggctccctgtctcccaaccctattctcctgcctcattatgacctccatgatgggtttgaggatgtggtgtatggagtcaaactacagggtttgattgcaatattgtcttggattgttacttgggaagagatcagtaccatatttgtttttaattggaaaagtctttttcttccaatgtctttatttgagcaagggacaattcttgagcttacatagaggtttttccttgcccagtgaactcaccagaaggaaaagtagagtgacattgtttttctgaccatggataccatactctttcattcatttatcttccatagttggtccacctggtaccccatggacaggaataaaaactaattcaggtttgttcatgctatcagatgttgacataagcaataattatattgtttagctgacatgaccaaggtttgggaaactggtgcaagggtggtgtcaggtttgtgtttaacctatgaagaaaagagtgaggttaatatgaaagaggcagcatttgaaagaaagcccacagtggaggatcagagagagaataggatagattgagacaagtaatctccagtcagcttctcaataaatgggaggttttgttgaaaaagatcccccctctactcccctccccacaccagggaggaaagaaacttaaagggggaaaatagatgaaagcaaagttttttatctgtgatcttgaggaaagctgtttgctttgtggtgtcatcttgcttctagagccttggctctgaaatccttactatgaggtcacctgtagggatggtcttccagttgtcctgagagtgatgactggctccaccttgatgtggctcacataaattcagaaagtatgatagcagtgtaggtggttagcagcacctcataaggtccttcctagcaaggtaacagtacaagctttttctaaaaatcttgatgtatacctgatctcctggttgaaagagttggcttgatggattttttcctataagttctttttatgtctagatttttatgttccacttgacctgatgattgaggatggtatgaagtaagaagttttaatgagtaatccagagattttgtgagtgagtggtttatttctactaaaaaatgagttccttggtctgattcaatctataaagaaatgccaaaatgaggaataacctcagtcgttaatttctttaccactatcatggtgttgcatgaacctggcagatggcggttttagtgagccgagatcatgccactacactccatcctgggtgacagagtgagactctgtcacaaaaaaaaaaaaaaaggcattacaatggagggattggttaataagacctgtgtataggtggtctgctactgtgttgcgaggtgctgtgtcttattaagtcataagagaatggacacagaatgggagaatggggaacgtggaggtaaaggagggaacctaatgtaagaatactgaatttgccaattaaggcaccagctgtgactacttcatacaggaatggggacatgcctgatgccatagggtctaattgacttgagaatgtgaaaggaaaataaaaactcagaaccccaattcatcatgccaaaaggaaaaaaaaattaagctgaaatgtgagttgtgcaagaaactgccttttctcttgttcctaagcagatagctagagataaaatgttaactccacaggtagttactctgtgttcaccttatcttatgtaaagtgcagatttactgagcactggatgaatacataattgactattcccctacctacttcttttcccttgcaacatgtggattatcataccctccttctttccccgccggcctgcttttcccctttaaataccgaggccctcaaattcatttttagaaaaaggcacggaccacagactgtttctgtgactccatgtttatttgttctgggcttatccttaactttggcaaaataaacttctaaattgattgagacctgtctctgatactttttggtttaccagaaatatagtataggacatacctgttgatgaaaagagtcaaactctgtaaaatatttgaagagaattattctgagccaaatatgagtgattatggccccgtgacacagcccttaggaggtcctgagaacatgtgtccaaggtggtcggggtacagtttggttttatgtgttttaggaaggcatgagacattagtcaaatacgtttaagaaatacattggtttggtttagaaaggcgggacaactcagagtgggggcttctagcttatagataagtttaaagattttctggctgacaattggttgaggttgtctgaagacctgggatcgatagaaaggaatgttcaggttaaagataaaggattatggagaccaagttttattgtgcagaggaagctcttagataggagattttagagagaccaggttgt

SEQ ID NO: 11619 - DNA, 6000 bp, Homo sapiens
atgacaatttagtgttacctctaaccctgcgccccataccttcccactcttaagatagctgatacacacacatacacatacacataattttctgttcactcttaagaaaggtgataattctatactcacttgtcaaattttaacattaacagcatttgtttaatacttaatactaatagatcatagttcagagacattatctcactttcatccttactacaactctgaaagaaaaagagggttattattattcctgtttgagaaaaaagaaaattgaggttcacgaaatttaaatgacatgctcagagtctcacagctaataattaagagcaaagattagcacccacaccttttcaaggaagatgttaaactgtggttctgtcttccctgccatgtatgggaaagcaagtagtgaagaaactgagggcagaaacattgtcttataagtttccatagtacttccaggccttagtcataaactaggcagtaaaataccaaatgggctattgctatacacttgccatcttaagatgctgagttcttgaaggtcatcttcattgtgtagtctcatgagattatgttatttcatcaacttttattgctttaacaccaccctatgatgccgcaacacatctaaaaacttttacagaaatttaaagagtagaattggcatgcagtttgcaggaggaaactgctttcttcagcggaagaggaacgattccacatggcctgtgcatcatgctgagagaaagaaatgacagccttccactgcttgcgattgcttctaagaaaaatgttttccacttttacatacaatattagtataatcaggcaaatattataactctaaaaattcagagactgtaatagcaactaagtttgttaacattacataaatttattgtgttctacctgagtaagaattccagtttaccggaaaccaaatgtcttaaactagcaacctctgagtgtagttcatcactgtcctgctgcctaacaattccacacgttactggatagagtataattcttcaaagggcaagggaaacagagcgagtgtgtataactgcaaggtaaggatgttggttttagttgtagattatttactcattagctttgtgattgtgatcaagaataagttgctttaaccacttgtgcaacctcagttttatcacgttaagggaatgatagaaattgttccataaattttatgtagttgttaatgttaagtgagataatacatatttgaggcatgatattcagcttctctaataccaaatctgtattaggaatctccagagagacagaaccaataggatatatgtgtacgtgtgtgtgtgtgtgtgtgtgtatatatatatatatatatggatttattaggaaaattggctcaagtgtttatggtttatggtggctgagaagtcccatctgcaagcctgagaccccaggatgcatggctcaggctaagtccaaaggcctcagaactagggaagtggatggtgtaactcttagaatgaggccgaaagcttcagcaccctagggctcctggtgtaagtcctggagttcaaagcccggtctgcctggaattctgatgtccaagaccgcagaagaaaagtctatcacagtttccaagacagatcaagtcaccttctgaaattgttctcactgggctctggccaattggatgatgcactccaacactgagggcaaaattccccatctagtccattcacactcaaacacgaattgcctctggaaacaccctcacagacacatccgaattaatattttatcaggtttctaggtattccttaattctgccaagttgacacctaaaattaagttcacaagtccaccacttgtcagcctagtgttcatatacatctcctcaaactatatgttatttccaaataaaagcagtaacaaggtgatggttccacctaacatgatgcaggccaatgtgatgagaccatcctgcatgcaagtgaaatgccaaccccttttccagaattcagctttcaggatttcaacattcagaattttaatctttcaggattgtaattttggggattttggaccttagcaatttagatcctcatcaaactagttgattttgaatccctacttttcaacatcagtgttattcattattctccagaggaaattatcaaaaatcttttaaaaactagaatataagtcctatgctttatcaaaattatgaataattaaaatgcagagtcaatacattcattttttgtatttttcaaactaagtgaattaatattaacatttcatgaaacagatacacatatagctcaactccaaactgtccatgaatttatctaataaacagagaaaatgctgcttataagcaagtcacaattctgatcttacagttagctgagctattaagaaattgttggaataagaactgggataataaaatgtttttgttcaaataaattaccatgaatatacaattgtatgattaattgcaaaaaaggattgtcaaagggaaatccgattaaaataattcaactgatctaagttgcattccattaacatcatttccctgattaaactcttcaatatttcccaatgagctgcaggcatacatatgtaatattacatataatcacctttttgcttaaataaaattatattctgtaataatctatgtctcactatgattatgtcatcttctaactatataactttccacagcaatgccaggacacaaatatctacctgttttactagccgcataatattccattgtaagagtattccataatatatttaaccaatcccttgtcaatgaatagttttaatatatctcgggatttttttgctataacaacatttctgagtgaacatacttgagtagacctctttgtacatttttatgactctatctgaaagacacattcctaaatgtggcattcctgagacaagtgtttcttaatacatttttatagatacagatttaaagttctatagatatagatacattatccttcgtggtgattatcccgctagtcccaccaaaagtattcaacactaccattaatactacggatggaaaattgtttttcactgtctggatttgcatctttaaactgtggggttgagtatcatttcatatgtttaaaagtcattaatgtctaatttttctttgattgaactactacatcaatgttttagattattcatctttcatctttccttttttgccaaaactctattatattaaagacattggataattttctatcgtgcaatttacaaatattgtttctcaattgttattttgacttttttgctctatgcaaaaattttaaaggaatatgcaacagttacatatattttcctttctggcttctgaattttgggtcttattatattaaggccaaatcccattatttgggttttgtcaaataaaatactggaaaacaattgactttccaaagcagaaaaaattatttttttaaatgttatttgtgttatgaagttgcttaccaaattattttctacatggatttcaagggcaaaccactgcccatttctttgtaattaatagcatccaaactaatcaatattcccaaattttaatttctcagcaatgcttattttctgacagctcacagcaattttttcaaaaagaggtggaacttgggctagtttctgcttcagatgctgtttctccagaaatgtgtcatatctctttgatgaattcttaactttcttttctaaatccccaatatacattttccattatgaaagatcactcaattgtcatcagacttcaatgatattatctcaaaaatgatgattatgtgtttacttacacacaacaggatagggaaacaagaagtgcattcaggtttaataattgcttcttcatcaacccatgtctgccaccaggcagagaccttgttttaatcatcattgaacgtccagaacacctaattaagagaagctgctcaatagatatgtgagcacaaagtgaaagaatgaatgactgaacaaactgggatttcatctttctgagccttagttccttctacaaaacaaaaagtttggcagaaagaatagtaagataatagatttgatagtggtttgaaaaacaaaacattcagaaaagtggtattttctcccataattttgtcttcttattgatgtattaatttgtatgtctattccagaaatctctttatgctttggaaagtcttatgcataattttggctttttcagttcaatatgcatttaataagcaaatattcttgtgtaagatatggaatattggaaatgctgattatgtaatactgattacaagtatgaaataaaatagaggcaagaggaaaataattctcatctagggagagtatactggctattaagtattattatattatctttattttcaccatcctcagtgttattgtgaaaaaggcttagagcttccatgaggaaaggcactgttaactataaaagtcacacattcaatattatacattctatgctttcttctataattgtgtcctctcactaatttactaatttttatgtctattccaggaatcccttgatgttttagaaagtgttgtttgtaattttggtttatttaattcaatttatcagtattatgctaagtttcatggattgatgagatatataggtagataggtaggtagatagatactcatatctggataaggacatatttaaaacattactggacttcaagttcattgccagcctgaaaggtccttttgaatcctccatttgaaggtcttgctttttacatggggaattgaggcaggtagacacagtaatcatgcaggggaagggagatttgggagaaaataatgtggtttaaaaggagaaacaacattatgtattttaaaccaatgtttatattatgtttgttaattttattctatttccttgcaggtttaaatgtttatttgctacttggctactgattagagaacgcaaaatgaataactcaacaaactcctctaacaatagcctggctcttacaagtccttataagacatttgaagtggtgtttattgtcctggtggctggatccctcagtttggtgaccattatcgggaacatcctagtcatggtttccattaaagtcaaccgccacctccagaccgtcaacaattactttttattcagcttggcctgtgctgaccttatcataggtgttttctccatgaacttgtacaccctctacactgtgattggttactggcctttgggacctgtggtgtgtgacctttggctagccctggactatgtggtcagcaatgcctcagttatgaatctgctcatcatcagctttgacaggtacttctgtgtcacaaaacctctgacctacccagtcaagcggaccacaaaaatggcaggtatgatgattgcagctgcctgggtcctctctttcatcctctgggctccagccattctcttctggcagttcattgtaggggtgagaactgtggaggatggggagtgctacattcagtttttttccaatgctgctgtcacctttggtacggctattgcagccttctatttgccagtgatcatcatgactgtgctatattggcacatatcccgagccagcaagagcaggataaagaaggacaagaaggagcctgttgccaaccaagaccccgtttctccaagtctggtacaaggaaggatagtgaagccaaacaataacaacatgcccagcagtgacgatggcctggagcacaacaaaatccagaatggcaaagcccccagggatcctgtgactgaaaactgtgttcagggagaggagaaggagagctccaatgactccacctcagtcagtgctgttgcctctaatatgagagatgatgaaataacccaggatgaaaacacagtttccacttccctgggccattccaaagatgagaactctaagcaaacatgcatcagaattggcaccaagaccccaaaaa

SEQ ID NO: 11620 - DNA, 6000 bp, Homo sapiens
gaaggcagctgatgctccactagcggctgcctcggtgccagcaacctggctgtgctgctgttggtgccttgggtctcttttcctgtctgcccttctcagctcccttggttgctgactcctcgccatctgaccatctgcctcgctctgccccttccacccaccacacatttctggctgctgatgcttgcagtgcctttgggtgcccatctggcccagcccttgggatgaggggactcctgccttctcctgcttctctgacctctgctccctggatgccttatgtagattctggttccctggtcctggaatcctcactgctgcttctgatccggtgggataataatgaggttacatggtgagaaggccacccaggtattgtaattagtagccacaccaagccagctctattgggtgggtgattagaaaatttttttttctaatcttaacacttattatactaaaactatctacttaagtattttccccccagatggagagtttcttgagggcaagaactgagtttatttttctttatatccagagtgcctagaatatagaaattaactggtaaatgttggctgaactgaggttgggaatgggagggaaagtgtataggggatgatgctctgatgtcagcttcctgggctgaccctgaagaaagaaggaaacgtgggcatttgtggttgtcagtcccacccctctcttgggggagtggcccttggacagggcaggaggctgctcaaccttggccttgactgcaaaggtctctgggtcttgctgtgtgcttcacccagacctcatcctgatgcgcgcccaacccatccatggttcatcatccaccgtgtctgcagttccctcagggagagattcttttgtactggcatgcaggccagtgggatgagaggggcagtaaatctgggagcaagtgggaagctgcaggccgagtgcacacagtactcagcgcaagggaggtgctccaatatcaggaaaaagatacaacggctctttcatttctctcctttcttttttcagattataaagtaatacatgttcacagggacaaaatacaaaagtataaaagccttctgtcctcctcaatctactccctaacattaactactgttaacaattcttttttatttgtttatttttttgacacacagtcgcattcctcgcccaggatggagtgcagtggcacgatctcgatctcggctcactgcaacctccacctcctggttcaagcaattctcgtagctgggattacaggcgcacaccaccaacccggcttatgtttgtattttttctagagacggggtttctccatgttggccatgcctagtcttgaactcccggcctcaagtgatcctcccacctcagcctcccaaggtggtgagattacaggcatgagccactgcgcctggctgtgctgttaacaattcttgacatcttctggaaatgtgctattttacaaaagcacgtatacatatagcttgcatatacaaaatgtgtgtatgtgttcacatgcagatagatatataaacagacagaatttgatggtgtcatgagacagaaagagaaaatggtagcccacaggtataaagtaggggtgttggggtgaaggcagacttgaaaggggctgttgatggaccaggtaggagggcctgaggagaagtgatggaatacaaggatggaagcaaggatggggcaggagagtcttaatatttgtgttgcaaaaaaattttgcagtttaggaggtgagaaatccaacatccagttagcctcagtttccttaactaaaaaatgggataatgatgtatattcctcacaggtttatagtgatgattagaaggggcgaatatatatataaacaaacatacatatatgtttgtttgttttttggacagagtctcgatctgtcacccaggctggtatgcagtggtgcgattttggctcactgcaacctccgcctcccaggttcaagtgattctcccatcttagcctcctgagtagctgagactacaggcacgtgccaccacgcccagctaatttttgtatttttagtagagatggggtttcactatatcttggccaggttggtcttgaactcctgacctcaggtgatccacccaccttggcctcccaaagtgctgggattacaggcgtgagccactgtgcctggccagggctaatatatttaaagtgcttagcattgcacctcaaacaatattctaagcattctctcagcgtgtgctgctattatagttgttgatgttattagggtgctgctattgttgctgttttcagaatgcttcacgtggtccctggcccgtgagtgaacctctatccatctgcagttggcatatggaaagaacctcctggtcacatttctctttccattttagaaatcattcttttgttgtgacactgtcttttcattttccttccctgactgctcttaacttcctactttatgctgtgcactcttgaagaaaactttctggtacctgatggttataaatccttggaggcgcgtgaagatgttttaggtagtaaagggcagtggccattttctcactttgtctccctggcctggtcttaagctgttgggcattctttagtcaggaacatcttcttatttgctgtacttcacacatactgcctaaggatatcaattagaattgcttacttaagaaaaatgcccagcaatcgttaaggccactcttgttcatttcctgcattttttttttttttttttttgagatggagtctcactctgttgcccaggctggagtgcagtggcgtgatcttggctcactgcaacttccgcctcctgggttcaagcgattcttctcctgcttcagcctccccagtagctgggactacacgctcccgccacctcaccaggctaatttttgtatttttagtagagactgggtttcaccacgttggtcaggcttgtctcaaacttccgacctcaagtgatctgcctgccttggcctccaaagtgctgggattacaggcgtgagccactgcgcccagcccattgtcttcattttaagagcactgactctgctgctcctcttgagacatcttgggcagtgattctgttcttctgggatactctgggtgtttctacttgtatttagaatggctggcttaaaagtctttgtttgaatattccgcattctgaatgctcttagttgtcagtaaaactatgcctgcctacgcactcttctatttctgatttaaaaataggttcagctgcctaacaattacacatactctattttgcacgcgcacattacttaaggagacatttagagggtagatagcttttattcctatgagttatcttgaaatcatcttcttaactatctttttttccccaaaggggccatattttgaaggatttgtgatgagacttttggtctgtgaagcccaagacacaatctccaacatgcacaggaaatccagtatcaaatttctaacatgtcttcagagacaggcccagggctggcttgagcgtgtcagagaggtgtgcactgcgtactacccatcatacatggccacacatgcctgtggctgtgagaaatactggtggtgacaaagacaatgagatgccagagaaaaagatcagtggggtttgcaaaagtgattaagatgtcgtcctaggtataattaaagacttaataaggttgaaggaaagagaggacattgcacataccgaggcccctgagagatctgcctggcaacccagaaagggacatatgggggaaaacgccttagtgtaaccaggtcagaattttcattctgggcagaactggaatttgaataataatactgagtcatatagcgcatacagctatgacatttcatttatttctctatataatgcaataaagtagatggattaaccgtgacgtttacagatggagcaggggagaatgaagaggcgtcagtttgggcatcaggctggatcttcacactctgacctcactctgctctatcctgcccagtgttgcttcacctgatatcaggggtgcaaggcaaccagatctgacaccagtttcagtttagatcctgcctttacctgggtgtgacccgggtccatctcttcagctcggcctctgctttctcttcataaacttttggggttagtcctcggatgatctctaaaacatggcccaggtgctccttgccagtagagtgtagccggatttggagggactggacactcagtgtgaacaagacgaaggcctcaggaggcagtaaaagctgacaagaggagagaaaatgaagcgcctacgggtgcatactggactagcgggcgaaaggccatgactccttagtttggagaaagaactggggccgagattggggaagtttcccagtgcaattaaaaaaaaaaaaaaaaagaactagaagaattacccaggtctggcttctttcgtgtagcctggggctgagtcgcaggctgagaaatccagtctggccagtagggggctccaccaagcgcagtctcagaatgcccaagagctccaccgtcgcccggggtctccaccaagcgcagtctcagaatgcccaagagccccaccgtcgcccggggtctccaagaggagtgggtcgtggtgggcgttgaagggccgtaaaagacgagcagcccgcgtccgcgtccgtcctcccgggtctccagtccgcaggcggccgccgcctcggccccgccctcccacctccattcccggccccgcggacccgaacggtccctctcgcaaccgatctgctggctggggcgctggggatgcgaattcctagaagccttaagaggctgcccagcgttggaagttcgtatccccaagaatgctggaggttccggctcacacaccccctccgggcacagagtcagctggggggtgctgggagggagaacgccccgctcctcaccccccatccccgtgcaccctggagcccagctccatacgttcggccaccccaggcggactcggggtggccgggtagcgggtggtggcaggaggggaccgggtaacggcaggcccgagaggaggtcgctgggccgggccggaggcgcacaggggctgcgtggctacctcggcggcacccgccccacctccgccggctaagcccggagggggacggtgagtcagatctcgggcacccgcgggtcgggcggggagggggaggcaggtcaggaaatgacatcagaggcctgtgctcagggagtgggggtctgagccgggctggggcggcgggggcggcagtgagtggggtgggggcgagcggacctcggcggagcctccggcctgaggcaggatcagggccccttcctgggggagtttcctgcctggtccgcccttccccgctctccccgccccctctccgggccgctccttgtatggtctgggcgccgctctctccccgccccctctcttctccctccctcctccttccgtgtgtccctccccgcccggctggaggctgctccggaccgggacgcagagtctgcggacccggcgccgaggcggccacccgagacgcggcgcgcacgctccggcctgcggtgaggcgcggggagcggcagggcggccccacggggagggggcgcggggcgccgggagggggcgagtgggggtcaccaaggggagctgggaccgcctggggctcctgagcccggctccgcgctgcgtaacccggcgacccaccccagcagcccggcccggccatggcggccccccgcccgtctcccgcgatctccgtttcggtctcggctccggctttttacgccccgcagaagaagttcggccctgtggtggccccaaagcccaaagtgaatcccttccggcccggggacagcgagcctcccccggcacccggggcccagcgcgcacagatgggccgggtgggcgagattcccccgccgcccccggaaggtatgcggcggggcttggggaatgtaccccggcaggagccggggtggggggcagt

SEQ ID NO: 11621 - DNA, 6000 bp, Homo sapiens
aattgatcttaatgttcagacaatttgacataacttctcattgataaaagattttttctaatccagaaaaaaatctaaatggtttttcaatatgaatttattgagggataaacttaagattctagaacttcagtttagaactttgaggtatattaatttatctggataataataatagtactggtagttaatctatagagaacactttctgtgcctggtataatatataaattatgtttaattcccaaaataatcaagttttatgggtataaatactactctgatcttataggtgagaaaatgaaagcatccagtgtgcgggtaaggtcacacaaagagtttgtaggccaatacacaaatcccagagaccaggctcaatttccactctaacttgcttcctgaatgaccatctggttcttcctaatttctatgtgattatgacactcaaaagaaattcacttaaaatctgggcaacagagctgcgctgtgacccccacctcaccccgcagaacatgaagaatgcaataaatattaaggtcaagttttatattctaaatttacaaattagtttaactatttttcctcccagtttcttatattaattgaaagtatgtttaccagtgcattaagaccaccctttgctgactttacctttcctactaacattaaacagccaaaacatgaattgtttctttagcaatatattcaaggtgtttaatccaaataacactcggtatcatgcatttccctgagacctttaaaataaagtgaaattttggaaatccctttaagtttatgcatcttcctcagtatgtcattccaattgatacttgattatgatatgaagtatctcagagtgcccagggacaattagcagggctaaaggaccaaaatccaggtagatttttcagctcaccagaggttttactatgggactctactttatcctgttcatgctcactaaagaataacattccagacagcttgtatattttcagagaagcaggtgctaaagccttcttagagggtgcaatcagactggcaaatgtatctactctaatttggccgatttttcagcaggcattcactgatttctgggcatagttggacagctccctttacagaaggaaattctactccaaggcactcacctagacatataccaattttttttaacctattgaaaattcctgaatttttccagtgcttcatgcaatcacttcaaagtgttaagattgaaatattttgactcttttttttcacttaagttccaaaatttgggcagacttttgagataatttacattgtggcagactatttacagaactctggaataataatgatgattgtgataaaaataatttttatatttgttgagaatattaattttaagaatgtattaagatattggaaaaaaagagccagtcaagatttacttgaattaatgttagcataaagatgatatggacttattttggtccgtttattcaaccactcactaccagtgtaatatccatcttggtcataggcataaactctatgtagcataatgccaaacccaataatagtagatattcaattaatattggggatgcaaatgaagaatgtgtatactgctaatgaagtcactactcatgggatcaagctaacattttttaaaaatctgttgaagtaaagaggatgtgagcagtgggaaagagaaaatgtctattctttattattttccattgctctacttccaaaataatgcaaattgcccactgtcttttctggtcatgctgtgcatttgggggaggtggggctggggtgggggggccggtgggtgggtttgtgtgtgtgtaccgttggtccacttagttttactactttcaagctttaattgaccttacttccaactaaggagacatatgttcaaatcattattagctgtcttcaattatttgcaaacatcaatgtaatatagaaatcaataatgaattcactctcagaaacaagaaatttcatgcttatcatatctactagacatctggttggactgttgtaagtccattgactggattaccagttttgctggaccgtgtagtttgaccagaacaaacagacttactaattcctaccttctcactaaaagtcatagtgataactgaaggaagaagaagcttaattctaaattctaattgtaataatgatgaaaatataaactctaatggagttggataggaagaacatagcattatactctagggagtctctgatctggcaacaattaaagtcttaagactttaagtattttgagttccagatgtccatatctaattaacacaaattgaaggcagaggtagttgtgttacaaatgatgtgacataactttcaaacctgacaaagtgcattgaaaacagattaaagcaggctcttagctcatactggcatgaaataagaccatcctatatggcacagaggtggtgcaggtatttacatgtgttattaaattgagttttgttgtttctcattaggagaaattactacaaactgatcagaatgctctttggagaagaatacaccctcaggtatatcattttctgttacaaaataattaaatagatgtctattgcatgtcttttagtttggtaatctgggaaatggaattgtttcagttctgcttgagatacccatggaatagcattcattgagttactgaaatggtaatactttcaatcgctgccttttttcttctattgaaaatactttaatgctatgttattggagttcagtatgatagttaaaatggagaggcatagttaaataatagattgttctgaaaagttacgctttctgacagtttttttttttcctatgacttgtttctttgagctcttagaaatggctgatggcagttctttactggagtgttttggcaagtggtcattgacttttgacagtctgtgataattcaaacagcaaagggacattttataatccataagaatgcatttgctgtattattttacaggaggagtattttatagaatgaggaggcagttcacctcccattagtcatctgtgtgtttcttcattttccatattgtacccaatctgcagttcttactaggacaaagcatccttttaaattaacaagaaacaaagatcaaataaaaagcgctgaatcagacccattaacaccatattaattatgcagtgaatacacagtactatttacagtggacctttctaagaccaaacaatgatgttaaaaactcagtttattccaggattaggcaagcctccataaattttctatttatctttaaatgcaaatgcttattcattgcataacatcgaaagacatggttactcctacttagtcctccacaaacatcattagatatttagatgaccaataatttttaattgtgtcaataaagtcagtggaatgcttggctctgcagagacataagaattcaaatactttaagtagactagatggaagaaaaacatatggagggtagagtgtgaagagctgtgagctggggagaagagcttgataattattattaaaattatctaaatgtgaaaaaatctaggtctctctaaacattcttaattcttagtgcttgcaatgcctcaggtaccttgaaatagttacccatatgcctgcttatgtatttccgttttgtgtttgtgtttgtatgcgtgtttgcctaagtgtagtttctcctggcagcagcgtgtgtttggtgtacgtgtgcatatgtatgagtacgaattaattacatatcgaaaacatgtgcattaacggcatctgcagtcctccctccctgctccagtcagtcgggatgtttagcaccgtcacttggtgttaggaccactcggaagacctgcctgtcggacgcctgactgtggttcccggggggccggagctccaggagcctgtaccatctttatctgaaggggaggagagaaggaaaggagaaggcatccgagcgagggtgttctccttcctgcagccgggtagggggcagccaggtttggagcagggttctaggattacacggcaaatccccaacttcagcaccgcggacagcatcacctcccgcccagggagaggcgcgcgcctccttgctccgcccccgccccagctgatggaccccggccggtcggctcagtctcccttttgctttcaaacgaggccagggcagggcagaagggttttgacagccagaggggtacggtaaggaggaggaagaggaggaggaggcggaggaggaggaggagccgaggagggaaccgagaagggaagagaagggagggcttccctccgcctcgctcgccgcccgggctcacaggagctggcggcggcggcggcggcggcggcgtctcctgctctccgcggctgttgctgctgctcgcgctccgccgcccgggagatgcttcctcgcgcggcgcagcgctgaggccgtgcgtgcgccccggctgcgctgcgcgctccccacatacacaagctctccatgtgagctgacaggcgagtggaaacccctcgagtcacgctgcccggcggcggagggagcgctcgcccgcagtggcaacagctgcaccaccgtccccgtcgctctgccttcctcttctgcagcctctgctcttctgattacctccctcccccgtcctttggtgatttttttttttcaagaaggagagggcggggtaggtgtccgttccctcccctcttccccctcctttgccttcttggtttgaatttcctcccccggcgttgcactggcacacagtgcaagaggcaatacccgcacggagggagaacgaaggctgagactcccctgccgctccaagcccggaagaactggagcctggaggggggtgaggggagaagaggaagcgggaggggcttggcttcctcgcgtatttgaggacagcccatctcccttcaagaaccctacggagagtcggactgcatctccgcagcgagctcttggagcgccgccggccgggaggcgaaggatgcaggcggctccgcgcgccggctgcggggcagcgctcctgctgtggattgtcagcagctgcctctgcagagcctggacggctccctccacgtcccgtaagtagccgtctcctcgctctgctctggagcagtttcagtgcggcattgatgtttggcaccagggtatcaactccgaagtgcatcgcagtgctggcaccctgatgtgtttgtgtctccgctgtcacacacttgcagccactgcagtagacaaactcgaaacccagcgtttctgttttggaagagacagggttgtgacgctggtgatgtttctggaaagttgttcctggtcttggtgatcggttggcaagagcttggctagagagactgatgtagatggcagcttcttaggagttgtttgtgcagggagagttaactgcatttggcttaggtaggtcagtgaatgaaaagtgaagaccatggcaaaaccaagtttcttatttttatttatggttataacttaatgagcacggggttgaggttaacaagaggagcatgttttaaacagtttgggcacctatagggtctctttaacctctcccgttcccttaaaaagttaatgcccatttagtacttgcttattaaaatggaaggcagcgaaattgtaactgaaattgctttaattctttgatactttgatatcatggatatgactgatgcagtacggtacttgggacactcagtgcaaagcgtcgttaatgtagtaataaacagattcttaatagggttttcaggaaaataattatattcaatatgtatatctctgcattttaatcaactgtgtgtgtgtgtttgtgtgtgtgtgtgtttaagactgcccctgttttcatgaggtttagaaagaaatggaagattctggcccattttctgcattcctttagaagtgcatactgtgcatgtagagaggaaatgcatgattgttcctttggttcagaaagagttaaacactagaa

SEQ ID NO: 11622 - DNA, 6000 bp, Homo sapiens
actggtgtctgcacggagtgctgagctagggggccagggctgcagccgctgctgagatcggagcctgtaggcattgctgacggtaagggagccagggcttcaaggaatgccgaaggatctgcagaggagctcttgcaggaacatctcgagattccattaccttccccaatcttttccagtttctcgtatttctgcatcgcggcggccgcggggacccctgcgggccctcggttttaagactctggccccggcgttgcagaggaggcggcacctgagcctccagccccgccccgtctgcccgcgcagggccttctggggcttgtagtcctaaaacgactaggtctccccgcaatgcccgagaccgaggacaagaagactacaacccccagccgtctgcgctcacgctctctgcagcactcgactccagggctccgtttctaccgcggaggcaaaccttggacttcaagtcccaggaagcaacgcgtgtccgttttccgggcgccccgccgcggcgccgtggttcccagtgtgccccgctgttgttattccttttatgtgctcccagccctcttgaaaagggccgctccgggactacgcgttccagaatgcagcggaaatgggggcggagcgctctcggttaggggtttggggtttggcggcctagatcccgggcactggcggcccagcgctgacctggttggtggcattgtgttcccaacggcctcttgacgacctcagcacgggtttccacctctccccaagccacctagtgaccccagaattgactggggaatgcctgtgagcgatgatgacctcacagggaacagctgaccgcagggctgggagaacagctgtgccccttcgaggctggattttagtggagggacacacgccaaagaccccctctctgctgagccccgtttgttgtctcggagcccacccgactctagccgctgaactctgacatgctgaggaaaactgggtggagccctgggggtccccctcagaccccagtctccggaacagggcccactggagtcagccagggtgtggcaggcaggttggttaaccccctccacagacaagaccacagaccgatgctcaacttgcagcagcctctgcctcaccccttaaaggagctgattatagattcccttacgctgcctctctaattgtctcatgattgcattcttgagggctatggaccgagggaaaaggatcccaaacagcactcctcagcaccggaaccagagttgctgctaaacacgtgttaattaactcgtttctatctgaatgcttttgcatacacaagggaaaagaagcaaaaagtgtattccttatctggaagactttgtgatttcgttgggcaaaaaagaactacacacaaaggtcttgaatgataagtgatggctctgcctagggttcggttcagtgtggaggttccattcaagaggaaggaggccagcacagcgaatctctgtccctctctggaagtggagagcctctaacaagttaccctctcccagatcagctcagggtaccgggcggccagcctccagcccctgtcacccttctcacccactcgccacccgtccctcaggggctttcttggaggcacgggggttattgaggggggcaagagaatctcaaccccgatacgtttatgtttcgacttccccgaatttccttgtgcctgcgttttgctgcctgggatccctagcgtgagaagggctcctttacactcagaggtgccgtaatggagccaagggacggcatcctcggggctcccgagccccgagtggagaagcttggggcagagggacggcgggggcggcccctggtgccgggctgtgcctggaagcgcgcccccgccccggcccccgctcccgcctccccacccgcgaaggcgggaccgcgcacggtgcgccggggggcgcgcacgcagggggctggcctgcccgcggcgcgggggaaagttgagttgggagaagttgggagcggcgggggcgcgccccggggtgggcacggggcagtcgtcgggagcgcgcgagtgcgccggaggacggggagagaccccgagacccccggggcacgaagtccagagcgagcgggtaggcggagaggtggtggcgggggacggccagggccgcagagggaggaagggagggggaaggagaggggggaactcgggactcgagcggggagggagtggaagtggaggaaagggcggagactggggcgcggggaaccgcggtcttggggagaaggatggggaggcggatggagtgctggtcggaagcgggcattccggggtccccttctcagagttccctaaagccagggtgccgcgccccctgccaccaggagggggtagtctccccgaggcgccgccggccctcccactccccggctggctccagaccacccctcccctccggcccccccgcatagtccttcagtcccgtccggggcgcccagactgggggttgcccggggcccccatccccaatctccgggttgagaggcgaagccaggaaaggcgggtggcgggtaaggtcggacaaggggtcagacagaagagggagcagctgggtgggaatgggaaagatgagcccggagagttggacctgactcccggggtcggtttgtccaggcgggaagttctgtgctgggtgtgagaggcggcactgcctgaaacccagggtctactttatcccccttcgtttcccccgccagccccacatggaagagctgcggaatttacgagttcacttggggggtggttaatgcccaagtgggggtccgaggtgctaatcccttggtcaaggggagagatactaatcctctgggccggtcggggctggtcccgggaatgtgcccctacccggattatcggcaccgatgctctggacagaagctgctttgtgttctgggacagcaggggagggggtgcagaggagtgtggaggagcgcgacgagggcacagcctgaggtgggagtgggcgcctgcaggtgctctgggcggactctccccacacccttcccagactgggtgcactcacgctcacccacaccacccgccctggctgaaggcctgctgagggggaggggaagagcgtggttagccaagttggagtgcttgccaagaatgtgttgccaggctccccatcctgggtgacccccccagacctatattgtttgacgctacactgacttgtcttactcctaagtcaggcacccccagtccccagcaacacactgggagcatgggttgttgggtaccgtcactttttgccagtcttgggtgccccctgtgctgacccgctaggaatgcgccccctatttgcagggattgggctccctcctgcagctccttctctgcccccaccacacagtgtcctccccagactccctacagtcacagtcaggagggtggcagcactgccactcagattttcctggctccaggctctagaggggcgggatccagactgcccctcagaggcagaacctcaaggttgcggtgcccaccccctcccagcccatcacatgcccctcccccattataaagctctgcccagcccatgcccaccttctgtgccttcctctctctcagtgagtgagtggagttgagctcctgccctccacccagccagcctgcttccctcctgccggtccccaaggacctgggggagggaagcctcctgccggcctgtactggggagggggcaccccctccctgcaggggcatcttgggctctctccagagttcttccattcgtctgcttcctgtctcggcagcccggccccggctccacggggtgtctcaccctccccaccacaccctctctggtctcaggcccacctctggtgggtgccctgaccctgcgaggctccgttgtctgcctgggccttcactcccctctttccccagctcattatcactccctccctcatctttgttgctttctctccgggcctgggccttgactcctttctccctcatttttcttgcggcctttcccacctcctctctcctcctccctctactcagcctctcggcccttttcggcccccctcgcctcagtcctctcctgtctccttgttcttctcttttcttcctataaataactctcctctgtgctgtggctgccgctaagggccactctgaggcccttcatactccaggaggatccccagcagcgcagcctgcgcgtggtggctcctgccctcccagggctctcgatggtgatcaggcctctcccccatccaggttatgcctccgcctcgttgccctgaaagccgcagcgacagcgaaaagggctaagattcggccatgagcagcgcccctcggcgccccgccaagggcgcagattctttctgtacggtgagtgtggcccccaggtcgccagcccaaccttccctccctgggcagccttgggtgctccggccaagggtcctcgccaaccaggggtgtgagcgtgtgtgagtgtggagactgggaggatgctgccatccctaccctgactttgcatgatggtcgtagggggggatgggtagtgggggtatcagacgtcttccagtcctggggagggagttgaggctgttacctgaagacctaggtagcttagcctcagcggttgaggaactttgagaaccctgggtctctcacccagcaacccgtctcagacccggctggccttagaggcgcaggtcaagtctgcacgcgggccagggttctgggcggagctcgcctgccacgactggccacgccccctgcccacgtgccacccaggcccgcccctccctgcccccacgtggccaccgctccacatggccccctttggattttcctaaggagtcttaatgattaaccccgtgccacaatcagctccgctattggtcacactggcccagaggggcacgtgactgggaaggggcacaggctggtcccctccccctccttctcaggttcacccctgccggccatggacttcctcctgcggcctcaggtgcgaggggtctgcgaccctctctccccatggcggcaagctccctgcgcctctccccgtcccctcgtcccacggggctgcttctggtgggagtggggctgggcgcttaggggagccaggagatggacaggagccttcctcacagaggggagaagccagccccctggcccgctcaccttctcttatccggtgttctgccagtcccagctgctccagtccccacctcgcccctaagacccgcccttcaccccagccctccccgcgctcttccttgttctggctgctggcaccgctatggagggggctgcatacccccgcccttggagatcccgatgcccttcaggtccagaagctcttgagcaaatatttggcggcgcctggagctgagaccgtgggtgggtggggggctggaccaaggctgcctggccaggcggctgccgcttagctgggctgagctcttacaagcgccgcattccctgccggctgtgccggccggccgctgctccgcgcccgcaggatgactcaggtgggggctgtgggggtggggtgaggggtggggctagggacctggcccagggctcgggccgggggcctgggggctgggggagctctcctgggggctgaagggcatccattccggtccctgcggggctgggtttgtttgactcggacaggctctgggtcggttagcttgggcgccgccagaagttactttttgggctcagcagttgtcctcaggccaactggagtttcttcactatctgtcatgtgaacttcccggttcacacgccctccctccaggctgcagatgggctggacacacgggatttcttccacctgccctgaactgactacacagccaagggggctgggctgggatgagggtagctcagaacccaggggacagctgctggggggactgggtctctgcatctgagggggcagactgctggggggacactgggtcactgtgtttgaagggatgtct

SEQ ID NO: 11623 - DNA, 6000 bp, Homo sapiens
gggaacgagtgtggctgatgggttggggatgaaatcataggggggtggacaacagtctttgtgcacagagttcacctctgggaccagttgagtcatgagtcacaagcctgggtaggatctgtctgaaagatatctcaaaaaaacaatcttaggtttgttatatgtaaaatgtttgttccctggtgccataaagaaatagcactcaaatataaatttaattctctcagcaaggcaatctgtattttctgcagaaagggtgctcatcgcagttggaacaatggcgagagcacattcgaacaaaggaaagacgtaatttttatcccttatgctgtttgttcctgctactgtgtcctgtctccattggctggagccagaccgcgcaatctaaactaaaacccgattggctaacagtttaaaacttttctaaataggtaaaagtaatggaaagacaaaggaaaagaggaagttgcttatgccaaatagggaaggggcataggctgcgagctggaacgtgcccgtgagcatgtccagcacaaatattttggttaaggtacaaggacatagaatgtactatgcacctgtgagcatgtttaacagctacataggatagggcttaacaaagagttattagcataaagtgaagaggcttgaaggaagttagtctttaaaataaactattatttctaacacttatgatttactctttaacaagaagggaaactttgaagaggaactttttactttctacaggttctacaataatgatgttatctataggaacaatcgaggaagtcatgaattttgcgacgtctggccacatgactcccgagcagtaagggattatagaaactacacctacatttctgtggagtttaggcccttccagttcccattatcatattcttgcttacaaaggtggttttcagtccctgatcaaggaaaggggctagttatagggaggggctgttatcatccttgctcctaagttaaactggaaaccacatttctcctaaagttagcttggcatacacccaggagtgaccagggacagtttggaggtcagctatgtcagatttcttctactgtcacaattttgcaaaggcagtttcattttattaattttactgatcttttaaagaaccagcatttggcttctgttgttttattttcattttctattaattcctgataatgcttttattattcttttatgttccttgggtttattcagttatatttttcttaattcatagtttgtggtcatgttttctaatataggcatcaaaagctataaatttagccatatcctatgggttttaaaaaagttgtattttcactacttaggttctgtagaaatctctgtagtgttcatttgcacattttgtaacctttctagttacttcgttaccattggtttttagtgtacttgtcttggtcacagcatgtggctccttgaccccactggtcgcactcctcaagagcctttgctcttattcccccacccccccaccccaccccaccctgcatagctcttccccagatagctgcagtactcactattcagtttacgtcttgacacaagtatcacgttttcagggaggccttccctctccatcttcctgaagcttcacacaccttcttctcctcgttgctcttcctgctttattttctttcctcagcacttatcactttctaatgtattatttaacacagtgttcccagctggatagagaaggaagtaaagccattatggggtgtatagctggagactgaaatagaattaaatcataagggaagtggggagggctgagtgcccggactttgcctgtcatgagactgaagacataggggtagatgcagctgaggagtcagggttgtggttggagagggagtttttgttgttgttgttgttgtttttttcatgtggagtctcactctgtcgcccaagctggaatgcagtggtgcgatctcggctcactgcaacctctgctcccgggttcaagcaatttctcctgcctcagccacccaagtagctgggattacaggcgcccgccaccacacctggctaatttatatatatatttattttattattattattatttttgtgtgtgagtcggagtctcgcattgtcaccccggctagattgcaatggcgcgatctcggctcactgcaacctccccctcccgggttcaagcgattctcctgcctcagcctcccgagtagctggaattacaggtgtgcgccgccacgtcccgctaattttttgtatttttagtagagacagggtttcaccatgttggccgggctggtctcaaactcctgactttgtgatccgcccacctcggcttcccaaagtactgggattacaggcgtgagccaccgcgcccggccctaattttttgtatttttagtagagacggggtttcaccatgttgcccaggctggtctccaactcccaacctcaggtgatctgcccactttagccttccaaagtcctagaattagaggtgtgagccaccgcccccagccggagaggaaagtttcaacttagacatgaagaggtcatcacatcagtcctggatgatgatgaaattgagggtggggcaaagttccttatgtggaatttaggtaaaggtgacagcaggaacactaaccaagacatttggaggcagggttgggcatggtccaacatgatagtgggaatcaggctaaagaaaacacgagaaacgacatcagtgtccatctttcatagctgctaatggagtagctcttggtttcttcagggtctgttttggatggttcccttttgtgagggccaagcagcccatggtggaagcgggaaggccgggagtggtttgaggaaaacaacctgtaagcgtggaccttgctatatggatgaagaaggggttggctccctaggtgcctggttcctcgtggattcagagcagcctgtccggttacactctttaacttcaggatctcatggcctgtggaagaagcagtgcttttgtttttgttgtttgtttacttgctctttgtctaccctaagcgaacattttagggagttataatgtctgtttcccctaaatgtcactgctctgtacatttttgttgcaatatttttgttacaaagttgcacattgcaatttttttttgtcttttcatttgctctcatgggcttccttacttagagaacattttcttctacttcaagtatttgtgtttttctgtttatgtctttagttttaaaagtacctgcagctgacatagcagcgctttcactggcgcctgattttcctttgtactattgtcatttccagccatgcctctggtattactgttggtgggagtttttgtttggttgggtttttgttttgttttggtatgttactgttgttttgtttttttactttttaattaacttgtagtagaatacttaatagttcttggttggcagacagttaagaaactgaactgtttaccatcttctaggcttatggcataaccttgtacaagagaacctaatttttacagtggtgctttactgatgccagtttgctttgtcctgatcttttggggacaataccatttttaagattattttatgctgtagaaataagtaacttaaaagcagtatctctgtgcagttttcttatgtatctacattgcttatatggtttctctgccataagtctgtttactgagatgattttatatgtgcattgggctccttagaattccttaggaaattgtattagcctccatgaagatcagatatcagaaagcttaggagaaattgccaggcacggtggcctcacgcctgtaatcccagcactttgggaggccaaggcgggcagatcacctgaggtcaggagtttgagagcagcctggccaacatggtgaaaccccatctctactaaaaatacaaaaactagccaggtatggtggcacgcacctgtaatcccagctacttgggaggctgaggcaggagaatcacttgaactcgggaggcagaggttgcagtgagccaagatcccaccactttactccagcctgggtgacagagtgagactctgtcttaaaaaggaaaaaaaaaaaaaaagcttaggaaaaattgctgttcagtgctacatttagttcttcttgccttgttttataggtgagggaatataattacttgaactctttatttgaaaataacttagatttagagtgcacactagggcaggcataacctttgattggaaagtagaattttttttaagttgtttatatttatttatttttattgttttgagacagagtcttgctcggttgcccaggccagagtacagtggtgcaatcttggctcaccacaacctccgcctcccgggttcaagaggttctgcagcctcagcctcccaagtagctgggattattataggcgcccaccacaaccctcagctaatttttgtatttttgatagacacaaggtttcaccaggttggccaggctggtctcgaacttctgacctcaaatgatccgcccacctcagcctcccaaagtgctgggattacaatcatgagccaccacacctggccagagttgcttagagttgcttatttttaataatagatttttaagatccttggattaaaaaaagaatcttgcagttctttggttggaagagactttagttgtcctgttatgatacatgtggtacttgttattttccttgtgaaaattataacctgatgagaaaaattacgcaactgaaagcagtccagaacaaaggtgaagaagtatccattaacatgggcaaatgaatcagtcagctatttcactgccgttggttctctgagcattaacccacaggcctgaggttttcattgttgaaccctttttaaaaactcagtactatccatacatcttcttgtatttgaatatccgttaactgtacgcatagtggtcctacttggtggtttggaaaacagtgattctgtatttggtggatggtttaaagtatactgaagtgtctaacatatttattcttcttttttaggaaattgacaatggcccttcagctatgctaggtctataatgggaagtgtcacagttcggtatttctgttatgggtgcctttttacatctgcgacctggacagttttgctttttgtttatttcaacttcagtgaagtgactcagccacttaagaatgtgcccgtcaaggggtctgggccccacggaccatctccaaaaaaattctatccccgtttcactcgaggcccaagtcgagtgctcgagccacagttcaaagcaaacaaaattgacgatgtgatagacagtcgtgttgaagatccagaagaaggccacttgaaattctcttctgaattaggtaagtatatgatgtttaccagcatccatatcaatgtatttaatcactggaagtttgattaattagttaattaggagatcagaaatgctgcatcattttttccccactgatttattttgtttgtgaactacctgaagttctgtggtttctgcagactcagtggggagttatattctaatttatccagttctgacttcagtatcttatgagaaaacaaacaaggtccagggaagaaaaattaaaaggctagaaagaaaatggaacctatgggagaaggggtttgttttttgtttgtttttttaagagatggggtctcaccatattgcccaggctgtccccgaattcttgggctcaagctgccctcccacctcaaccttgagagtagctgggactataggcatgcaccactgtgcccagccctggaagaaggttttaattgctagaattgttaataagggaaagaaatggttgaaagtttccttgactgtatttaacttatttttaagggtacatttaattaatacagaacataaagtactgagtttaaaaataagctggggttatttatatctaatatgattttcacttaacaagaattactaaggtgctagaaaaaatatatg

SEQ ID NO: 11624 - DNA, 6000 bp, Homo sapiens
tctcttttcttatgtcacgttgactgtcgcttttacaaattgggaattttacaggttgagttgccttatgttggggttcctctaggtaaaggtattcatgcagttaaacttctagtaataagcaacaagaaaataacactgataaagtgacatgaggaatctgctcctgtgctgtaactatttcctgatgtcaaatgtgaaactgaacattttgccaaaagtctcaacttaaatcaaagccactttaatcaaagcagttgctaatgccagcagtacataaattgaggatggagcaaaaggatcgacaccaccaatggctgcattgtgataggtgtggacagagcctgccagaattaaacacatgccaggagtcaacactaggcaaaggtaaatgggataggtgctgtgaaacatggcagatcctatgggacttaggtgctcccaaacatggcagaccctatggggcttaggtgctgaaaaacacggcagattctatggggcttaggtgctgtgaaacatggcagcttctatgggatttaggtgctgtgaaacacggaagattccatggggcttaggtgctatggaacagggcagattctatgtgaccaaacctaacagaaacagtgcggtgagaatcgtaagataaacatgctattcctgtgatctgggtgaacaaacaaacaaaaacaggaaatacaactgcaaaacctagacagagaagagccaaaactgttgataaatataggaccaccttcgcatccccgtttgcgaaaatgttgataaatataggaccaccttcgcatccctgtttgtgaaactgttgataaatataggaccaccttcacatccctgtttgtgaatgcaatagcacaagaaaaagtcattttgaggatgggatagggaatgaacttctgatggtaatgctgtcttcaaatggttccgaattgaattttatcagaaatttaaatacccaaaattaatatagaaattgagaaccatcttatgttaagcactttttccttacacttactttccttcttttccttttttttgttctttttttttgagacagagtttcgctcttgttgcccaggccggagtgcaatggcacaatctcggctcaccacaacctccgcctcccgggttcaagcaattctgcctcagcctcctgagtagcttggattacaggtgtccaccaccatgcccagctaatttttgtaattttagtagagacgggattttaccatgttggccaggctggtcttgaactcctgacctcaggtggtccacccgcctcggcctcccaaagtgctgggattataggcgtgagccaccgcacctggacctgtctttcttacagagacctcttagcctcattcttttcctctccagtattccatatggcagtggctcaaggtagacacgttgcaaagaatgaacaggcattacctggatattcaggattgctttgctgttttattctgtgcagtgtttccttttatgcctgcttttcagccctatcctttctgcagggctctgggtcacaagctgggcaggaggagcagaacacagcgcctctaacaagtagcaggactggacgctgttggttaagtgttaggagaaaatgtgtctgctaatagggttatttgtttctttttttgggggaatttttattttttattttttatatataaactttaagttctagggtacatgtgcacaacgtgcaggtttgttacatatgtacacatgtgccatgttggtgtactgcacccattaactcgtcatttacattaggtatatctcctaatgctatccctccccaattcccgcaccccacaacaggccccagtgtgtgatgttccccttcctgtgaccaagtgttctcattgttcagttcccacctatgagtgaaaacatgcgttgtttggttttttgtcctcgcaatagtttgctgagaatgatggtttccagcttcatccatgtccctacaaaggacatgaactcatcgttttttatggctgcatagtattccatggtgtatatgtgccacattttcttaatccagtctatcatgttggacatttgggttgtgggactgtaaactagttcaaccattgtggaagacagtatggcgattcctcagggatctagaactagaaataccatttgacccagccatcccattactgggtatatacccaaaggaatataaatcatgctgctataaagacacatgcacacatatgtttattgtggttgtttcttaacataaaggtttaatccgtatgattccacttctgatttccagggataatttgaaggaaactataaaaatagaaggttaaaaaatatgtttgtcggccgggcgcagtggctcacgcctgtaattccagcactttggggaggccgaggtgggcaggtcctctgaggtcaggagtttgggaccagcatgaccaatatggtgaaaccccgtctctattaaaaatacaaaaattagctgggcgtggtggtgggcacctgtagtcccagctacttgggaggctgaggcaggagaatcacttgaacctgggaggcggaggttgcagtgagccgagatcacgccactggactccagcctagtgacaaagcaagactccgtctcaaaacaaaaatatatatatatatatatatatatatatatatatgtttgtcttcttgatttttcctctcctccatcatgtggtgatgggatgggaaaaggcaggttgtggggagcagtttggaggcccatgcttggtgggaaagagagggaggaaaattctagatgaacgaatgccgcttcaaaggaagaagcaaaagaaccatattaaccctgcttacaatcggatttagattggtgatatattctgtccacactcaactgggtttatcctgacattcaacagtgtaagtgacctgtactctaagtgttcccttcttgagaaaaggtgtgattgagcagcctgctgttgtctgaatttttgtctctcccttttccagaattcatatgtgaaacctaaccccagggtgatggtgttaggggctgaggactttgggaggtgatgaggtgatgagggaggagccatcaccctgataaaagggaccccagagaggtgcctttcctcacaccatgtgatgcacactgagaaggcgccatctgtgaaccagaaatcagattctcaccacacaaagcatctgcttgcaccttggtcttggacttccagcctccagaactgtgagaaataaattcctgttgtttataacccacgcattttacactattttgttatcacagccagaagacagtaagacaaatcccaacagagaagagtgcttctagaacctaaagtgcacctaccactttctagcaaagcctgatccacattactttaaaagtgacttttcaagcattttgctttggtttacctatttcttccacttacctctctcaagcccaaatcattagtttacacttgtaaccaattgctcgtgcacatgtcctaatgtttttgaatatacatatattaatacataatgtatcattcgtgtttgcatgtgggcattgtggataacttacatgtaattacagttgcaattacttagaatcatctacttcttcatgagctcgaaagtgacctcttattcttttttacaaacggagatttttttgtgaatgtaaataatggaaaagcttcccaaacccctcccagactccagctcccgccatgcccttcccctcaggcgctggcacgcccttacacacacacacacacacacacacacacacacacacacacagcctgatgtgtctatcagctctgaatctggtttttcaagtggcttgggtgggtctgcatatgaatttgaccaacctctgcgcgcgctcctgggagcgcgcatctgtgtgtggtccagggagccaaccgcgtttgtgaatggatgattgatgggaacagcgcccaggggcagcaggtggagacgggaacccaggtcgcggtcactggtcaacccgcctcttggggtggaggttagagaaatgggcgctgggatttggccccggccagtgctggggttccagggtagggagagccgtgggcgccagactgggctgcgggaggtcttcggggtcagatcccgcaggcagccaagagcgagccaaagaaacaaagccgccgagggacgcggctggggcggaggcccggagggaagtggaggccgggaagccaggtgtgcggcggggagagcggcccctgccacccgcgctggtagccgggcgctgccattcactgcaaggtcctctgcgccctggaattgccgcggcggcggatgcagaggccaacccagagtgcaaccatggagacgcgacgtgtgtcccatagtaacctgttacaacattatttataagctgccatccctagccttcccccgcttcccctccgctccctcgccagacttgcgggcgacgggcacagccgcgtctggctcttcccggcctctcccttctctcgcgggcgcagccgatcaatagttaacacccggctgcggacggcggctccatccgcggcaatcaccgtagtgcttgtttgtggaagccgagcgtgcgtgcgccgcgcgcgcacccagtccagcgcggagtgggcgtctacccgaggaggggtgtctggggaggggctgccctcgttacccaaacagtttgcgctcgcttaaccttgatgcagctcgaggcttcccagtccagctcagttcagacagaaaacctggcgcgcgcgcgcgcacacacacacgcctcccctggcgtcgccgcccggccgggtccctgcccttagggaccagagcggcgaccgctgcaccccgcaccgcctgctggaggagcccccggagccggggccgagccgccggcgtccccgagtgcgccccctgtgcgtgccgccgcgctgttgctcgcagtgtgctggcgccgagctcggtggacacgcgcgcagtcagagctgcctctcgccctcgctagctgggctcgcagcctcttcctccctccctggctcctggctttttgtttaaagcaacacccaccctccatccaggctttttttctttctttctttattggtagcggccaaaaagagttgattgctattgggatccgctgagtaaagacacgggcaggggtgcgcggaggtgagaaaactgaagacctggaagatttttttttccttcaaaaacccgtttccatccagtcttcagccagtccagtctactttaatcctcaccaggacaatggattaagtttctcttccctggaccagaagtcgggttcggacttggggcaaaatgaaggaaaaggccatgatcaagaccgctaagatgcaggggaacgtgatggtgagtgccacggacagggcgcgcgctgggtcggggggacccaccgtgaggagcgatgctgggggaggtctgtccttctcagtcccgaacctccctggaaggacagcgaccccatgcccgcgcgcggcggcgcttctcccacttcccacccgagcccacccagcggcagggggatgcggaggagcaggcatttctttgcaaattgcaactttgcggctccgcggcccctctccttcgggcatgtggctttgtgttttgggcgcgggatgggaggaaggggctgcggggagccctcgctgaccgcgggtcggtccgagccccaagcagacccccagggctcttctggggaaacgcggggagaggtggtcacttcggccagggaagggccactgggccctggcgcccgcgccggcctcggtgctccgagtccccggaactcgagacctgttgggtctgcggagccttcggtgctctcggggcaggcgccagtcgctccgctccgttccagacgccgccgccgggcgggaccctgctccctggattggggacgctgactcccccaaaagcttgactgtgccggaggaggtcaggggcacttcg

SEQ ID NO: 11625 - DNA, 6000 bp, Homo sapiens
agtgagcttgatcgtgcctctgcactccagcctgggcagcagagggagaccctgtctcaggggaaaacaaaaaagaaaaatctgaatgtaagagacaagttataacactaaatgacagcagaattattgagaaatttgttcctacttaaggtgatatatttgagaagtaaaaggttcgtttgaatgatacacatcctggcataataaagcccctttcctgtggtcgccctttatagtgagacagaaaagcctgttagagcctcccaaaaggagcatgtttgggaatgggaagggatagaaaaactacaactgctcttgttcattcagagccatccctagacctgggccttgaccccacgcacccctccttccctgtctgcactccctgcacagtgtgatccacaggaatcccaaagctcttcaggcccttctaatacttcccttctgtttctctaggtatttctgggaaaagccagcttctgtttgcactggtcttcacaactcgttacctggatctttttacttcatttatttcattgtataacacatctatgaaggtatggtatgccatccacaggaatgtatttcatctacagtgcacaggtctatggacacttaatttatgtcagctgtgtatttttaattaaaatgctccaaaaataatgtcttaatatgctgttcttgactttaaaactttcagaccaccttgtatatataactgggactaaacgagctatcagtaagcatacatttttggtttcaaaacagtagttaattaaaatactttgaagttagaacttttttattttaggttccttaagtatgataaatctaaagctcttgataactctgtaagtaagagcggtaactattatattttcaagccgtgggaaattacagagtccccagagaaatccagcaagttggtacataacaaggaacgaaagcaggactcctagttgcagtgtctcatttcgctgctgtgtgaggaactgtctataggcttctatcttttttctttgccactgagtcagttttacttaaactgttgtgtgtgtgtcatttttattacatttgccgtgcttaaatgatctctataccatcatttacttagtaacgtatttttttaaacctttcaacttgtcctaattattagtatctataacacctttgttgtctttcttatattttttctaattcacattaaaactagtgtataactattaaaatacaaaatgtttgcacaccacctaacactttgtgtagcactggtggcacacaccccacactgggggaagttgtggactacgtgagcttcagttctttcgcacagtgttgaattcatgcttgtgaacacctacagagctgggaactgaggatgcggcagaaaataagcagaagtctctaggctggtgtgggagagtacacagatcatggcagtacaaatgactgcgatttatgatgggtgccacaaaggaaaagtataagagttgcgaacctatggatataaaaaacatgaaacaggcccagtagctcccgcctgtaatcccagcactttgggaggccaaggtgggtggattgcttgagccaaggaatccgagaccagcctgagcaacatagttagacccctgtctctaaaaaaaaaaaaaaaaaaaaaatacaaaaattagccaggcatggtggcatactcctgtagtcccaactactcaggagggtaaggtggtaggatcgcttgagccctggaggttgaagctgcagtgagccgtaattgcaccactgccctccagcctggcagcctgggtgacagagcaggatcctgtctgaaaaaaaaaaaaaaaaaaaagaacaggggctctcaggatatgtaataggagtctgatttctttctttctttccttctttctacaaatactgagcacctgtgcaccaggcactattctaggccatttggttattagcatacccaaggaagtaatatttcaactgaatcctattggtatggcacctaaacaacctccccccaacattttgtgttcaagagcattttcataagcactgttgaaaggagacaaagcagtatgtgagtctggtctttactaaaaagcaaatttgagtcacttataatggattcttcattaccaaatgatgggaacctagtattcaggaaataatgagcttacttaaaaatggttaggtccccacttgtctaggcaagttaaaactgcaggcattagaggtgtgtgagcaagaatcctctctccccctcaggatgcccaggtttcagaggaatccatgcttgcttggttgtagtttctaagcacgatgtcctgaaagtctggcgtgagacccgaggtgctcgtgtctttttactttaacttctgtgtgctggtgagaggagagaagcagctgttcttctccaggtgctgctaaggccttagtggaaataacgcccatcaagtttttattaatgttgagctggccacagtctaggtcctggtgagaggcctctctgctgtgagccttggctagatgcgctgagggggctcagtgcatgtgtagatggatgtgtgtcttgtttatgcatgtagattttgttttgtatttattcacatacatggtgaggagatcgagaccatcctggccaacatggtgaaaccccatctctactaaaaattagctgggtgtggcggcatgcgcctgtaatctcagctactggggaggctgaggcaggagaattgcttgaacccgggaagcggaggttgcagtgagccgagattgctccactgcactccagcctggtgacagagcaaggctccgtttcaaaaaaaaaaaaaaagttaaacttacacttaacatatgacccagcagtcccacccctaagtacatacccaagagaagtgaaaacttacattcacacaaacacttgtacgcaaatgttcacagcagctttatccactgtcctcccaaattagaaaccacctgtccttcaactggtgagtgaataaacaaactggtgcatccatacaatggaccaccaatggacgcagctataaaaaggaacaaattattaacactaggccctcacttaatgtcattggtaggttcttgaagtgaaacaacacacactgcaacttgaagtgaaacaacatacactgaagccagttttaccataggctaattgacatgagtaagagttaagttcctacagcatatttccggtccccaaaacaccaccagacttttaaataaagacccaaaacaggccgggtgctgtggctcacgcctgtaatcccagcactttgggaagccgaggcaggcagatcacctgaggtcaagagttcgagaccagcctgaccaacatggaaaccccgtctctactacaaatataaaaattagctgggcatggtggcaggcgcttgtaatcccagctacttgggaggttgaggcaggagaatcgcttgaacctgggaggcggaggttgcagtgagccgagattgtgccactgcactccagcctgggcgacagagcgagactccatctcaaaaaaaaaaaaaaaaaaaaaaaccgaaacaaatgtgagctatacatttatttatttatttatttatttattttttattttttttgagacagagtcagtctgtcacccaggctggagtgcagtggcgagatctcggcacactgcaagctccgcctcctgggttcacaccattctcctgcctcagcctcctgagtagctggaactataggcacccgccaccacgcccggctaattttttgtattttttttagtagagatagggtttcaccatgttagccaggatggtctcgatctcctgacctcatgatccgcctgcctcggcctcccagagtgctaggattacaggcgtgagccaccatgcccagccaacatgagctatacatttaagaaagattaataaaagcaacataattatttatccagtttttggtgaatccgtgcatgatggtggtcatagtggtggcggattaaatcaagaagtatatgtttacaaacaaaaattataaggagtacctcctactaccataaagttcaaaaacaaacaataacaaatatagcaggctcactgagtgcttttgtactacattgtttattgtggtacatatgtataattattgtatactactttatgaattattttaccatagtttgtattcattttccaacccacttacttcatttcagggtcccaggtggccagagcctatcccagcagctcaggttcaaggcgcgaactttcccccaactgcataggatgccattccatcacagggcgcgctcacccacacccactcacactaggacagttcacacatgccagttcacctaactggcatcgttgagatgtaagaggaaaccagagtatctctggtgggagattctccaagagtatctcttggagaagacccacgtggactcggggagagcatgcaaacgccatggatggcggccccagccgggaaccagtttcttttctcatcagtgttacaaccaaaggatgttattggcagacctgctatacacacaataagtttggttgcctctcagatgcattaggctaactgaaattggacccagaaggcaacatactatgtgactccatttatgtggctttctagaaaaggcaaaactatggacagagaacataagtgtgattgcactgcaggaggtgaaggaagcctgggggagtttgactgcgaagcggcagcatggcagaattttggggatgatggaactattctgtgtcctaattttggtggtggttatgcctcagaactgaacacctccaaaaaagagaattttactatatttaagttttaaaattccaaaaacaaagctaaggaaaaaaatcttgcctttccaaatacatgggtgattaaaaaagctggggggtgctggaacagtggcaaggtattgacacctggtgttttttcttttatttgtaggttatctaccttgcctgctcctatgccacagtgtacctgatctacctgaaatttaaggcaacctacgatggaaatcatgataccttccgagtggagtttctggtggtccctgtgggaggcctctcatttttagttaatcacgatttctctcctcttgaggttagtttaaaaggttacttagggccaggcatggtggctcatgcctgtaatcccagcattttgggaggccgaggcggagttcagcctccactttgggtggatcatgaggtcaggagttcgagaccagcctggccaacatggtgcaacaccgtctctactaaaaatacaaaaaattagctgggtgtggtggcacgcacctgtaatctcagttactcagaaggctgaggcaggagaatcacttgaacccaggaggcggaggctgcagtgagccgagatcacgccattgtactccagcctgggtgacagagcaagactgtctcgagggaaaagaaaaaagaggttatggctgggcgtagtggctcacgcctgtaattccagcactttgggaggccaaggtgggcacatcacgaggtcaggagatcgagactatactggctaacatggtgaaaccccgtctgtactaaaaaataaaaaaaattagctgggcatggtggcgggcacctgtagtcccagctactggggaggctgaggcaggagaatggcgtgaacccgggaggtggagcttgcagtgagctgagattgtgccactacactccagcctgggcgagagagtaagactccgtctctcaaaaaaaaaaaagaggttatttaggtctgggcctggtggctcaccacacctgtaatcacagcattttgggaggccgaggtgggcagatcacttgaggtcagaggttcaggcattcagcctggccaacatggtgaaaccctgtctctattagaaatacaaaaactggccatgcgcagtggctcacgcctgtaatcccagcactttgggaggctgaggcaggtgggaca

SEQ ID NO: 11626 - DNA, 6000 bp, Homo sapiens
tttaggcatttttaaaataattcagaatatactttaagaccatatactcttagctaggtcattcttataaatatccattatctttgttcttgagaagtactgaaagataaatatccattatctttgttcttgagaggcactgatttcatattttttactgataggcagccaagcgtacagtcactactttgatttgttaagcctgacccctagaggtcactttttgtactacatcacattcaactttttttttttccccctagcattgccagattccatgtaaatgttgacttctcctgaaaatgcctttaaattcataagaatttaagaagacttagtaaacaacaattctggatttgtgaccaaaattaatcagtactttcttatccatctctccaaaacctgtgcctgcaatcgaatacaaaaaaaagtattttaaactaagtgatacagtttgatttagtggaaaaattctagactttcagtggaggatcccctgtggctcttgatacctctgtggctgtgaaagtcacttagtagcccacacgttcatctgcaccatatgaataacagtaataaaagcctcactgtggtgtttacaatcactacatgataggttgtacgtgaacatgtattaattctggaaaaatatgtaaacattgggcagtaatttttatttttagaatattttatacaagtaaaagacttaaatcctattgtcctccatttgcctcatgttctagagaaaaccacatgggtctcgtgctgttttcattttccttagactcctacgacaaagtagtgtagcccagctttgtcatgtggctgtaatttaatttccctcatgatctatgggcttctattcctcttgcctcagaatcaatatccatcagttttgctagtaattttcttctaaaatataccaacggaattttctggaaaaacaacagtttcaattttgtgagcataaggaatcttgtttgctcctttctgcattcctgactttcgttcttgctgtttcagatttactattggaagacccagagttcatctaaaagaaacagacgtcacattgagaaaaagatcctcaccttccaaggcagcaagactcatggcatgttgccggggctagagccctttagccactacacactgaatgtccgagtggtcaatgggaaaggggagggcccagccagccctgacagagtctttaatactccagaaggaggtatggaatggacgtgtctctaagatctcaggaacatatggcatggcctgagaggttttgcctgacagaagggctactgatcaaagtatattctggaagccaaatgtgattgaaatttctatagatgaatacagcacacacaaagctaccaaaatgtcagatcatatgtgggcctaagtgtacatagaaggcttcagaacccaaaatgctgctctgaaatgccctctcccgtgacttaaaatttttctccacacacactgtctgaaaccttgttactttgacatttatttggatcattaactttctgacctgaaagaggttccataacttctctgaatgtcagtagcctcatctgaaaagcatgagaaccaaattagataacctaacaaaaacacctggaaaggaaaatatttctataagttatagtttacttctatagtttctttcttagtgctcttttctaatttattagaaagttgaaccgagttagaaggttgcaagtcttgaccaagtggattgggaagaggagggaaaagtcattgcagatatgggcaactgcaagggagagagtaaggaaggaccaaatatatattgatccaggagtcaggggagaaggaatttggacacagggacaagggagccttgtgggtgagggaaagaggggcccatgtagtaaaaaggatgaggatttgaaaaggaaataaaatgggttttacctattttaaattttgcaacaatatgccactatgacaatggccagatagcttctgtagcttgcttagctctttttgataaaagaagttcacagaagatggaccccaccctggctgctgattgaaagattcatgatgcaggcagctgcccagcagcctctgagaaccaccctgcatcccagctcccatctcattgtaagtttttgtcgtcaatctcactgtcccttagagagtcagggctcttcctcctcgatgttttcacaagctggggactgtagtccttagggagacaatgaatgggtttaatgagctccatgagcctcctaaaattgtatgcaagataaatgtatatttttccagggagtgtttatggctgtcatcagattctcaaaagggtctgtgatcccctaaagtaaagaaccacttattgggttggggaagcttagaagcctagaactatgtgccaggcatggttttaggaccagacaaagacatctaggggcctaaagcagggaaatgacaaagaagatggggataggaagaaatggatatgatttagattaaggaagtggagttagtgtctgaggagagggtggaaatgaggcagatagggaagttcaggttgactctggtttttggctagagtgacaatagggagagtggttccattagttagtttccaggggcagtggtaggggaggtaaccattgtgagagagagctgccaccagccatcatcctcatgaggaagtgaataaaagatgagcagacatgtttcctctggtgatttgccagcctctgccacagagaacctgagacccctcgggccttccccagggctgggggtgtgccaaggttgggcttttgtccattcaccaccagatcctgggcagctgtcagctctcaggataagaacgtttctgcacctgggcatgctggcccaaagcccagcaggcagggcattctgactgtttggagacacctggtttgttagagaaaacagtccttaatggtccagaacacagctgcttccactcagatccagttagaatagtttcacttggtagctagtttgcttctattaagacaccattcatgcgtcaaacaagtactgcctctttttaaaatattaggtttgagtccatctaaaggcaaagtcattatgtgttttgagaggatggttttattaaatataaatgtaaatgacaagagagaaaaaggaagagaataactaaatgggtgcctgtcacaggtttgtactaatgtattttcagctgaatcaggaatgagttactgaaactcaaaaccttgaatcgtgcgagcacggtgaaatgtcaatttaatacatgttgaaacattcagaaatctttgtgttgactgtaagttctcactgtaagtccccagtgctccctcgtctttgaagattgtgaatccaacactggactctctcactttggaatgggatccaccgagccacccgaatggcattttgacagagtacaccttaaagtatcagccaagtaagctgttgggaggaagagaaggggaaatatgtttttttattttatttattattttaattgacaaataattatacctcctcatggggtacgtagtgatgtttcgatacatatagtgatcagatcaggggaattcgcatattcatcttctcaaatatttatcatttatttgtgttggaaacatttaatatcctccctctagctgtgtaaggaacaccagaacttagtctttgtatctagctatcattttgtatcatatatatatatacacacgtatatatatatatacgtgtatatatatatacacgtatatatatacacgtatatacatatatatatatatatatatatatatatatatatatttgagatggagtctcgctctgtcacccaggctggagtgcagtggtgagatcttggctcactgcaagctccatctcccgagttcacaccattctcctccgtcagcctcccgagtagctgggactacagacgcccaccaccatgcccggcaaattttttgtatttttagtagagacggggtttcaccatgttagccaggatggtcttgatctcctgacctcgtgatctgcccacctcagcctcccaaagtgctgggattacaggcgtgagccactgcgcccagccttccctttaactgatatctccctatctcgccttccctctgtccttcctttatttctgggatgctgtgttctactttttacttctgtgacatgaactttttttagctttcacctatgagtgagaacatgtggtgtttaacttaactgttatcaaaaaatacaagctagtttttctttatatctgtagaatatatacatataacttcaagtgttgtttcagaaagaacttcaaatcttactttttaaagaaaaatgatgtctatgttattaaaaattaagtaatctgtagaataatacagacctttaggagtggggtttaggtgagtcctgtcattaaatcacatatgcattttctacaaatagaaaatggttcctttggcaaaagtcctctgaagaaaaatgtttggggttatttaacaatacaactccacctgcaagaacacaggggaaaaaattctattgtgattcaaccacaacattcttctagtttattagccaatagagaacatactacccccttgtgatatatgatatgatatgatatgatacgatatgatagaacatagcataggagctgttaaaaggttatcacttagttatgctggggaaagagtgagtgggattataaaagtcaatgtaagccaggttgaacatttttagttgacgtatttatttataatagtattcctatagcagttaatggagaatgcacttgttcattatttcttattgacagttaacagcacacatgaattaggccctctggtagatttgaaaattcctgccaacaagacacggtggactttaaaaaatttaaatttcagcactcgatataagttttatttctatgcacaaacatcagcaggatcaggaagtcaaattacagaggaagcagtaacaactgtggatgaaggtaagatgggtatgtataaaatccatataattataagcatcatgaaataaaaatctttaagtttatgctttttccttcttgctatggaacgtctgtcttacctgattaacgcaaacacttatttgtaatttctcattctgatatataatcagctatttagttcatattggactgatatttttcaactccatgtgaaactttcttaaacttacattaaaatcttagtgtgggagtgagtaagcataatatttgccacacttgaatttgaagttcaggggaatgttgtttcctgtttacaactttatatattatatatattcatgcacaaacatacatatgtacacatacacataatacacacatatgcatacacagacatacacatctatatacacacaaatatatgtaattcgagttctggtcctgatttactggaaaaaattttctagttcacatatcaatttacattttctagcaaggaaatcgaaacagttattaaagagtgcatttattttgtgtttgagcaaaagattttgcattttggtatgtacaaagaaagcaaaatagcccattatagtatttagaaaaggaattaacacttcttttcatactttaaaaagttattctgaaatcttgagattcaatgaaaattatcaaaaatattataaaaggttttctagttttgcatgtctctaaattgtagagttgcttaaggattattcatttgactatctttgatagcataaaaaattgacaatttctatccaaaaattggtttgaaatatcctaagccttcatacataatcaacaagtatgaataatgcaccttaagtaatgtgtttgaatactgggtattcaaactgggtatcctgataaaatgttggtactggatttgaatactagataagtttggggacaccaacatatctttgtcccctatacctgatgtggtacacttcattcttcttgcatgctttagc

SEQ ID NO: 11627 - DNA, 6000 bp, Homo sapiens
cgtgagcaaaagaaaatttctacgtaagcgaaactaataaaactacagtcactttcagatgcacacctttatttttataaaacggcacagatgttcacacatactgaaggagtggctttgggacgctgctctggtctgtcctgtgaagagtggttatgccagtgttcgtgtcgggaaaacatttcccgtggtcgctagccctgtgcttatggtgatggaggggccttcagagaacctgtaggtctgggaaggacacacgtgactctggtttgttctgggacagcagcagtcactgcaggaaaccccctgatgtggacatgggcttccctcagaggcgactgggcaagagtgtgggtgtcaccgcggggggcctcctcctgggcctgcaggagagacagaaccacaggcccctttgcggcttccaggcgggactgggattccctggggggctgggattctgtgcccttcatgactgcctggcccaggatctctctcacctgcagcaggaagaggctgggaccctcggccgggccgggtgctgcctggttctcaagcccttagcagcttgtccttcgagctcacgttctgctgtgcctggaggtgctggaagcctcaggagggcagggccaggtctgtcttatccactccgagcctggcattgcccgggacgtggggcgtttgtccagtattattcaaatgaccggacataatgaaggatggcgacaggacgaaggcttctgccctaagatttctcgcatctcgtttttaccatcttgtcttcgtggccctcacttgtggttgtgtctgctgtggtgttatggacactgctagtgttaatacagcacaataagaaagtgtgaaaggggccgggaaaggtggcgggagcggggcggcacgtgggttcccctcacagcactgtgcacggtgcctgcttgggttcctccatgtggaccagcaccgctgagcggccactctgcgccaggcactgttcatgggtgatcacggcagcccccttattacagacaagcaaactggggcttagccagctcaggaggctcgcaggtaggtgggggagcctggagctgaacccaggcgtctgacccaggtgctcccccttagccacctgcctccatgagcacttggcaccccagggccccgggggtgctgcacgtgagccgtggcgtagcttaatcgacgcgcacaaggattccgtgtattcagtgtttattgaggctgtgttttgaagcatgccattgataggttgaacataacatttttcttagaataaaagcacattccatacactctactatggcagaataaggaggttcacagataattgagagaagccaccgaaacgtgctgttttctgaaggtctccctacgcgtgttgtagtaaatgtgtgtctctctgtgactgacagtatgctggcggtcagggcccaagctcagccttgcgtttgagtgtatctttagatggaaaaggcgttggtgtggtgtggattgtagcttcccgaaactcatggcgcctcccctcggacgtcggtgtcgtggcgcctccccgcggatgtcggtcttgggtgttttgggggagaaaacaagccccatccttcccgcggggtttctgggcttcacgcctgccttgccctctcagacaaaggccaggacttgtgcggcccacactagtgtatcgccctgtattagagtaaaacatgtttatcaaagaacattggaaaatcagacacaaagaagaaaataaaaatcacctacaagctgccacaccagaaaaaaaaaacacacttccagaaatttcccctctgcatacttatagtcagattgcatgaattgtttgcataatcatatttacttaaaataagtatagctttccttaagtataaattgtccctccacattttgtttgtttttgttttttatgtatgtactaatggtaattctcactgtaaagtctttcagtagtacagataaaataagtccttttcccccacccaatccatctcctgggggaaccactgctaatgataatagttgagtgggaattcttacgctttttaaaatgaggtaaaattcagataacatgaaatgaaccattaacgtgtgcggcttgggagtcgttggcctccccagtgctgcgtggctgtcccggggttctcgtcagcctccccggtgctgcgtggctgtcccggggttctcctaggcacctgcaggactgtgcagttctggctttgtctttcctgaaatgccatcacggtgtatgcacagtttagcatctcttttcattttgtatgttaattgaggttaactttattctttttgatgcctgtacagttttttgtttgtttgtttgttttttgagatgcagtcttgctctgttgcccaggctggagtacagtgatgtgatctcagctcactgcaacctccacctcccgggctcaagcgattctcctgcctcagcctcctgagtagctgggactacaggcgcccactaccatgcccggctaatttttgtatttttcgtagagacggggttccaccatgttggccaggctggtcttgaactcctgaccttgtgatccgcccaccttggcctcccaaagtgctgggattacagggatgagtcaccatgcccagcccaacacacattgtatcttttaaagtgagaggtggcacgtacctgtagtcccagctacttgggaggctgagaggcaggaggattgcttgagcccaggaggttgaggctgcagtgagctgagatcataccactgcacttcagcctgggcgagagtgagacctgtctcaaataaataaattaaaaaataggctgggtactgtggctcatgcctgtaatcccagatcttgtgggaggcggaggtgggaggatcacatgaggcctggagtttgagaccagcctgggcaacatagcaagaccccatctctaaaaaagcagaaacaaattagctgggcatggtggcatgtgcctgtacttccagctactcaggaggctgaggtgggaggatcgcttgagctcaggaggcttgagaccagcctgggcaacacagtgagacttcttctcaacaaaaaatacaaaacgtcagctgggcatggtggccagcgcctgtaatcccagctacttgggcggctgaggcaggaggatcacttaggcccagagttgaaggctgcagtgagctatgatcatgcccctgctaggccacagagcaagagcttatctctaaaaaaaattaaaaataaaaataataaatagcaaaggaggagattctggtgctccagtgtcccattcttaagctggtgggtcagaggtacgaagcaaatggctgtttggcagtatctgaatgtcgtagtgtatgtgtgaacagcattggagtgaagtggccacggctcgggtactctgtagatgattgctagtgcgccagcggagttggcggccttcccctgggggttaccccgcagtccagtctccggggtcccctgggggttaccccgcagcgccgtctccgggatcccctgggggttactccgcagtccaggctccgggatcccctgggggttaccccgcagcgccctctctgggatctcctgggggttactccgcagtccagtctccgggatcccctgggggttaccccgcagcaccctctccgggatcccctgggggttactccgcagtccagtctccggggtcccctgggggttaccccacagcgccgtgcgccagcggagttggcggccttcccctgggggttaccccgcagtccagtctccggggtcccctgggggttaccccgcagcgccgtgcgccagcggagttggcagccttcccctgggggttaccccgcagtccagtctccggggtcccctgggggttaccccgcagcgccgtgcgccagcggagttggcggccttcccctgggggttaccccgcagtccagtctccggggtcccctgggggttaccccgcagcgccgtgcgccagcggagttggcggccttcccctgggggttaccccgcagtccagtctccggggtcccctgggggttaccccgcagcgccgtgcgccagcggagttggcggccttcccctgggggttaccccgcagcgccgtctccgggatcccctgggggttactccacagtccagtctccgggatcccctgggggttaccccgcagcgccctctctgggatctcctgggggttactccgcagtccagtctccgggatcccctgggggttactctgcagtccagtctccgggatcccctgggggttaccccgcagcgccctctctgggatctcctgggggttactccgcagtaccctctccgggatcccctgggggttactccgcagtccagtctccaggatcccctgggggttactctgcagcaccctctccgggatcccctgggggttactctgcagtccagtcttcggggtaccctgggggttgctccgcagcaccctctccagggtcccctgtccactgccagctgggctcttccccaagtgattatctttggtgtccattctaaaagtgcctgaaatgaataatttggctacctgacttatcaggaagtagatattggctttatgggaagaaataacgcatgttcatggttttttaataggcggtgcgtctttctacgtgaataggattttgtggctggccagatacactgcatcatctttttcatcatttttagttcaactttttcaagtggttttaatgaagctcagttatgaatcagaaaattacaaattgaaaactcatgaatcaaaagattgtgaatccgaaagctataagtcaaaaagccatgaatcaaaaggtatttaaatattttttccctcctttttccaccaatcacactttcgcagtggagaaagtgctgtgactttcctcgccaggcgcctccctcgctgcctcctcctgtggtcttggtgctggctctctcctggcttccccctctggatcttgcatccctgggagcttgtggaacttttcgtttgttctgtgtgtggtttggttccctcagagctgatcagtgttgaaacatctttaaagttatttcttaaacaaaaagttaatgtgctcaacttttgatttttattacctttttaaagcaaaaactttacctgagtggtatttagaacctgttttttcagaactttttttctttttgagacggagtttcactcttgttgcccaggctggagtgcagtggtgtgatctcggctcaccgcaacctccgcctcctgggttcaagcgattctcctgcctcagcctcccaagtagctgggactacaggcgcacgccaccacgcccggctaattttttgcatttttactaaagtagacatggggtttcatcatgttagccaagatggtctccaactcctgacctcgtgatcgcccgcctcagcctcccaagtgctgggattacaggcttgagcaactgcgcccaacccagaactattttaagcaggccaatctttgtattgtttgggccacacacacgattcagccagagggtgggggccctttcacgtctcttctcgtggcccgggccctgtcagcggcattcacctgtgtggtaggagccatcggctgtgggaactctgtggaagtggctagccttgcacatcctctgatcatgttgacttcatcagggtgcgagaagcacttgagcttggcgtcggtgagttccctaagcctcttttgcgtgtgttgcagctcatgccagttactatgggagaatgaatgtgagagaggttctcagagaggatggccacctcagtgtaaatggggaagcgctgtgtaagtatggcttcgttttcctgtgggcgtcggtcgtggagttggtcccacacgctgtcatgttgggtactagcagtagagaatgaacggcccgtgtgacatggtggtcctcactgatgacgacgggctgttggagctgctgcttaagccct

SEQ ID NO: 11628 - DNA, 6000 bp, Homo sapiens
tggacacagggcggggaacatcacacaccagggcctgtcggggggtaggggtagggaggcgggatggcattaacagaaatacctattgtaaatgacgagttaatgggtgcagcacaccaacatggcacatgtatacatatgtaacaaacctgcactttgtgcacatgtaccctagaacttaaagtaaaatttaaaaaaaagagaaaaataaataaaaataaaactgtgctgcatttaaggcatgattaattcaataccaccctatattaatagtctggggacattcaagaagtccttaagagtccactttgggtagcactggcttccatctgattccccacgctaccccatgccatcaccacccttttcccactgggccagttgcactcagcaccccaggatcctggggatagcaataggctgacatcctctcactggtcacaagagggcgccagggaccaagcccacgacggtccatcatgacgtctggggcttcttgtttttacaaaatcctgtttgttataaattataaagttttacaataagatgttagtaataaaatgagagcttgttaaatcaagcatatctaagtcaagacaacacaagttatcactgatttcgattatctcaaaaatgttttaaattacaaagtttatgcatgttccttagtaaaaattaaaacaatgtagatgtctagagtaaaaagcaaaagtccccactcgtactctcctcccaagagttaaaccctgttaataattgggaggatttctttccagatatttttctatgcatttataaacatatactatatatacacataaggtttgttttggttgtgtaaatgggttcatttacacaagagggctattcatattgttttacaatttgctctttttctaatttaacaaacattatagacatctttccactgttaatacatataagtctatctcactttatccagtggctgcatagtgtttcatagaatgtatgtactgtcatttatttcaccattctcttttttttttttttttttttttttttttgagacagcgtcttgctctaacacccaggctggagtgcagtggcacaatcttggctcactgcaacctccacctcctggactcaagtgatccttctgcctcagcctcccaagtggctgtggctacaggcatacacaaccacacccagctaatttttttattttttagtagagatggggtttcgccgtgttgcccaggctggtctccaactcttgagcacaggtgatctacccaccccagccttccaaagtgctgggattataagcgtgaggcactgtgcccggcccaccattctcttattgatggatgattagattaatcctaattccaactacaattataactgtattgaacaactttaaatatacagcttcattctagtaatcctttaggagaagcaattttttttatctacaactattaatgatcttctttacaaataagaggaccaggtataaaattcaaaataaattacagatgcttttaatatttaagttccagaatggtaaaagacttaatgttaggttgtttaatgttagtctactttgaattgcatttttattaaactagcttgtttttcttataaactatttatatcatagcatgttttaaaaatatatttgaagccaatgaaaagctatttaaaatttctgttgtaatttctccctaggtgacaccataagatataaactagtgggccaggcatggtggctcacatctgtaatcccagcactttgggaggccgaggcaggtggatcacctgaggtcaggagttcgagaccagcctggtcaacatggtgaaaccccgtctctaccgaaaatataaaaattagccgggtgtggtggagagtgtctgtaatcccagctacttgggaggctgaggcagaagaatcgcttgaacctgggaggtggaggttgcagtgagccgagatcgcgccattgcactccagcctgggcgacaagagagaaactctgtctcaaaaaaaaaaaaaaaaaaagatataaactagcaacccctacaagttagttaagttttattgcgaaggaaagctgcctggctttatctaaaggtgttagatcaatcataatcaaccccaaaatgccttaaaccagcatctctcttagggagagcgaggagggacgtttctaaaaggggtctcttctagggagcatttccagctgtacaggccatattaaagggcttggatgaccaagtattatattattgtttggccaaaaaatatgttctctctgctttggtaagtggcttcttaataatgcacagccgaaaatagaaatcaaatgcaaatgcaggagtgaggcagaagccagttgaagaggtgacccaggtagatgtgtttaaatctgagggcagatgcatgtgtgctatttttaagtcacggaattctcttcacttagctaacagtgctattatttgtttttcagacttgtgaacaaatctgaaaaaaaaaaaaaaaaccttttgtaagactgatgctaattactgtaatactctctctatatataaaataacatcatatcatagagaactttcccagagaatcaagagctctcacaccgttctctgggcaacagggacataaataccaaattaaggatgaagttgaccttctttctcatctgtcttttaaggtgtgcgtttctctccattagcccttgaatcataccttgactttatagacacaatgtttgcgaagctccatatgcttttttatttttatttttattttttttttgagatagagtcttgctctgttgcccaggctggagtgcagtagtgcaatctcagctcactgcaacctctgccttctgggttcaagtaattctcctgcttcggcctccctagtagccagcactacaggcatgtgaaccaccatgcccagataatttttctttatttttaatggagactaggttccaccatgttgcccaggttggtctcgaactcctgacctcaagtgatccacctacctcagcctcccaaagtgctgggattacaggtgtgagccaccatgcctggcctccatatgcattttaaaagcattctatctaaggtagaatcactgacttttattatttggtcattttttaagaaaataagctttatttcatttttagcactaaagtatatgcagaacaagagaagttttattttaaaatatgcagggtcgtgattccatgctctaacttgacaactaaattctgcctgtcaagaactttcaaaagaagaaattttatggttttctggagaagagctactgaactcgaatggcctgcacaaacaatcctattgctgtagagtagatcatctgaatctcaggacagacagaacgactgtcttgtcatttccagaggactaatatgaaactcaagggacattcccaagaggctgccacagttcttcctgctggtaaaccactgcattcgatctaacacagtgtctgggcctttctggcctttacctgagcagcatttcccaaagtgtgtgccatggagcagtcatttctagacctgttctgagaactgctctgagaaatctgctttgggcacaggaaaatcacagggatgttcacccgctgacgattctgagaagccctggggaaatctcccagcctgcttcactcacatgtcactaagttagagatgcagctcttatgaggctttgatgtccttccccaagactgagtctacttcacatgtcttttgaaattaaaaagaagattgtattttcagtatcgttattttctttctagattttttatcttgctaaaggagcagcgatgtcttaattagagcctgttaaattgtaactaatagggcattagattctttgctctaattatattcaaggcttatttttcaaaaatgtcttgtattccctcctttccttcctcacatctctgctcatcacagtaagacttttagaatttaagctttggagctgtgagacatccaaacagggaaagaatgatcttttcccatattactgaaagaaagaaactgtgatttattaagtactccctctgcagcagtgatgagcagcaggttttatatactttatctcatttaagtttcatagttcagcccccagaggacagcaggtattgttcttattttacagatgagcaaatagaggcaaaaacagattaaatgatgtgcctgtggtctcaaacagctaaaaacaagggaagctggaatttgagcccagaatacctgcttccaaaattaaaatataactgcatctagtatggccaggtttatttcttcatgaccattgtatcacacattttaatacagtttcaacctttttttgagacggagtctcgctctgtcacccaggctggagtacagtggcgccatctcggctcactgcaagctccgcctcccagtttcacgccattctcctgcctcagcctcctgagtagctgggactacaggcgcccaccaccacacctggctaattttttgtattttttagtagaggcggggtttcaccatgttagtcaggatgggctcgatctcctgacctcatgatctgcccccctcggcctcccaaagtgctgggattacaggcatgagccactgcacccggccagtttcaacgtcttatttgcttcttgtgttcacacaaaatgtgggattatgcttccttacataatttagcaattataataccttatagctctcacatctgtgtaaattatgacacatttagttcaaatttctatagcaatttcatagtatagtgttcctgatatttttctaaaaagcaaatggcaaatgtttagattttttattatatcacatgtatcttttatgttcgtagcaactactctaaaatcttatgattcaaacaccccaggacctgctggtgacaaccccctggagctgagtaggattcctgatgaaaactgccagattaacagatatggccactttcaagccaccatcacaattgtaggtaaggctgaagatgatgaccagtgaggaaggatgctagactccacctagggtcacccactctctctgctaactctgaaggggtagaggtaggtggtaagggcacccctctgcttgtctaagatgacaccacacatgcaagagcaaagaccccattcatttctagattcccacctgcctccccggccttccttccacatcctggtggaaacaagccttctgtgaaggccgcatgctaatgagcctgccctgggcctgtatcccgcctctgcagcccagccatctgaatggggtatgtagggtaaaggaaggctagcatcgagttcctacaacttccactgtcttcccctagttaattttcacaaagtcagacttgtatgtgaaaaggggaaagagcaggccaccacacatggctgtgcatttgggcacagccctaaggcatacaacagagaagacagaggggaactgaagcccaacctgtgctcaccagttctgggagtgaggatggaggtggaagcccaagcagtgtcccctgagtccaagccacttgagaagctggccaaggcctgagcctggggctgcgtctacccaggattaccttttcctgaaacactttccaagatggagtgctactttctgatgcacacaaaggctctaggaacaaaaatctaggctggactgaaaaacagttcagtttgactttggaaatgctgcatggatatgtatcctaagctatgggggtagattgccagatctgatgtgtttctgtatggcaagagggctgtcttccttttttaatttttttcactttctgatgtcttaagagctgtaccttagtccattcaggcttctataacagaattccatagactgggtggcttataaaccaacagcaggaatttatttctcgtagttctaaaggctgggaagtccaagttcaaggtaccagcacattcggtggctggtgaggactcac

SEQ ID NO: 11629 - DNA, 6000 bp, Homo sapiens
tgtcctattttgcccctgcctaacacacagactgttcactggtggcctctgtccaatccccagccaggtgtctcctggctgcccaggatatcacccttgcactcacagggcctctgtcctccctcccctgcttgggcttcctaccacccctgccacactgacgggggccagcctccccaactctgggtattagaaggtgggattggcatggatttggttcttttaacaaacgatgccagggtttgaatggactgtgtgtgtgggagagtgaggagcagccagggagatagggaggaagagaggaagttccaagatcacacctccaacataacgcagagataccagtcatgtcctctgttcacaggactcattgcatttagtagaaactattttctcatcctttatctttttcctaactttgtgaagcagaaattctttgagctagaatactggttgcgaacctgtcaagaaatgtctctgttttctctggacagtttgcctgctgccctccgtatgctggtccctccctcccctgactcagggttgcagaggcagctatgccggggtcctgtgaactggctggtttgcacccccaccgacaccatgctgctgcccccagcagtgagttggaagtcaggctttgccctagactctactctttgctgccccttccagctgaggggggtaccttctgccccctacattctgtatgccctacttgtaaatgtccctggctgttgaggtgccaagagtcctgaacccagagagtctaccctactcttctctgttctagcatctggagctgggtcccacacagcctctggcatggagtgcatggagccaccatggaagctcacatccagaccctggtgctaggtccctacaagcaagccctgccccactgcctgcctgtctgggtgcttcctgggccaccctttctggctcagtgaacattgcctcctcctattgtccagggaacaggcagtgagactcccctggggctggccccttagactcctccgagtccgctgggttgtctttgcagggctgtgtcttttttaacatagtgacccaagtgatttcagcaagagtaggggccctggctgccaggctgagctgggaaagccacatcccagtgccagggttgggcagtcagggtggacagcaacagatgcaggatggagtgttttggtctcttcccagaggagtccccctcattgccctgaagtaacactcacttctctccatcaacaggtgactgaggaagtccaccggctgctgagaaggtgcccctaccactttgtgtgccgaggcaaagtcagtgtcaagggcaaaggcgagatgttgacatactttctagaaggcaggactgatggaaacggctcccaaatcaggtccctgggcttggatcggaaaatgtgtccatttgggagagctggccttcagggcagacgtccccccgtgtgccccatgcctggcgtctcagtcagggctgggctccctccacactccccaggccagtacctgccctctgcagcagctgggaaggaggcttagtggagcccacgtgggcctctggggtgcacatggggtgggaatgctccgggggtgacacaggccacggtggctccagccaggaccagccagaccagcagagcagggagccacttgccagggtggaggaggagcattgtccaggcatggcctgtggcccgagggccaaccaccgagcaggcacagcacagcagtgactcggtgaggggaggacacccgactgtgcacacttccaggcctccctggagaggtgtccactccatccttccctccgtggcgtagggagcactgtttctttccagcaagcctgttcaggtttggccaggtcggcatcaatgtaaggaccttcagagcatcccagggttacagcaagagccactgaggtgtggctggcagagcaactgaggagctctgcgagagtgtgccctctgagacagccctgtccgccccgcccaggtgggacctgacatacaggcggctccagccctgggcagcggcttcaagagccagagtgggaagtcaggcctctctgggaaggtcacaaggcctggggttgttcacaccacaggcacaatacagagctgtccactcttgaactggaccgtctggggagaattgagaagctgcctctcactgcatggatagtggtggctgctggctttcaagcgtggttttttgctaagagccagaggcaggtcttctggagttctcaggggggccctgtgaccccctctccacaaccatggccagcatcggcttcttgctgcacctgtgcattctccacccctccgccaatggcttccagctcctaaaacacctggacattccccatcctgcaccggcactgtgtttgttcagagaaaacgaagggtgtcatttcttcttttccctgtggcatcgtggatcctttacatttagcaacaacagtgtgaggctccacttctgttgaatatgagcggctgtcacacccatgagcaagtttccttgatggaagatgctgtttctccggcagaaccaaccctccaggacgaagtttcagaattggctgatggtcgtgagtgcaggtgtccctgttgtaatttgcagggaaattgactgcaggtgatagtgttgacgtctgacgtctgacaacctcctatgtgcatgtctaaatagtcacaatgaagatgaaaataaggatgatggggacggggtccaggagggccactgggaaggcactatccagaaatagtggacagaggtctggcatgtggaaaccttggatctcggtcacagggaggaaggcagctagaaatgggagggaagcttctgggtaggcaccatagtaggggaatgtctaaagacccactgctctgagatgtggtcagagaggtttctgtggactgcagatgaggcctgagccctgcctatgctcaaagccagcagggttgggggtccgcctcctcactgctcctcaacagctgtaaccctttcctgagggccccgacttttcagaataggagcagagagaagcccagacttccttccctggagtgtagacctgtgtgtgggacctgctccaggctgatccctgtccgcacaggtgggtgatgtccttggctgctgccgtcagaggcagccccctgcacagggaggggctgatcctgcctcagctgtgtggccatgtgggggcagcaggggcctgggccatagctgggggaggccagaccctgagggctttgcagggcggccagtgcagtgatgcctggcgcttccagctgagacaggagtccggacagaggtgggcagggtggatggcttcgggcagggaaggcgggtagaggctgcatgtgggggcccctgtctgcctgtccttagggtgtggattaggctctggcttctgtgatggtgcaagaggcaggatggtctccagacaccttcttgcagagtgattttgaccaatgcctttccagcaccttcccctggttatgacagggagctcccaggccaggccacatgaccccacaggtaggctgaccccatggacccactggagactttgagggcagagctcgggcacctttcatcttccttgggtggtcctcatgtcgctgtccgctcatgttcctggtgttctggcatcaccttgtgccggtgggggctgggctcccgtgaggtcctagggcagaaggaggtgcttgcagggcctctcgctgctactgggacatccacaggacctaatgtttatgtggaatctccaggctgccatcgagggctcctgagctcatcctgaggacccagggtccatctgagctggctgtgggctgagatcctggctggggccctgctgtcaacctctcctccaggccctgccttgtccctgctcctgtgctttcctctcttcaggacaaatggtttgtccttatggtcccctttccactaggattttctcatcctcatctgtctatcccagccggatttaaagcagtcacttcagacaggagccacagggagcctgtgagggagtagtgcggtggtggtgagtgtggctgccctggctcccccagctcaccgtggtgctgtccttgacccacgagctgttgagaagggtgcagagcccctggcacagccaaccctgttgcccccagtgccgctgcccagcttcggccatccaggtggtgggtagacagaggagtgaaccccaaaggtgtccatgccccagttctaagccctgtggccaggtgctgtcacacagcaaaggggactttgcaggtggaattagggttagggatctaaggatgggaggggaacttggtttatctgggtgggctcagtgaccccttggaatggctgagggaggcaggagagcctggaaagattcgaagtgtcacagagatggtgccgtcattgctggcttaaagacaaggggccaggagccaacaccagaggccactccacaaccccagcgccagtcagcaaggaagccgggtgtcgctcacacaaccagaaggagctgagtttggcaacaacccaagtgagcctgaagcagattcgccccagagcctccaggcgtgagtggagcccagtccagcgacaccttggtttggcctgtgagactgagaagagagccagccacgccatgctgtgcctggggtccacagagccgggaggtcacacatgtacatcctggaagctgcccaaggtgtggccacttgtagggcagtgagaggaagccgtcgcggggaccatgctgccttctctgggctcacgactgttctggaaaggaccccatggcagacttggcaaggtctccacttcaggggcaaacatctccatcatcagcaactccaaaccccagccacttcctgggagttcaggaactgtgtttagccataatgtcccttggggtttggtgaaaaacaacttcctttttatttgtgggaaaactgtattatattgccttatttatttttaatcatgtacaatattcatgtacaaatgttagagccattcgggtaggattctctctaaattatttattgaagaggctttgtaaatagtgcaccagtgacaggtgctgcctgtttactcgtaccaaaaatgaagacaagccccacacccacctcagcccttgcttggccatgctgtggccctttggaaatgaccctgtgtgctcccctcgcgacccttgcatgcctttcatgcctgatgccgtagagtagaacacagccccggaatgcttccagttgcttgcaagggaccatgccggcccgggtggtccatgcctgcggggtgtctgtatcctgcaggaggacgcccctacagacccagcaacccaagttgccagcccgtgtttctcagactttaaagccaccagggcttctggaacacctgtcatagaagcaataactctaactctatactgtagagatgagtctggtccgaagcagattagtaatttagagataagccatgcatacaagtttgccccattctctggcttggggtggtgggaggcggggagctgccactcccaaagcctccaccccttcctgaagacccagctatgaaaccgcagttcctgtgggttgggctgcccaggctggtcagagctcagcaccccaggtctggtgagcagacagagccggcgttaaaccccgatcaggtcattgtcaccacacccttgcttggatgaggaaggaaggaggcaaaggcacccactccatccaagatccgttccaattgatgagcctcagtactggcctcacactgaccaacggtggtatgctgcagtttgttggtttggtgcagagtctaaaggataacatatcaaggcttacctgtgataggccattttaaggaaatggtggcactctgaaggctgtccccattcaccttccacaatgctggtaccatcctggtagaagagccctctgaacaggacacctgttcaggcctgggggcccc

SEQ ID NO: 11630 - DNA, 6000 bp, Homo sapiens
gctcactgcaacctccacctcccgagttcaagcgattctcctgcctcagccccccgagtagctgggattacaggaacgcaccaccacgtccagctaatttttgtatttttagtagagatgggtttcaccatgttggccaggatggtctcgatctccttacctcgtgatctgcccgccttggcctcccaaccctctgtgtatctctgtatattcccctctccttataaggacaccagccactggattcatcctaatctagtatttcttcttatggcagcaggaagaagtgttgagcaaaagggggaaaacctcttataaaagcatcagatcttgtgagaactcactattataagaacatcatgagggtaactgcccccatgattcagttacctcccactgggtccctcccatgacatgtggggattatgggaattaaaattcaagatgagattttggtggggacacagcaagaccgtatcaaccttcttccctctgtgtgtgtctgggcattcccctcttcttacaaagacagcagccattggattcatcctaatctagtagacctcatcttaacttaattacatcaacaaggactacatttccaaataagatcacattctgaggttctaggtggacatgtgctttgaagggacaccatgcaaccactgcaaactctgttctgtctgacttcagagtcatgttctcttcactgccttttacagacttgagcatggagggtctttgatagaggcatgcccaggctggaggaacgaagcgaaatggggggcaaactagatctgtgagctgggagaaaattccaccaggagggtgatgtttggctttgttgatgttctttatgttatttggcatgtaaactttcttgatggtggtgtcttcattgggggttataccttttatcaaaatcaaataatcttccggcccactaaatgatttttgtttctctatcctctggatagtaacctggatagttcatattttctctttttgttttcccaatatatcttggggcatcttttaatttgtctgggttactgggttatatgcatgctttgtacaaatgtatagagtagcattttctgccccattgtgagctttttgcctttggatcagagagagagggagtattggagggagggaggtctctgaggttgtggaagagacaggggaccagagtccaggataatgagatgggcacaagggactttattcattctgggctcagtgtgaggcctttggtgtatgttctgtcctttcatcttcatggtttccctgtgcagtaagtgtgattgtccccatctgactgcgttggaaactgaggcttcaagaagtgctaaggagcttcctctgtggtcacgtggctcatttgtggcataggggattatgtcactatgccatcctacctctactttccaccttcaccaagagaggaatcaggggatgagggtaggcgtgaaaaagatcaagattaggacattgacctatgaagaccctcttggttgcaagtgacagaaaacccgtttaacctagctgaagcacagaagggaagacgcagaaatttattagcgcttataactgagaagttcagagttgcctctggctttagataaggccacactcaggagtttaagcaatgggactctgccctccagtctgtcctgtagacaggctgtctccagtgtgatagataagacagcagtagattttcacccctggagaaagagggttttccttgacagttcccttagagatgtcctaggaaagtctctggtttggtttgaggcacatgcctgtctgaacccatcccaggggatgggggcctacagttggtgactgggctggtctgcatcacatgcccacttggaggaagtagtagggtcaccctgatccccatgggttggggttcacacagagaagaggggattggtttccatgaggaggagaatgggatgctggacagatgagaaccacagatgcccagagattgtagtggtctctccaggagactagatagtttcagcacagaaatgcataaaggcaaggaaaagcaggaaccatgggaccagctattgggaatgcccaaagttgccaggtttgaggagctgtcagaggtagaagaaaccaaaagcgggcccagttgaaataaacacagtgttattcaacaatgttaagtaccaggggcaactccagacaccaactctgggcactctctagtctaagactgtgatcctgatggaaggtttctcagtcagcccaggtgaggtggtaggatcacttgaggccaggagttggagaccaacctggctaacatagtgagactgtttctataatttttttaaagaatgtcatttagctagaaggatttggcttactttaatttcaactcatgtgcagacaggaaaatagcccatttcctggaatctgcaaacatccagatgcatgagccagagaaaggaatttcaaaacggctgctgcatctttcactggatttgtttctcatgtgctatgatgtcccagagagtgcagcaggatccatgggcggcttctccatccagctctaatgagcatcatgtagaaaggcatcatcccttattatttgttatctctgacacctctcactttttcctttgtgatcatatcactgaattgagccctctctgaagtctactgcagtagcaacgtgcccctgtttccttaacgctggaaaatcgtgttggttttgaatttgggagacaatgatatatatttccagatatcagaaaaatccattttgacctaaccacctcccagtgtgggaacaatttatggttttctacttgatgttttgaaaattcatttggaaatagaaaaagtgacccatagatttcaggttagtgtcgtgggatgaagatgagctcacctgctggagacaattctcttctggaaaaaatccgattccctctcatccctactagggcccaggtcacaggttgcttctatgtgttaactctttcttcctcaatgttctccaagcctctccttgctgatcaatgacaacgccacccccttgggctcctgtgccatccctgaatcttgctttcatggggacaaatcctacaagcatccacatgcttaaggacgctgcatgaaatcccaaaacccattcagtgtgatgctttcttttgtgaacgaaaaagctcagacaaaagcatgttcatcctaatgacgactggcaggtttgtgcctcctgacgacgagagccactctgcagcccaccttatttccagtgcagtttagcaaacatctggggtttgagatgcaaccagatgggaaccttttagcctggtgggagaagaagtaatcgaatttacacagcagaatgaaggaacagcagtgaaggaagagtagcaatgcagagagagaagggaaaaggagagggccatgttattctttgcccccgcaaggctagcccagcatttagcactgtgtcaggcacatagcagatgcccattccgtatttgttgaatgagtgaatggaagggcttctgcctgtttagacaaccagtgtgtgtatgttccaaaaggaaaatcctgcataagggcagaggagggaggaatattgtgcagatgggttgagggctgaagaatgtcctcaggacatcctgagtcctatggactcaggactggggtccatctcaagggagggctgtgggtggggggatgtctgcttctatggggagggtcaggtttcaggtgaagcagatatggtagggggaggttactgagaaaaggctaaagcctcagagaagttacctgctgtgggaaggtctcagaggctacctggaaatggtttgccaggaggaaagggatggagaattcgctaggagggaaggagtgctaggcaatgtgggggtgaaggctcaagaaaggaccgaaggcaggaggggttctgagagtgagcaggacatatagagggtggtggcttagctgggggatctgctcagagccaaggtgggaccagaacacatgccccactgccactcgttttttaattttagagacagggtcttgctctgttacccatgcaggagtgccatggtgtgatcatagctcgtggtaacctcaaactcctagggtcaagtgatcctcctgcctcagccccccccaagtagctgggactgtaggtgtgggccaccatgcctggctaattaaaaaaaaaatttgtgtgtagatggagtcttgctgtacacctttcccaggttcttttcaaactcctaggctcaagggatcctcttgcttcagcgcttggattacaggcatgaaccactgtgcccagctctccctgcttttattttatttttttgtggttcaaatttttgtcttggtttaattatgttgattatattgattttattgtattacagcaacctgcaaattattctcatacctacatagaaataaataaaaataatagttaaaaaaatagtagactctccaagcttagaaagccaggctgtcttctctctctgggagtcagcatcagtggacactcaggtaagatttaaagaaaatctattccagatgatatggtttggctgtgtccccatccaaatcttatcttaaattgtagtttctatattctccacctgttgtgggagggacctggtgggaggtaattgaatcatgggggcagttactcccatgctgccgttcttgtgagtgagttctcatgagatctgatgtttttgtttgttttgagacagagtgtagctctgtcacccaggctggagtgtagtggtgaagggtgaagccagctggacttcctgggtcgagtggggacttggagaacttttctgtcttacaaagggattgtaaaatgcacccatcagtgctctgtagctgcaagaggtttgtaaaacgcaccattcagcactctgtaaaatagaccaatcaacactctgtaaaatggaccaatcagcactctgtataatggaccaatcagcaggacatgggcggggacaaataagggaataaaagctggcggcagggaagcccgcagctgcaaccggctctggttcttttcggtgctgtggaagctttgttttttcgctcttcacagtaaatcttgctgctgtatattctttgggtccacgccgcctttgagatgtaacactcataacactcaccctgaaagtccgtggcttcattcttgaagtcagcgagaccacgaacccaccggaaggaaccaactctggacacagtggcatgatctcggctctctgcagcctctgcctcttgggttcaaacgattctcctgcctcagcctcccaagtagctgggactacaggtgtgtgctagcacacccggctaagttttgtatgtttagtagaaacgggtttcaccatattggccaggctggtcttgaactccagacctcaactgatccaccggcctcagcaccccaaagtgctgggattacaggcgtgagccaccacaccaggctgagatctgacggttttataaggggcttttcccccttctgcttggcacttctccttagtgccaccatgtgaagaaggatgtgtttgcttttccctccgccatgattgtaagtttcctgaggcctcccagccctgcagaactgtgagtctcttaaaccacattcctttataaattacccagtcttgactatgtctttagtagcagcgcgagaacagaccaatacaccaaagtatttccttaagaagttctagaggcagggttctataagctttcatagctggaagattctcttctatgtaactgctgttgtttaaattcattttctttcagtccttggtggagatgctttaaaatcattgcatttgtttttgtgaaaggaagttctgagcttttttttttttcttccataagtgagttaactgatgggtataaaaaacttacaggactcaactggtggggtggcatccaaggtgttatggggcctgaagcttacacaatttt

SEQ ID NO: 11631 - DNA, 6000 bp, Homo sapiens
tgccttttctgggtggagtttccaagggaacacagctttataaacacaagggattaattatagatgctctggggacttgctctaatgttctaaactgtttactgaagaggcttcttatatctcagtctaatgcaggctttgcaaaaagcttagtctctgtttctactgggttcccaatatagtgggagggtattttgcttaaaagttcattacagaaacactgttgacctgataaccaaaaaaaaaaaaaagttatatttttcctccctctttcaaagatgacccaacggaatagggtccactcatgaattctacaaaaggaataggatttataatctataaactggacagaaggcaactgagctgcctatagaatcaagaaaggcatgtaattagttgcctattaaaacacgtcttcttattttccctttcttctttatacaagtctcaattagttttctgtatcttggctttctaaatttaagtattttaagcaggaagtaaattattaccgatacagtatcaatatcttgtctgtttcttataaaggacaagtaacaattagtaaagaataaaatttaatctacaattagcaaatgaaattaattacctattttcatatataaggagttgtgttattaagaaaactgagtaagcataacccaaatttttttatgctttagacagctaaatttggtggaatggtggagacaaactacattctttctctgaagataaatataggtggaaaagctgtgtgactacatgtgctatttaacatgaacttttctcttttgtatttggtgcacgtcttacgtagtatgggtggttctcctttgcctcaggtgaataaaactaattataattttgtcatatgcagcttaaggatagagtatgattataataacaatacttcattactcatggtgtcaaggcaccgagtgataataaatgaacccaactagtgtcacgtattttgcctattcttaggaaaaaggtagaaacttaaagtaataagaggcaatcaatcagttgaaaatttgaacaaatagacaagttcagtttgtctagctcttttttcaaaatatcagcacatggattgaagttttgttagattaatacttgtaattttgcttgtatatcatcctgaccaatgttagattgagaactgtctaaccatagaattcaacagaataaattacttgatacttctgttttctaatgtatgtgactctacagcagtgggatgtgtacactatctcacttcagttttaagttcaaagcagacagagctaggcagtacccaggcctgtccattgctcaacatatctaggctcagagtccatagaagttatactaatcagttttcaggtctagagagggagccattggagcgcatgcactactccctggtttcttcagtggttactgttggaactctttaccccttgcagaaactcttctctgtagtgcatggagctacttgattgaataaagaagaatgatttgggaaaaggccagatagattcacaactaggttgtggcatagaatctggagaagggctaatatatgcacatatacctattctaacagcaatagagttataattttaaatcattttgtatcacatttgtcagagttgcaaatgacattaatattgaatgagtaatttttagtgaagtttatgtggaacataaaataacttttccagagagataacttaatccttgagttatacatgttttaaatagattttcatactatattaacaaaactggaatgtgacactgggggtttcctgctgcattttttatgtgggctcataaagctgtgggtttctacagaggttctcctagagcttcctaacagtgaggataaagagtgtcaggcaggaacaggaagacaaagttaagaaacagagtctctgggtttcttaactgctgtggaatcagtcattttacctaatgcacttccacgtaagaattgaaaaaccagttcagccgcttaaattaaaaaatgctgatctcattttatcatctcattttacgcatgaggaaattgaggtgtagagagattatgtggcttgtctgctttcatttagcaagacagtgacaaatcagtctttggtttaatcttgtcccttcatctcaattgaaccagctgggatcgctatattttaattgcttcgttaagtataacttgcagaaaatatttggggatggtctatgaaatgggcattcaataaaatattatgtacctaataaactaccctaaatctcattatcagttcacaacatacagaacaccagcatgacattctctagttggcgattactgtggttgcttaaaagatggtttcaagaaaagtttcaagtgctttacaattatgcattgcaaaggaaattctatttgacaatatccagtcctgattaccagcattaaattactcattccattgcattaggacagccatggacaaagccatatgaggtagcatggtatacgatttccaagggcagggaaagctattgttaccactccaccctgaacaattaataaaaagccagccctacttgctcagtgagacagaaaattccacaggaaaaacaaatcacttgtttagacttatgtgcattccctttacattggagaaaaatgacactaaagaactagtcagtcttcttaatcaccaagaccttgatgtaaatgaagtttattgcatcctatggtttatactggaaagtatcctatgtataagggaataggcaaaggggaatcccaaaggttaagggaacatatgtaaataataaaattgccaagaaaaatatttgtaacatttattcctacattttgggggaaaatatcattttcttattcttttcttagctctacaggtaatatttttgaaaaactatatgattactaaagtggaagtaaatactaataaaatcataagagtggtacctctgttgcaagacagctgtggagggaaaacctgaaattataacaaaccacaattattaatacacttacaacattaacaacaatattctatgtgcccttttttgactgtagccttcattccgttggcacatatgttttctttggccatgagcatttcaaagtagagaataattgtttataaactataaagcgcattctgactataaatgacacgccaaccccattattgacaaaatgtcattgcaacaacaaagaagttcaaataaatgtgttttcaaatactagttagaattaactctgattattacagtaggatccactcatttcacaaactgtattctttcttccaatctttttttttttttttgagatggagtttcactcttgttgcccaggctggagtgcaatggcatgatctcggctcaccgcaacctccgcctcctgggttcaagcgattctcctgcctcagcctccggagtagctgggattacaagcatgtgccaccaagcccggctaactttgtatgtttagtagagatggggtttctctgtgttggtcgggctggtctcaaactcccaacctcaggtgatccacccgcctcagccttccaaagtgctaggatgacaggtgtgagccaccacgcccggctctcccaatctttatataataatcacatactatggctgggcatggtggctcacgcctgtcatcccagcactttgggaggctgaggtgggtggatcacgaggtcaggagttcgagaccagcctgaccaacatggtgaaaccccatctctactgaaaatacaaaaattaaccaggcatggtggcgtgcacctgtaatcccagctacacaggaggctgagtcaggagaattgcttgaacccaggaggcagaggttgcagtgagccgagatcgtgccactgcactccagcctgggtgacagagaaagactccgtctcaaaaaataataataatcacatactttatgaagacaccaaacattagattgacaaatatatactaacacaaactacctaattttaacagaattagcatgaatcaactgcaaatgacaaactatattgtagttgaatgtgtagggaaaaaattcttcagtaagagagcaatgccatggttgaaacaagacatcctctacattttatatttgcttcaaattctttatacctgtagtctatccaaagtcatcaataaaactgaaagtaagatactcttattttaaaaattccatgttttaaacagtttttaggacaagccattcaggcctgaactcagtattcatgaaaattagactttcttttaacagttattttaagtatggtgatattagagagtgtcccagtataaaatttctgagaatttttttctatttacccatgcttttcttattttcacagatagctttccaatgattagacgaattgattctttctgtgactcatcagttcatttcctgtaaaattcatgtcttgctgttgatttgtgaataaggtatcgtaaataaaacatctgttaccatacttgcttatcatttaatggaaaacacatcagtcaacccacattctgttcgcaggagagctccagaaggggtgtggaaggttgtgttgggtggagaaaccagatagtgaggatgcaactaagttgctgagacaagggaagagagatgagggtgagagttctccttagataagatttcaatatgttaatcatgtgtagaaagaaaattaaaaaggaggaatatgaagaaattcagatatgacattattagttctgccactggtaggcattagaagcaagaaaagggagacggaccgaggaagccactttggtgaaacaaaaagaaaagcatttgtttatttagaacgggcaaaatgatacgtttcagtgggtgttttctttgtactttgatctttttgtactgatatttaagcttctgttttatgatctctttctaatgatagaaccagagcttgtagaaaccactttaatcatatccaggagtttgcaagaaacaggtgcttaacactaattcacctcctgaacaagaaaaatgggctgtgaccggaactgtgggctcatcgctggggctgtcattggtgctgtcctggctgtgtttggaggtattctaatgccagttggagacctgcttatccagaagacaattaaaaaggtacaagtagtccaaagaatatgccttctcattttgattgattctaacttctctttttttgctttgtatttacctgctttatatttcatggtaactgctaattttgtatctttgacataaaggtaattatgaaccactgcaactctatatgatgcgactttatgtgaaatgttataagtataatgtatatttaacatgactccattgctgtcttaaatataaataccaaattctattaaaagctgtctacaggtatgcatgttagtagaaataattgttttaagttatgtccaaagagcatgttggcatgcttttgagtaggaaataagtgagtatattttgtaaaagcacatttataaaagaagttgcactttagttaatactgagaaaagtaaaactgtgtgtgtgtgtgtgtgtgtgtgtaatgtgtttaatattgaaacataaatccttattaaattgtaggtaaacttgtttggtaatacactgtttagtaatccactatttttatatatgtgtaataatctcatctcataaatattttctatttgtgaagcttcatattggaatcttagaaaatactttcagaaatatgcagaacatgtcttagtataaaacaaattgactgtagtgtgaaaaaacagaatgattgaatagatgggctttgcacaacaacctagaattcatctcccaccctagcttattcgaattagctacacactcactcatcagaaacgttgattgatagggggaagaagagaataaagggaagcagttctgctgaagttctaaatcagggatggcaaattcaaatggctgcaggagtttggatacaggggttaaac

SEQ ID NO: 11632 - DNA, 6000 bp, Homo sapiens
tataggcaagagccactgcacctggcttgattacatttcaacatgagatgtggacagggatgaatatccaaactatataattccacccctgccccctcacgcaaatctcatgtccttctcacattgcaaaatacaatcatgcctttccaacagtaccccaaagtctttttttttttagatggagtttcactcttgttgcccaggctggagtacaatggtgccatctcagctcactgtaacctccgcctcccaggttcaagccattctcctgcctcagcctcccaaatagctgggattacaggcgtccgccaccatgcccggctaattttttttttttttttttttgtatttttagtagagacgagttttcgccatgttggccaggctggtctcaaactcctgacctcaggtgatctgcccgcctcggcctctcaaagtgctgggattacaggcgtgagccaccacgcccacccccacagtcttaactcattacagcattttggtcacaaccatcgaacaagtctctaagaagttccaaactttccctcatcttactgtcttcttccatgccccccaaacgcttccaagctctgaccgttggggccctagatctcctcaaccagcatatccagcctcaggtccacaggtccaaaccccaccacacacatgcccttagctgttcacaagcaccttcgtgcttaccagaaccgagccagccagctgcccaccccttcccccacagggggccaggcccgggcctccccacctgggttctgtacagcgatggggtccacagctctctctccagctccttctgtgtcctcgccccagagccctgtactccagaggttgaagaacttgccgaagatcgtgaaattcataaaaggcagggccagaatgcaagcccggttctggacttgacatcaagtggccaccagagatgtcaccccagcttccccacctgcgtgttccagcctccagcagagaaggcagggtgaggcagccggtgggggataggggaccctcccgtggccggtgaggccctgtccttctctaagtacatctaactgaggcccctctctggtggaagcccgcacagccagtctcctggccttcgcttcctcccagcgtggagtgacagtttcaaagcacagctctggttgctgctgggatccagctgggctctgggacagtgtccagatcctgtcccctgcagcctccagttctctgtccacccccctctacccacagccttccctccagtctcaccgtctgccagcctctgctgccctgtcttacccagcctgttctctctgcctcaccagcagccatcccccaattctgctgcccgtgcaactggcctgtgctcctatcaccccaagccacctcttcagggatggcctcccccaaccactcagccctgcaccctcagatcccctcaggagctaacccagtgcccagagcatctgcagcagcgccaatggccaggcctccaggccagcttaacacatgggccttttccaggatagcgggccaccagcttggaactggggcagcctaggatagagggtttgcagccaggatgctcacacctgcacagaatgtcacctacatacacggcaggactgtgtgcccacccctgcagtagcagacacaggaacaagtgcacggggaccaggcccacgcaccccatcatctccctggtgcccacggatggtgctgggagctgcaagttgctgccaccccagggacctgaccaagaccacactggggtggtcacagactgggggcagataaaacaggcagtgcaaggaatcatctcagcagctttttatccacccctcttgccaggcgcacacctccagggaaaagggctcactctggccaggcaaaagtcacctctgcaaaggttctccatctcagccctgtctctctgtcccccaggccctcatccctgaggtggaatgtggcttccctgagccttgttggagcttaacgccctctttttatcccaggagtctgtccccatggtcccagcacggttcttggatgtgctcctgtttgtggccaaactgaagcatcccctcccttggtccaggaccttcacctctattaatgtgacccaaggccccattagctttctggtggtttcctctccctacatctcacaaccgctgtccacctcccatcctaagcatgagtggccggctctgccatcccatcccacaggccaggacccaaggactctgtactcaggccaggagggcatggtatttatcgtctctctggacctctcccctttggggtctccttaaagtccctgcaggtggcccagggccagccccaaccctgcccccgacagtcctccctccaaggccgggtcctgccttcaggtcctgcctcttccctcatcccctcctcacttccgcagataccaccttcctgccagggacccaggggctcagtgaatgtctgaaggaagaaatccatttaggggcccagtgcggtggctcacgcctgtaatcccagcacattgggaggttgaggcggacagatcacttgaggttgagaccaacctggacaacattgctaaaccccgtctctactaaaaatacaaaaattaactgggcacggtggcaggcgcctgtaatcccagctactcaggaggttgaggcaggaaaattgcttgaaccttggaggcggaggttgcagtgagccgagatggagccactgcactccagcctgggtgactgagtgagactctgtctcaataaaataaaataaaataaatccattcggggcctgaacgaggcgagactctggtgtgagcaagggcttagacagagctgggggtggatgccttgggtttggtcccaggtcgggaagcctccgttctttgactgtaaaatgtgaatcgtcttttctgactcatctataaggacttggtgtgcagtgggaacccaggagcatgtggaggtgaggctgggctgccccatcctggcccaggacactgagcccagccagggcaggtatgacagccggtcagcaggccgcgcagtcagggatgagtccacggaggaggccgcacataccatttccctggcactgcccacagcctgcagcctttgtgcatttctgaggccacagtgccccctggcggctgtgcagcctaccccaaaggacagcgtcctgggtctcaggcctcagtctccctctctgcggccccaacagctcaccctaaacaaggtttattgttaccatgttacatgtcaccatttgggaccagaaagggggatccagtggccctgagccgcacagtcaaccagaaacagggccaaacctcaccctcagggctgcctggctcctgggtcactgaagtcctgcctggcaatgcgtgcttgggtctgggtcccttccccgacatctctcaccctcctgcagggcaggaaagtcacagtttggatgctttgttataaagatgaccctggcacctggaggagggagagacagacagggctgtgggtcgggggactccttggggaccacgccaccccaaccactgcagctggagcctctgttgggggcgggaccaagcacctctgttgtcagcccagaggtggcacccctacgcgctccactgcacccccgcggctttctctgcctctcctacccccaggcttcccactggacattatcccagaacatcagctaggaagcaacctgagcctccttgcccctgcctgacaagcaaagtgaggcccagagagggaaaggggctggccagggccccccaaacagccgtgggcagagccacgttgcaccggtttctcctaatccctgacctgagctccttctcctacccaggggatttcatcaatccagagagtgcttggggccaggagtgcctctgacagtcagggagggcttcctggaggaggccctaggtctaatggggtcttctaggcagtggtgagttgggagggaatagccagcactctcacagcatccaggcagccctgcttccagaccgtgggttggagaggcagaaccaggggagggcaccaagggtcccaccaggctccctctgacggccatgtcttcctttggccacaggacgctgtgcagagctgcaagtccgtatcactgaggctgtggccacagccactgagcagagagagctgatcgcccgcctggagcaggacctgagcatcattcagtccatccagcggcccgatgccgaggtgagcccacccccctgccccatgcccatctcgctacctgcccaactgacttagcctctgcaaacactgacttcccagattagcctgtgtatcaggcagctggtgacaacccagaagggctgtcacctaaaaccattgggttctccctgcttactccatgaataccaccctgcctccgatttggggtgacaggccatggggcagaggccacagggcttcctagcggtagcacagaggcccgtctttccaggcactgccctgagagcagaggcagaggcaaggccaggaccatgcacccatctcccagctaaaggacctggagcccagagatcacagcaggctgggacataaacagcccagggagagcatctcctcgcccacctcccattctgtagagtccacagtgggactccgggagagaagtctgggctgtcccaggtcacgtggcaggctggttgcagggccagggaggcccaggtgtctgatgcatgtcaaagctgagtggctgcgaggagagctgcactgctgctgaactctggcctcaggagtgacttagggcccagccatctcttctttggtagctcatgtcacgtgtccaggtccgggccctcctgcagccagcctgcaccccggatggccccacccactccttgccacacccaccctgccatttgccttggccatgctgaaagggaatattccgtgcccattgtgcggaggcacctcctcatcgcttcctgtcacctgcagggtgccgctgagcaccgcctggagaagatcccagagcccatcaaagaggccactgccctattctacggtaaggagaggcctgacccatgggaggagggaggaggagggaagaggagacaggtgataccgcctaagaacacagatccccaaagagtagtcccttcctctaagaaggtcaggcccccacgcctgcaatgcagcagcaaccttcaaagggtcgggtaaggctaggtgtggtggcgcacacctatagtcccagctactttggaggccgaggtgggaggatcgcctgagcccaggaattggaggctgcagtgagctatgatggtgccactgcactccagcctgggcgacagaccgagaccctgtctctaaaaaacaaaaaggtgaatgagccctcaacctgcctttctggatcttagactgacaccccccaccttggggccctgacccttcagccctgccggtggcctgtgaaaggctggtgagtggtggtcagccaggcctcactgccaaagtgcagccggaggtccgtgcagtgaggggaaggcagcctccttgggtattgaggacagaaactgaggctgctggactgggatactgggggtgtgcccatgcctccccagttcccctcctgcccctttgcttccccaggggatataggcctagtctgacagctgcaagggtctcagattcaaggacagagtgactgggaggggagttctgggcctggccctctgacagcgcagacgggggtgctgggcccttccccagcgtgcgtattgtcaggtcagcccctgccatccattctcacgctccccggttcccctggctgtcccctccccttccccgacctgcccagcaccagggagtcagacaccatgtggcttctaccccatggcatttggcagaaatcccccagggctgggggacccaccccaaagggccgcctgctgggttccacctcctgccaccccccaagccaccctcctctacctgctaggacctg

SEQ ID NO: 11633 - DNA, 6000 bp, Homo sapiens
gatgtaacttcctagggaaaaagtatgaagcacaaggctggacatagacctgggaatcaggaaattagagttctaattgcagcttttccattgattcacttgggatcttgagaatatctgtctcattttaatcattctgggccacagtttccatatctgtcaattagagtaagagtccctggctgggtgcccaggattgtgagaacataccattcagagccataaaaatgcaatcagtaccaataatgtactagtaccagtacctaggatgcaaaacatcctagatactaggtgtcctaacttaaagtggaaacattaacaagagtaattctttgaatcatcaaactgggaatattttaggaagcatatctatctgggtgaaaactaagcaaataagacaattgtaaaggcttgtgatctcaggaatacaaaggcaaaaatgcgcagacttgaaatatgacaagttctagttttgtcacttagcatctctgtgaccttggataatttcttaacccccggcagtattctcatctgtaaaatgggaataatgacatgcacttcagtggtttgtggtgaagattattacaaatagaaattagctcttttgagccactggtggggtttaaattcccagcccttatgtgctttgcagctgttagttcctcttattacaattgtctatttaaaaacctagtcacagcccggtgcagtagctcacgtctgtaatcccaacactttgggaggccaaggcaggagaactgcttgagctcaggcgttcaacatcagcctaggcaacatagtgagaccctctcatctctacaaaaagcaaaaaattagccagtgatgcatggctgtagtcccagctattctgagggctgaagttggaggattgcttgagcccaggaggtcaaggctgcagtgggcagtgatcatgccgctgcactctagcctggatgacagagcaagaacctgtctccaaaaaaagaaaggaaggaaggaaggaaggaaggaaggaggaaagaaaagaaagaaagaaagaaagaaagaaagaaagaaagagagagagagagagagagagagagaaagaaagaaagaaagaaagaaagaaagaaagaaagaaagaaagaaagaaagaaagaaagagaaagaaagaaagaagggagggagggagggagaggagagaaagaaaaaggaaggaaggaaggaagagagagagagagagagaaagacctagtcaccaaaagcaagagattttttaaatgctactattttttgggcatttactaatcatattgctatgctctgcacccaagctaagtaatttaaataaattatctcatgtactcctctaaaactaattactgctgtgtaaatggaggtagaaagaaactaagctttatttctgcctctattgtttctttaacctgccttgcttcctttttcagttgcacctaattggctgtacttttagttttctttaaaactgccttaaatttcaaagactaaagcagcaataactaactgaatatatttatataacatgttatttttgtcatgttgctttccacccctggagacctgctctaaattcacttggacgtttgaggataaatcatgctcactagcagtttctgaaaatgcagtttcactgaaaatgcaggcatccagaaatttagtaagcaacttaaaagaaagtgtaagaatctcctatgtattcattgaaaaataatttgaatttatgcttagaaaaatagaattattattaagaaatcttacacactcatgtttttaaatatcttcactaaggaccaattgtgtatatggtgtaacactgtcctcaaagaacatgccgggagaattgttgcagttaccagagggttaaatttggcaaactcttttttattaacgtgccttttaattatgaaatagcatactcaccttagataaaatttgaaaaccatttttgtaaagtggtacaatattgaagaaagttgataactttcagaccagatttaagcctcaaatctacctctcttttacctggacaactcattagcatttctgaacctcacattttttctataaagtgagaatactatattatagagttgttgtcagttaaatgagaacagtgtctgatcacaactagtcaacaaatgttcacaactcttcccctcctaggaaaagaatctcaaggcagacctgcttcgggtctgctctgtaaagaggtaggaatcctctgctcccggtaaattgcttcctaaccttctttggtaatagactattttttaataaaggtgatggatcatttcccattatacactcaaaatgtgtgtccatttcagggcagtcatggatgaccattgcccatcttttgaccccagattaagaacacctgctgtagtattttaattctgccttcaaatcctcttacaaaacaaagacatctttaaaaaataaaattctttaggtgtcttgcagttgaatgcaggaaaaccagagccccttatttttgatagttttgggaagaatgcagtgtcagaacacaaacccataatagacaaataatttgcacagaaacttcataaaagtattgacctgatttgccatgtatttgccaccttttaaaacacacaactaaatgtttaccctgtgtctagatccaaatgggtgaagaaaaatgagtgacaatacatctacttaagctcacttacataattgtggccatgccgtttttttcacattacattattagaacattggacaataagtcaagaaacagaatgttctacaaaataaactttaaaaattggtaagcatcatgtgctttttccagaagacattttattttgttgaatcaaaggtggctctttggcactgagtagctccgtggagtcatggcagtcctcattccctaatcctgagcctgcctgagtcgctgctgtcagtcatccacttgttgggatttcaaactgcattaaatcccctcctatagctgtcactgccaagcagttgcactggctctgtcctacctttctgttggtaattctgtttttaatcctgtgcttcagtgtagtttatataaatctttacagagggataaaacttcctgtaattaattgtttgggtgaacatgtacctgggagagctattgggaaaggggccaaatttgcattccagctcctttcatccccacccttgagctaaccaagtcctgtggattcttcccttagcatctctggaaccttcttttcttttcttttttttatgaccacctttccagtcctggcccttcaaacttgagtgacagcaacagtctccctgccttgagtctctttcctccttctcccagtgtgcatacggttgtcaaactcatcttgataaactactgcatcgattgtggctacactcccctgctcccacatcttccatagaccccactgtctgtaaaataatattcagtctggcctcaacctgtctttccagcctcggtgacacaggtctattctgcctgagacacttactatgacacccttgcttgttcctggggctttgacacatttccaacgtcccattgttcttcctctccaaatcagccaattgcccaagccctgctcaaatctcccacctcatgaagccttcttgatgcctcccagcacaccatgatctaatttcctgaagtaattatgctaattgggcatttgaagaattgttaaccgattatcaactaactgccccttaacattgcatgtgtagttgtcttcaaaggcagttaaattatgtcatgttccttacattgtactgagtgcctcgtatccttatccatgtttgggggttttactttaagtcaagaaatttaatcacatccatttggttttctctagagctgtagttctcaaccttttgtgtggtagagaaacacctagagaacatgtttaaaaatatcctgggttccacccttgagagataataaggtccaaggggaacccaaatatctgtgtttcaggtcagcttattggctcatcctattataccaactcctcagaaggccaaggtgggtggattccttgatctcaggcgttcaagaccagcctgggcaatatcgtgagactccatctcttaaaaaaaaaaaaaaaaaggattagccaagtgtggtggcatgaacctgtggtcccagctacttaagaggctgaggcagacagattgcttgagcctgggaagtcgaagctgcagtgagccatgatcatgccactgcactccagcctgggtgacagagcaagaccctgtctcaaaaaaataaaaatgaaaaaaatctgtgttcccaagttccaagtgatgctgatgctgctggttgcctttaagcatctcacaaagaacgaactcataaatgctaatacagtatatgtctatggatactgaatagtgggttttttttctcttttcttctattctgtgctcatgttgtgtcacttcttccttttagattgactttgaagatgtgattgcagaaccagaagggacacacagttttgacggcatttggaaggccagcttcaccaccttcactgtgacgaaatactggttttaccgcttgctgtctgccctctttggcatcccgatggcactcatctggggcatttacttcgccattctctctttcctgcacatctgggcagttgtaccatgcattaagagcttcctgattgagattcagtgcatcagccgtgtctattccatctacgtccacaccgtctgtgacccactctttgaagctgttgggaaaatattcagcaatgtccgcatcaacttgcagaaagaaatataaatgacatttcaaggatagaagtatacctgattttttttccttttaattttcctggtgccaatttcaagttccaagttgctaatacagcaacaatttatgaattgaattatcttggttgaaaataaaaagatcactttctcagttttcataagtattatgtctcttctgagctatttcatctatttttggcagtctgaatttttaaaacccatttaaatttttttccttacctttttatttgcatgtggatcaaccatcgctttattggctgagatatgaacatattgttgaaaggtaatttgagagaaatatgaagaactgaggaggaaaaaaaaaaaaaagaaaagaaccaacaacctcaactgcctactccaaaatgttggtcattttatgttaagggaagaattccagggtatggccatggagtgtacaagtatgtgggcagattttcagcaaactcttttcccactgtttaaggagttagtggattactgccattcacttcataatccagtaggatccagtgatccttacaagttagaaaacataatcttctgccttctcatgatccaactaatgccttactcttcttgaaattttaacctatgatattttctgtgcctgaatatttgttatgtagataacaagacctcagtgccttcctgtttttcacattttccttttcaaatagggtctaactcagcaactcgctttaggtcagcagcctccctgaagaccaaaattagaatatccatgacctagttttccatgcgtgtttctgactctgagctacagagtctggtgaagctcacttctgggcttcatctggcaacatctttatccgtagtgggtatggttgacactagcccaatgaaatgaattaaagtggaccaatagggctgagctctctgtgggctggcagtcctggaagccagctttccctgcctctcatcaactgaatgaggtcagcatgtctattcagcttcgtttattttcaagaataatcacgctttcctgaatccaaactaatccatcaccggggtggtttagtggctcaacattgtgttcccatttcagctgatcagtgggcctccaaggaggggctgtaaaatggaggccattgtgtgagcctatcagagttgctgcaaacctgacccctgctcagtaaagcactt

SEQ ID NO: 11634 - DNA, 6000 bp, Homo sapiens
actcgtcataaaaagaatgaaataatggcattggcagcaacctggatggagttggagactattattctaagtaaaataactcagcaatggaaaaccaaatattgtatgttctcacttgtaagtgggagctaatctatgaagacataaaagcataacaatgatataatggactttggggacttggcggggaagggatggggtgagggataaaagactacgtattgggtacagtgtacactgctcaggtgatgggtgcaccaaaatctcagaaatcaccactaaagaactttatgtaaccaaaaaccacctgtaccccccaaaatactgaaatgaaataaaaatttaaacattgtgctttctcagaaaaaaaatgacaagacgctgtaaaaatttttaattattttataaaatagatacatacgtgcatgtgtatttcttttcaaatctttccaaaatataattttattgaagaatagtatatcaataaataagttacagcatgctacttttctgctcaaaatcctccaatgccaacagttgcttgttttcctttgactacaagccagatctcttactatgacacagcagactgctggtcatgctcgtcccatgcccaaccatttctaactcccgcttcttcctattcttccttctgtcactcagtggactctttgtatacctgaatgatgccgggaaaattccagaattagaacatttgcatttgtatttcttctgtctggaatattttccccaggcattcacatggcttgctggataactaccttacacattcaaatgttattttctcagtgaagccttttgcagcttttgctgtatttgaaaaggcaatccccattcacagggtctatacttcccttccttgatgtagcttttctcccagccattatcactggcaaactatatatatatatatatgtttaattttaattattttgcttacgatctgtttttccgccactagaatggaagaatataagctccaaaactttttttttttaatcgaatttttaaaactaactttgagacagggtcttgctgtgttgcccaggctgatcttgaattcgtgggttcaagtgatcctcctatctcggcttcccaaagtgctgggattacaggcatgagccaccacaccctgcccaagctccaaaaatgtataaatgcttattgcactgtggtttccttagatacattccctagatctgtatctgtcatatcgtaagcactcaataatatttgttgaatgcatgggtgtgttacaaaacaaacatataacagataatgcataggggtttgatagagaaatgtttgtggtgagaggggcagaagtagagtttagggctgagaagtcactaggaacaaatcagtagagactcttcaatctcagcaaataggtaatatttttaaagttaatgaagttgtgtaagatagagactgtaaatgggtgaccatttggttttatttgcttaaattaatgcttgcctttatgaccattatattgaaaagacgtttatgaccctttaaagaagacatcaggtttgaaggctattccatcatgagtcaaagaaagatttggagtactactgcaggacaaggctcttgatagagatttgtgagaaaaaaaataaaaaatggaagcagtgtcagacactagaaagttttatgccagaggctgactgtaacagaaaagatcaaaaccaatctaatttaattaatgtatctttaattaggtgaaggtaaatctgcaggtctggacacaaatgacaaacagtttatcatcagaatcatgtcagaaagtgacagaattactaaaatatgatgtggcttctttgcttatcagaagaactaaaggaaggcagttacaaagaggctaaaggtaaaactggaatatatttattctacagaaaatatattaccatgggggacactgtaactgaacttttctgattgattcaagaagagcaaactggaaagtgctctagcagagagggatgttgttatagatgaaaggggtttagagcctagaagatgaagtcacttgtctagagtctcacaggatagtcctgaccaagccagaactgggaccaaaatgactttaaactgttcctagattgagtagcttggatctatttaacttttacttttttatttttttattttcctttaagttcttggatacatgtgcagaacgtgcaggtttgttacatagatatacatgtgccatggtggtttgccgcacctatcaacctgtcatctaggttctaagccctgcatgcatcaggtatttgtcctaatgctctccctcccatttaccctgcaccccccaacaagccctggtgtgtgatattctcctttctgtgtccatgtgttctcatttttcaactcccactcatgagtgagaacattaactttcgttaattcctctttctactcaactaatatttctgaagccctactatgtgccaattattgtgcaatctctgctttcttaacttttaatgtggggggacagactttaaaaaaataaaatgtgtgcaagtaaaggggagatgaatgctagggagaaaattaaagcaggaagaggaggcagagagcagctgtagaataggaaaggaaaggctggcactggaagagaagaaggagtgggtcctgagggtgccgaggaaagacaaaggaagcagcaggtgcagaggcactaaggagggaccctgctgatgtgtttgaggaatgaaaggtccatatggctggtgccaaaggagcaaggagggaggattgacatgtgagggcatagaggcggggaggagccaggtcacggagggacttcagctgttttaaggacttgacttctactggaacaagacccgctgccattgaaggctttgagcagagtatcagaatctcacttatatttgaaaaacctcaccctgactcccgtgttgagtgtagatgtgaggaggcaagggtggaaagcagcagactggttaggaatcaggatggctttaaccctagtagtggtggtgggttggcaggaggcgtgttcaaattttggaaatacactgaaggtagagcagagaggattcatgggcaggcttgatgatgaatgcagaagaaagagaggcattaatggtgactcctgggttttgtcttgagcacctgaaagaatggagttgccatgtaccaaaataagaccaaatgaggaggaagttcaataagtctcttttaatctacagcacgctctctcttgcgctctgtctctctctcaccacttctttcctctctacccacttcctttgcaatttatcagttgataaaactatattggtctatagagtttcccacgggcagggatttcatggagtatttccctgtgtgctatttaatatgttcctctctcccttataaattctggaaatccagaatttaggtctatagacttggtcaaattcatgcttgatttttatcaatagtacattacgtgtaacattgattgtgtattttcatccaaaggtgcatcatgtgtggtttcacttgtggttatattagcagccattgataatcattgcttagatcctactaaatttgtcagaagttaggaaatcatgatactctaatcccaccatttagtcttcttttatgagctgaaatatctccataaagacaatatttggtttcattaaggttcctataacaaagaaaggccaaaggcttgattcttctctttattcgccaatattcaaaataatgagttggttacctagcatcttccaaaattaaacatttttaacaattttaataaaattaaggatttaaatatatttgatatgcctcaatccattgcagaatattcttgttgatgttcagattggcccatctttggccctgggtgtttttgaactgccctcagtctctaattgcttctttttttctactgggatatgttcctggctcatctttcatcttgcacatttccagccgtagaagccatcatttctccagggatcctagttttatcttagaggaaatggtatttagtgatcacagtctggtgcacgaggtcagtccttgtgtaggagctttttcagtgcacagaggcaagacatatgccacatttaaaattagataacattatcttaggttcttagagatgcttctaactaaaatttaaaagtatatggagcttttatttaaccttatctattttatatctgcttcttttctcgcagtgaaattttcagggtcaaaatcaccaagataattagtcacttgctttattccacatgtacagaacatttcaatagcagagaatgcaatgtctaattttgcctaaaaggtcagtgtgaagagaacatttgttgacaagatgaggatacatattctgatgagagcaaacaccatgtaggaagactcagaggcttgaaagagagcatagttcatttaggaaagagaaaatcctgttccaccagaggaatgatggatgacaaagtcagcaagaagttgggacataatgagcctgatattcaatgctgcagatgttagagcaccaacaagatacaaaagctttttttttttttctttttttgccttgctttcaggaggtatcttgcatttgttttcaataaaaatattactttcctactttgtcctcataagcagaacttagggatgagcaaagagcagggggttttaaggattgctctccttaacactgttctacaccagctcagtaaaaagaccatttaagtgtggctcaattattttctgacatttggagaagcatttgcatactaatgatccagggtcctggttgtttttctccccacagaggacaaagtgtggaccatagtgtctcatgacttgcagatgcagacgcctgtggtcggctacaacccagaaaaatactcagtgacacagctcgtttacagcgcctccatggaccagataagtgccatcactgacagtgccgagtactgcgagcagtatgtctcctatttctgcaagatgtcaagattgttgaacaccccaggtaggctgagaatggaatgttacttttaatcactatctcagctggtgcttagaattgcctaaagaatccaacaggtgtggttcattatcttatagtctagtcttcagtaggaaggaagctgtaaataagtaaaataaaatcattgggcttgttttctggggaatgaagctaagaaagaatgattttgaggaaaaaatagtccattgttttaaacttacggatttttaaattgtatgtgcatatatgtttctagtgcttaactgtcagtagtggctgtgggacaaagtttatcagagctccttgtgaacattcaagcaattccctttgagagcttcaggtgtctttattgtaaagatgaaagcattctaaaaattgtctacagccaaataggatatagaatagcgatagaatttagagctctttcttcccagtagttgcttcacagtacctgtttgtctcaagaagtctagcctgattttttgttttcatgatggccaacttttagcatgtgctagtgtgtgtgtgagtgtgcacatgcaaacacacatacatgtgtgcaagactgtgtccgggtgtagagaacagagagattccaaaagatatactggaaataactttactgcaacaagttccatatgctctgggagtcttggcagtaaattcgagatgttgtcagaaaactgcatctctgtgtctgtagtaaaacacagtggaaataagtcaaagaaacatgagctcataatttccaaccttaccacttcccaagtatgtgactttggtggagtgagttgacctctttttaaaattttaccttaattgacaaaattgtatatgtctttcgtgtacaatatgatatgatatatatatatatatagtgcaatggctaaatcaaactaacatatgccttgcctcatacatttattattttttgtgaagcaaatacttaaaatccatgctta

SEQ ID NO: 11635 - DNA, 6000 bp, Homo sapiens; identical to SEQ ID NO: 2524

SEQ ID NO: 11636 - DNA, 6000 bp, Homo sapiens
aagtctttattcggctggacatggtggctcacacctgtaatcccagcactttgggagggcgcggtgggtggatcacgaggtcaggagatcgagaccatcctggccaatgtggtgaaactctgtctctactaaaaatacaaaaattacctgggcgtggtggcgcaggcctgtaatcccagctactcaggaggttgaggcaggagaatcgcttgaaccagggagtcggaggttgcagtgagccgagatcgcgccacagcactccagcctagtgacagagcaagacaccgtctcaaaaaaagaaaaaatttatccaaaagtaaacaagatagcaggtataggagggagacattattagcaaaatgtaaaactcttgaagaagaaaccgtattgtttttgtaaatgcttttaaaaaaaattgttgttaccataatgttagaaagaggctgaacaggctggacgtggtggttcacgcctgtagtcccagcactttgggaggctggggtgggcagatcacctgaggtcaggagttcgagaccagcttgaccaacatggagaaaccctgtctctactaaaaatgcagaattagccggatgtggtgtcgcatgcctgtaatcccagctcctcgggaggctgaggcaggagaatcgcttgaacctgggaggcggaggtcacgatgagccgagatagcgccactgcactccagcctgggcaacaagagcgagactccgtctcaaaaaaaaaaaaaaaggcagggggtgggggaagagggtgaacaaggggacagtaaatctgtaggtgaataataatctaaaccattcgagccttttaaaatgtcagaatttcctcatctttatctttacagatgtaaagaaaagttctacccacctgacctgccagctgctagtgttgttatctgtttctataatgaagcgttttctgccttgcttcggacagtgcacagtgtcatagaccgcacgccagcacacctgcttcatgagatcatccttgtggatgatgatagtgactttggtaaggaatgctgcacctggtaacattggatccaggctgtcagtcactacagcactgacaaacactaacacagctgaactttcaagtacgtggtaggtggggatcctacacgtgcagtcacagctgggctgaccacaaataagtctgaagaaatccattatctttgtaacctgcttataaactatgctacccaaatttgggccgtgaaattttttccgtggcttactttaaaaaacacacctctttttatttgaaataactgtaggttcacaggaagttacaaagacggcctatgtacctttatccagttgctccatcataaaattcccctgtcagaaccaggaatccacattggtacagtgtgtgtggtccagggtcattctgtcacacaggtggactcccacaaccctcactgcaatgatacagaactgtttcctcacccggagggcccttgtgctgcctctttctagtcacacctcctgctttcctctactcttccccagtccctgaaaccacgactctatgattttgtttccatctctgattttgttatttcaagaatgtcatataaatggaatcacacggtatgtgaccttttgagatgggcttttttcatttggcatgatgccttggcttatgcttctctattaagtctcttacactgatcgtccccagataaaagtggattgcattctgatagctcctcaatgatctctgaatgccagtattttatgattcactacatattctatattctgtacgcctttcttaattcaacatagactcttgctaagaatggctttgtgtacccaaacaggatagaaggctttttattacactgctcattcagctctcagtgaccttgcaagaaaggctggaagcccattttatagagggagaaatataaaaagtaatttgctcagaccccatagctgttaagtagtagagtggaaatgagacctctggtctgcatagctccaagccttctgctcttttcatgacagcaggctgcaggaacacagtggtacaggtgtatgccagtgactttttcatgcactcgagcgtttattaagtaccacttgtatcaacatcagagttggtataccagtatacttaaatatagaaggtaaagaaatggagagagtcatgggagcaaaattctcaaaccttggccaaaaacaaacaaacaaaaaacctaataaataaatctgagtctggaccacgtagaagattggttacatactgatttctagaatttatggttggtttttgtttttttttaagtcaacttgtattttggttttcactttgtggctattttacctaaaaggaaaaattcataatttgaggtggtttgtatattaactatggaaagaattactgcttattatcttacacgatctttcaagttattctgaaatatacaggtgaatgacatagaattccttaaaaaatatttagcaaccttggaagaaagatgctaaattaataaaaggacatattcaatgctgttcttgttattcttggtaggggcaatagaagttgtttcttaactattttgaaatggactaagacttaataaattcctttgtaataaaaggcatttatatctcattttctttgttatcaatgtgatttatatatggtcagctgaacatttatgcactcaaaatactcatttcaaacattctttgtgcaaagcattgtgctcgatgctatggagatacaaataagtctgtaactaaagtaagtattcctctttgctagtattccagctcttacccttcatttctttttcttcctacaggataagctacaatactcttttaaagtaaaatattctgtagtatttgcttgatagtttgttgtaaattttagcaagtactagatacaactttagaatagctgtaaagtgtctttatatatgtctcatacagtttgaataattgtgggactttattttcagatgatttgaaaggagaactagatgaatatgtccaaaaatacctccctggaaaaattaaagtcataagaaatacaaagcgtgaggggttgattcgagggagaatgattggcgcggcccacgcgacaggtatcacttctcgttagctttgctctacaggtgttggatgacaagggctcgagcctcagcgcctgtcctgattctgcaaagtctatgaagagtagtgtttcaaacggacattgccagcaggagagatgaggcttgttctgtttgggaaagacctgttcataacgccaagcctgccatcccaaagcacatagtgcagggggctgaactctcaaatcctcagtgtctattttcatagcaacccttctttgatacttactgcccctcaaatatattttatatcttattcacttatataagcagaaaagcccagaccaaaatgtaactgaatttttatgtttttaaatacaaaatttaaaatgtatgaacccaaactgtcgattggaactatgcttttaactcttagtgcggagtgcatccctctggagccacacatcatgactttaattggttaatggacgtaagattgacttacaaaactataaatggcattttctttaaaattccctcttaatccttctgattccatcaaggagcaagtctccgttgttactagtatatttccatcatacactgctctccccctttaaaaagaaataaccgatctcaaattcagtcttctgcagaaaatatatctggttagtcttcagttacgttatattgattctgttgtatttcgttttatggttacctatgtgtaattggtctccctgagtttcatttatgactgtaattaaaacatttttaaataaatgtaattaaaactaatgaatctgtttaaaaatgttaggcatgtgatattgcaggtagggcatggacatggcgaaaaaattttgaaaatcatttgagaatgatggaacttggtggggatattccctagcagtgacagcatctactgcagtccttcctatattccacgctctcctagataacctgcctctgggtttgtggtggtcggcactgctcaccaccactccccctgtggagccactggctcgtgtgctgggctgagttggaacttcacttttagtatctgtcttctcttatttctctgaagcccacagtgacctgaagcaattaacaaaaaaaaaagagaagcagctcctctacatcctatctgcagtggatgcagactgaattcaaggcttgtgagactttttttctaggtttctagtcatgtaaaaacttactgaattggctgtgtggagttatttaaggcaaagcaataaagtgaaaatcctggggtattttcaatattaagccactcaaaacattgtactgttacaatgcaagtttactgtgaactgacttttttttagatagcaatagctatttaggtttttttcccttatgatctcttcaggtcctcattgagatatagtttaggatctgtccgaagcaagccagtttgcatggaagtcattgtttcaggttcactgtgaccagatgtggtcttcctttaaattggtgttaattggaaaaagtaacacttttagaattaagaaaagctctgaatccattttctcctcgaagcaattgtgattggtctcacctcacccccactgatgtgcatgtggaaggttctgcctttctgcattaagtgacagcggagagctgcctacatcccccacccttcaggctgtttacagacactgagctgtgggactgattcacgggcatcattgaaaactgtctgagatactgcttttatcactagttgaagttggatagataacatttggtgctttaagtagttcatgtaaaatcttcatacatttcacgagtgcacttttagaaaaacaataatgtgacctgatgatgtcattctgagtttctcaactgctcagaagaaccgtggagctcttaaatttgaaattataaaaaaaaaaaaaacctcagttctgctcacatttatcaagaggagcttaaaatgcagaataaaatgtcgatgatttatatgttgctaactagaagaaaggtgtatcccattggcaggtgagagccactgaagctaagagggtggggggcagtagaaaggaaaggtgggagatggaagaaacagaaatgagcaagaggcgtccccgagagcgccaccagctgcgcctccctctctccggggagaactgctgtgtggcagccatcatccatagttacagtgcatgtcctagtcaccagtgagaaggcagctgtgttctctgtactctgtttactgaggcagagagatgtcttctaagtgtgtgccaaacttcaaaatattttgattaaaataattgtaataaaaatacctacatacaactggccaccgtcatggcaccaaaacatcttggaatactcaatatctgggcttccaaagagttgagttgttacggtgagactttgactctgtttactgaagagattctgaattgcctgtcagttttttcaagagtcgcgcgtatgatttgtatgggtccctcaatcacagcaggacactgcacgcagcattactggctgagggacgtccttgttgaccaccggcagtgaagtgtagtggagcagttaggccgtctggggctgggagggtggcagtcgtgtttcatgctgtgtcagcgcgtcatcccattggacgggtggttgtacctaaattgagtgttgtgacactctcctgagcctctgttgtttcctccccaggagaagtccttgtgttcctggacagccactgtgaagtgaatgtgatgtggctgcagcccttgctggccgccatccgtgaggaccggcacaccgtggtgtgcccagtgattgacatcatcagcgccgacacgctggcctacagctcgtcccctgtcgtccgcggagggttcaactggggactgcacttcaaatgggatcttgtccccctttct

SEQ ID NO: 11637 - DNA, 6000 bp, Homo sapiens
atcaggaggctgacacattagcctgactcctcccactcccacagttcccccgtccaccaccaccatatcctcaccgaggagcccacaggccagcctcccacgagcagctgagatgagctgtggaagggagctcgtcccacccctgtggaaggcagcgggcagctgtgtaaacccgactagggccggtgggctcctgtctcctagagacaggttgtctctgggctcaacttgggattttcttcacgattgtttcttttgggtcctacgtgctcatgtgtacacacacagacaccctgggtcatgtgctaaggagcagcagaaatgcctcatttttatttactcatttgttcacgtagctagtggaggaagccaaaatagttatccccaaaatattgagacctgctaagtgaaagatactgaaaacacagggactctctgcctctgcccctgtttgccagacgccaggacatccatccttccttcctggggacagcacctgctcatcagcccagagagggtcccagccgttgccagggtctctgggggcagattgcattgccttctcacaggttccctccttttaaaagactgggggctgggcatggtggctcacgcctgtaatcccagcactttgggaggcccaggtgggcggatcaccggagtccaggagttcaatcaagaccagctggccaacatggtgaaaccccgtctctattaaaaacacaaaaatcggccgggcgcggtggctcacgcctgtaatcccagcactttgggaggccgaggcgggcggatcacgaggtcaggagatcgagaccatcctggctaacacggtgaaaccccgtctctactaaaaaaaaaaaaaaatacaaaaaattagccgggcgaggtggcgggcacctgtagtcccagctactcgggaggctgaggcaggagaatggcgtgaaccccagggggcggagcctgcagtgagccgagattgtgccactgcactccagcctgggcgacagcgagactccgtctcaaaaaaaaaaaaaaaaaaaaaacacaaaaatcagccaggtgtaatcccagctactcaggaggttgaggcaggaggatcgcttgaacctgggaggcagaggttgcggtgagccacgatcacgccactgcactccagcctgggcaatgagccaaactccatctcaaaaagaaaaccgtaaataaataaaagactggagctgctctctcctttgcctggtcactatgctgagagttatggctctttgttaaaatactgtgtaaacagggcccctacaccactgccttaagaggcactggaactgaggcctccgccacgtggagggcacagcgcacgccaggaaatctcttccggttttcctcttgttcatctgactttcattttcaggacagtgacagtgtctcgaccaggaactcataagggttgagaaaagaaattatattttctcctctttactagaaaatgtctaaaaatatctctaactccacacttgacattatggcttggcttgaggtaaaatccagacagacaataatttccatctaacaagcaacaagcccacagcctgcaggcgtcctgctgctggttgaggtccagaaaccggaaggaccccagccacttcgtgggggaagcagaagaccacaatgcggggcaaggtcccagcaagggtgaggcagggacccaggcagcactggcccagagcactgaggcccagagcaccaagcggctgctgccaaggctgggccgtagcaggaagctcatgggaagaatccctctgtggccaaacaggtacaagacaggggcctcctcccaggaattgggaacagaaggctgtgcaggtgggatggggtctcactggcttgactctgagcccagaagcatagaaccagagctccacagattcctgccgacccctaaggctcatcccagagcccgcgtgcttggagtcacaggctctgggtgggggcccaatagcagcagatggaccccatgcaacaggggctgcgtctcccagaaggggctctgcggctgtggattaatggctcgcagtcgagaagcttctatacctggaagtgctacagagttattgcaagggtgctttgaggttttaacgtgaacatgctgacttggcactaaataaataaaagcaataaataattatattggaatgctaaggttgctttttatttgaagaggggttttcatccttgaaatggatggaaaacatggctctgggctacaggaagacaaagtggcagcaggatgtgcactgaaccctctttcccctcctcgacctcacaggacgatgctgaaggagcagtacattgacaggacgcgcgtggccgtgtttgggaaggtgagtctgcgccaccctggtctgaaaacccctcagttccagtgtggcctgcaccattacccacgtctaatcctgatttattgagaacgtctgtggtctgctggtgagcaagtaattttttaaaatcaagagcctgggtgcttagtgattccagccgtgggaggtttcatttgatcagctcattttcctaagtttctttttacattatctggaaggaaagagaagggaagccaagtccccgcaggagagctctaatacattcctaatgacttttctcccatccatctgctgtagctcttggcatggtagccaggaaagaagcaaagcaggaatctatttctggataactcgatgtggagtaacaacgttaattaccatgtctacttagacggaagcacaggtgtggggagggtcgcgcagtgaactctcaaaccagagccgctcccatctggtggcccttgtcagaaggctgtagcctgggacagctcagctgtagctgaggcccacggtttggagttaggtctctgcaccgccacctactatggccctggtacatggcccctcattctccttagcctagacctggggcctcttgatctcaagaaggccagcacacagatgggtcggtatagacccatcttccctctgggagtgaccctcagcacaggccctgcagaggaggccttgctgtgacacccccgcaggtgaaggcttggacaagtaatcagcacagtgcctcttacgtcatcgcctccaaaacctcagagcccagcatgcactggagacccggccctgccctgtgggctgctcccggaagcaggggatgcaggagccctcccacacctcctccttacctgccggaggtgaagtggtcaggaggagggccggcggcttctctccttgttcagagcccgggcacagagccctagaggtgcattccaggtgcctagatgtccactcactgcctgtgaggcccgaagccactgggtcattggtaggtgtaacttgggtgtcaatagccatcacctctccccaccctcatggaagtgacttcccagcagactggcagctgaaaggcagggagcctgggccgtggtcagtcttttccagtcgtcactctgccccaaatgcacatggatgccactcctgagggcttggcctccttcctgtgccttgcatatagtccatccactcagggcctttcatagttcacttctggacacagagaggctttctcaacaggcagttggtccagaagcacaggcagccgaggtgccaaagggaaaggggaccctgtgcacctgtcagagcacaactgatgcacccccacaccctgtacccccgcactcagctccgccgaggacatctgtctgagctccgtgctggggatctttcctttgccattctgcccagtggatcccgggcgtctttccagagcataagcatctctgttttgttttaacaagccttagatagaggtccgtagaccccacaatggtatttctcctctgaagaataaagcgtcaatccttttagtggcttggcatgttgcggcctgtccattctgtttcctcctcgcatgtgccccagtgatctggctgcagcctttgtcaggcatcgcaggacctgggacacagagcccaggggagcagcagccaccctgcacccagaggtgacctggagagcaagggggcacctgtgcgttatgttctgcagtttcccccccgacaccgaaaatcccccctgcagaagattgcctgtctctcatttaaaccagagcaggccgcgtggccctgcaggaaaatgagatttaaagaaaacgaagaatgacaagtaaggacgtgtggagttcactgacaataaatattatttgtcagaaaatgaaaatcttctttcattgtcattagacaaggtgcccctgccctattaaaggaacacaccggaacgatcgtgcaggtcataaatggttgatcttggagtttggcatgacctgcgcttcacggtctcagtcaggtacctgggttctctacactccatgctcccaacacgcatgctcacagactcacatacacatggatgctcacccatacacatgctcacacacacatgctcacacattcacacacatgctcacccatacacctgctcacccatacacatgctctcacatacatgtgctcacacatacacacacatgctcacccatacacatgctcacacattcacacacatacacaaatgctcacatacacgctcacacatacacacacatgctcacccacacaatgctcacacattcacacacgctcacccatacacctgctctcacacacatgctcacacatacacacacatgctcacccatacacctgctcacacatacacatggtgtcacacacacgctcatacacacacatgctcacacacacgattacatacacctgctcacacacacacacatgctcacccatacacatgctcacacacacgctcacattcacacacatgctcacccatacacttgttcacacatacacatgctctcacacatgctcagacacatgctcacccatacacatgctcacacacgctcacacattcacacacacctgctcacacatacacatacatgctcacccatacacctgctcacacacacatgctcacccataaacatgctcacacacacacatgctcatacacgtttacccatacacatgctcacacgattacatacacctgctcacacacacacgtgctcacaaattacatacacatgctcacacatacatgctcacaaacacgactacatacacctactcacacacacatgctcacacaattacatacaccgactcacgcacacatgctcacacaattacatacacctgctcacccatacacacatgctcacatgattacacatgctcccacatacatacatgctcacacacattacatacacatgctcacacacgctcacacatacacacgagtacatacacgctgacacatgctcacacacacgattacatacacatgctcacacatacacatgctcacccacacacacgctcacacatacactcacacacacctgctcacacatacccatacatgctcacccatacacatgctcacacacacatgctcacccatacacatgctcacacacatgctcacccatacacatgctcacacacacatgctcatacacgtttacccatacacatgctcacacacgattacatacacctcccacatacacgattacatgcacctgctcacacacacacatgctcacaaattacatacacatgctcacacatacacatacatgctcacaaacatgattacatacacctactcacacacacatgctcacacaattacatacgcctactcacacacacatgctcacacaaattacatacacctgctcatacacacacacatgctcacacgattacatacacatgctcccacatgctcacctatacacatgctcacatacacacgagtacatacacatgctgacacatgctcacacacacgattacatacacatgctcacacacattcacattcacatgttcacgcacacatgctcacatgctcacccata

SEQ ID NO: 11638 - DNA, 6000 bp, Homo sapiens
gaaagatttttaaaagaactgtaatattacaaacctagagcaaccactcagaacaaagtaagtgaaagaggtatcactaacaagctagttgtagagataaaatggaatccaaatgtaactccaaagagtacaggaaaagaaggaaaaaagaacaagtggaacaaatagaaaacaaataacaaggtagtacacttaaaatttcatcatattgatcattacattaaatgtgaattatctaaaccctgcaactaaaaggcagagattgccagactggatttttaaacatccaattatatgctttctatgagaaactcacttcaaatataaaaatgcagacaggtttaaaatgtaaggatgagtagaaacatacatcaatctgaacattttttaaagtaaaagaatggaaaaagatataccagttaaacactaagcattcatatcaaagtattctttagaacaagggatattaccagggataaagagcatcaattcttattgagaaaagggtcagttcatcaagaagctgtaacaattctaaatgtatagtatgcacctgacaacaaagcttcaaaatacatacagcaaaaactggaagaagaaacaggcaattggaaaaaccacaatatagttggagatttcaagatttttctctcagtaactcaaataacaagtagaaaatcagtaggaacacagaaaattcaaaaaaacactatcaactagcttgacataaatgacatttaaaaagaaaacactctacccaacaaatgtagactacacaaagtatatggaacattcaccaagacagaccattaaaaagctgtttatcagtaaacttcctggtactagtacgtgtcgcttggaatcttgaaggcattcctgagcctggcattcctttagccaagtgagtagttcagaatgggaaaaaaaaatgcaaaaatctgaagattattggcatcagtgttttcctaataatattgtatcaaatttaaatattcagaggatgtgtattgagaagccaagtgatggctaaaaaatattgactttcaaaatttttctttgattcatttaaagttcataaagacatagggtctgaatgcttgtaatcaaggtatttccaggagacttcctttaaaaaacaaagcaccctctgtttacttgatgcactgaatatattatgtatgtgcttttcaacagtaagaaataaaaagtttctttaaccactgtgaggtgattactaaatgaagaatggaatttgtttcgaatattgatacaggatttcatgatgtgctgggcaatgaaagaccttctgcttacatgagggagcacaatcaattaaatggctggtcttctgatgaaaatgactggaatgaaaaactctacccagtgtggaagcggggagacatgaggtggaaaaactcctggaagggtaagtcaaaagattcaaaccaaacacctgcaatttcctacttcagtaagtcttgtagatggtaaagccttttagatcacacggctcacgtcatttccacgaatgacagtgctctcattaccaagtggggaggcacctggacttggcaatattttctttagcccaacactatcacttcctaaaccacaagtaatctccttagaaatttccacattggtagctcttggaatacttttgaagggtgagcagatttagctttaaacctatttagccaacctgggaatgatcatcttcagaaacccagtcaccccaaagccatttttactgtctcaaaggtgtggcttatcagaaacggaaaatctttctttttagataaaagaatgcatccttcagccattggtttcgagatttaaaaatgcagacttctaaaacttgtctccttaacccaacagagctgatttgttttattatcataggtaaatgttcttgctgtgattagagaattcttaactggtctgatttattttttaatttatcttctagagtgttgtactctgaaagctaaagtgaggaatacaaaatataaatttaatatattataaagaggcatatgggtcctctggtccttattaataaagttagctctaaatgtttatgaacgaaaggaaaaagatgctggatcatcgagccccacttttttataccctaggaggccgtgtgcaggcggtcctgaccagtgactcaccagccctcgtgggctcaaatataacatttgcggtgaacctgatattccctagatgccaaaaggaagatgccaatggcaacatagtctatgagaagaactgcagaaatggtaagaacacagtattctcctaaactactggagacccagtttctaaaccttaatgatcacaggtgcttctgtaagtgccagatgctgatctcatcccttgccactgcactccatgagctggatgacagagacagtgagtgtgtggtcctacccagtgccttcatcaacatcaacgtcagccagacctactgcagcaaaccagtggctctcccttgcttggagccctcttcaaaagccacatcaccacctcctgcttttccttagtgtccagttgactggacagagaataccttgctgagtctcagattttgcttttattacttggaactcttttggctactcaaagaatagccaatttgacagatgtttgctgatcagtctaatttaggctgacaaggatttctcaagcaaatgctgtgtagctggcgcaaatgctaaaatgtgtatattttggttttgctttgctcttagtgaaagaaataagctctctatctatgttaaagaggaccaaaggtgcaaatacatcaagggaaattatcttgtcagaatggtacatgctcaaaaaacggagttaatggccggataccatggctcatgcctgtaatcccagcactttgagaggccgaggcaggtgtatcacctgaggtcaggagttcaagaccattctggccaacatggtgaaaccccatctctactaaaaatataaaaattagccaggcgtggtgagatggagtcttgccttgtcacccaggctggagtgcaatggcgcgatcttggttcactgcagtctttgcctcccgggttcaaatgattctcctgcctcagcctcccaagtagctgggattacaggcacccaccaccatgctcagctaatttttgtatttttagtacagacggggtttccccatgttggccaggttggtctcaaacatttgacctcgtggtccgcccgcctcggtctcccaaagcgccgggattacaggcgtgagccaccgcgcccagtcagcatttgtctttctatgcctagcttattgcacttaacatcatggcctccagttccatccatgttgctgcaaacgatgggatttaattctttttatgactgagtaatattccatcacattttctttatccatttatctattgatggatacttaatttggttccatatcctgactattgtgaatactgctgcaacacaggaatacatacatctctttgatggattgatttcctttcttttgtatatattcccagcagtgagattgctggctcatatggtagctctatttttagttttttgaggaacctccatactgttttccatagtggttgtactaatttacattcccaccaacagtgatatactgttggtgatttgtatgacttttttgagaaattgtctattcagatctttcagccatttttgattaatttttttattgatacatgataatcatacacatttctgggctatgcgtgttattttgatacatgcatacaatttatggtgatcaaatcagggtgattgggatatccacctcaaatatttatcatttctttgtgctgagaacattccaaatctttctcttttttttttcttttcttttttgagacagagtttcactttgtcacccaggctggagtgcagtggcacaatcttggctcactgcaacctccacctcccaggttcaagcaattctcctgcctcggcgtcccaagtagctgggattataggcgcatgcagcatgactggctaatttttgtatttttagtagaaacggggtttcaccatgttggccaggctggtctcgaactcctgacctcaagcgatccgcccatctcggcctcccaaagtgctgggattacaggtgtgagccactgcacccagcctaaatctttcttctagctgttttgaaatatacaacaaattgttgttaactatagtcacctagattcaacaattttagcactttgtcataactgcttctttccatatatctataatcatatgtagatataaggatagctatatatatctatctacatctagagacagaaagagggattttaaaaatcatttaaagcatcaaaaatagccaaatatacaaaccttgattggggtgataatggtgtcagggctatttaggacaatgctcttattcttagacatgtgtgccggagtctttatgaataaacagtcatgatgtcaagtgtgtcaggaaaaaaacctacagaaagaggtgtgtcaaaataaaaagataaagtatctctgatttgaataggattgtgacttgaaaacccgataggaagaaaaatacattaaatgatatctctacattggatttttctgaataattgctttgtataaaaccttcattgaaatataacaaattcagaaaagtgcacaagtcataagcatactattggatggattctacatattaagtgtttagttgtctaactacttttaaactagttatgaaaaaaatacgaaaaagtgtttaattcagtgatgcatgcacattgggttttctgagcctagataacactcatggctggtttctatctctgtttagaggctggtttatctgctgatccgtatgtttacaactggacagcatggtcagaggacagtgacggggaaaatggcaccggccaaagccatcataacgtcttccctgatgggaaaccttttcctcaccaccccggatggagaagatggaatttcatctacgtcttccacacacttggttggcttttacaaacccctaagcttcttctttacctttccttaaaatttcaaccttctcttttcttactctataattgagaatgataacacagagagttaataacagtcaccctgctaactttccttagcatgagtgaacagtgagagataaaaatgaaatcttggttaaccttgccaaatctccaggacaccgaagagttaaaaagagagaaaaacaaaaagattaagctctttttcaaaaaaacaaaaccacttaatttttttctacctaaaaccataacaagaaaaaatgctaacacttatttatttgaatggcacatggagaccgggcatgtggctcacacttgtaatcccagcaccttggaaggcggaggcgggtggatcacctgaagtcaggagttcaagaccagcctggccaacatggtgaagtcccgtccctactaaaaatacaaaaattagccaggtgtggtggtgcgcacctgtaatcccagctactcaggaggctgaggcaggagaatcacttgaatccgggaggtggaggttgcagtgagaggagattgagccattgcactccagcctgggcaacagagtgagactccatctcgaaaaacaaacaaacaaacaaaaaacagaatggcacattgatgagcattcattgattgattctttagtttttttatgttctctaaagaatttttaagatttaaagaagcatgtgctatttatttgtaggaaatcctcagaaaaggtacaaataaaaaataaaaattatccataattaataccagagattataattgttaattattatggtgttttctttgctagtatttaagatcattattaagatcacatacacatttttgcttactatcattagcatttgatgatatgatttttttaatttttatacattgttttaatggctgcacgatatttcattgtgtacaaataaaataactactg

SEQ ID NO: 11639 - DNA, 6000 bp, Homo sapiens
atggaccttggtaagaaacactagaaaagttaggaaaaggggtttttccaggtcagagagagccagtgcatgctggtggacccacagttctgtagctatgagaaatagccccatctggttgtgcaggaaccacaggctgcactagctgctttagttgtgaccgcagaaagcaccctgccccagcatggagcaccagggcctgcacacctttgccaggccccagaagcactgccactgccatgatacccaagaagagagagattagcaagtgctttgtaccagaggggagggctgcccatgcaaaggcctgcctgggggaactccagcaatcattgggggagactttgggagagtggagagaaggggcctcctgaaaagacacagccaggggaaacctactttcatgatatcaagactctaattttagagggcagtgtttgcagatcctaccaatgactctttgtccttgagtctgtgtttgaggtggaaccactcaaagacggggaagatgaggcacctggagccaggcgcctggtctttgtgtctgcacttagccaaattccctctcagctgtattgtgtctggaggaaatagaagcatgactaagctgatttgtattctgccaaccaagggaaaatataattaacacggcagcaagactcagcaaaccccatgggaaagtccaagaaggaaagagctcccgtggctcaagatgatgtcagaggcaaagagaggccaacccactctaatcccacagcaggtctcctctctaatacctcaactcataaagggaaaagacaatgaaatccaggcctgccatgcctttgaaaagaacacacagcctctaggagtgattgcagggattgagcagactgtgatgggggttttctcatgatgggagtctcctgctgttgctgagtgctgccaatcactgcccacacctccagcagggaggtgacttcctcaggctctgctactccacatcaactgattaacgcagctgtgatagcacacctagcagagacaagagactcccagacactaggcaggagtgagaccaactgctgtatcagatatacacctagcttataattacgtgtcaagagaaggaagattaggcagacatcagtaaccgcaagaactgaaatgtgatggctggtatccatcttcagcctgctccccagctaatcatcccctaaaagaaatgcgggagaaagctgcctcctaatacatttcattggcccttcatctccgtctgctgactcacatttgaatttagagacaatttgctaaactttctagatttttatttacttaacattgccttagcctttttgatatattcaactatagtattctccaggtttaaatattgtacgttttttttcacaactttaacaaattagtgctcagttctcctggcttgaaattcccatatctttcatgaagctgttgaaactaaaaggcttaggaggaaggtcacccacctccctcattctccttcccttcttgcccagaggaatttatgtctgtcttcctgccccaatatctacatatccagccatgactacattgtttggtttaagtaactgcctctcattacagaactagattcatttattcattcattctacaaaaacttgaagaacatttatgctggatttgaatccagtgtcagaattgtctttgattggttctatcttatttcatagatttggggtttgaatttaatagctaagcatataaatataattttatgcaagatagcaccttaattctagtccttatttaatacaaatagtgatataatgaaatgatatagttttatctagtttcatctagagaaatatggaaggaaaaatacaaatagttaaaaaaaggaggaaggctgaaaatatatagcagttgatatgcttctcagagtcatcttttactaatcagtagcagtggtgatggtcttttaaaaaaaaaaagtttcggttgcttttaaaaagagatttccagtgggaagcctgtgagtactgactggctcctgtctaacctacacttcctgtttggttgatgaaaaagaaaaaaaaaaaagccaaaactaaaaggtacattccagaacaagtagtcattttaacaactggcggagccaagaaaatgcgatctagtttccctctgtcccccagtctagagccattattaaataatttaatgccatagaacttatatcaaaaatagacacattccttaggaaacatttgaaacttactggttttgaccttaaaatgtaatcattcatgaagagatcaatctttcatatgttttcaaatatgaaacactcaagtccattgtcagaatcccaatagtgtggaaagaaacctaccagggcaggcttatctctgctcattctttgctaaaatatccattgcatttgctaactgtgaaacgatgggtaggttacttcacttctctgagcattgaagatgccctgtctacaaaggataacagtctctctcccaggggtagctgtaattgtgaaattaggcaacatatataggaaggtgcctaatggagtggcaatcatttattcattcattcccgaaatatttatcgattggccacaatgcccaggcacagagcaaggtgctagtgatatcaacacgggggacacttcacatttccccccattcctccctaacggtgcagcagacaccccactaaagctgaggaggcccctgctgctccccctccctctctgctccctgagtctgtgagaggcatcgctccagcctcccaagaaagccctccccctgcacatccaagcagctccctcttatcctgatgccctgacccgcctgcccacaaggagcctcctccctgagccgggaggactttccttctctcctatgacaagccctggccctaggcagctgaaaacaatcacccaggaagctccttcaccgtcagattccctgacagccctggatctagcgagaatcaggtgatttcgatgtgaaacgaggtttgggaaccactgctttcagtcacattctttttgtttgatcttctcagaatcagcaggcatttccctctgctactttgtccaagatccaacccttctcatctgcgtcttgccagtctctccactttagagctttgttaccagctacttctaacctcttgcacagaaatctctactcaccactgtggagagtgaaaaaggaatgggtttttatgtatttctagccagctcttggccctgcgccatgcagagtatatgctgtacattggactttcgggacacttctctgttaaattctaagccttatgtctgtggtgtctccacagtgagtaagctcttaatcacattccctattgtaccttcttagatgaaagagcaatgggtcagggggactttttaaatgtccttaaacttgattagtttaatctttattatggctacagaatgtttcttaaatttacatacgataaaatccactattttatattaagtagagttatgagttttgacaaacaaatatattcaggtagccaccaccataatcaacacacaaagcaatccattacccccagatttcccttacatcctttgttgtccccctcatcctgtacttccagcccctgagagccacttatctgatttctgtcccgacagtttgccttttccacaatgtcatgttatataaatggagacatacaatatgctgatgtgagcatttagaaagatcatgtatttaaacaattattagagtaagggctggctatggtgacttaattttttggtttctgacacctataatctgatttgaagtgtgtcattctgtgcatcatgatcctttttgcagaacctgtgtctattagaaaatccagatgaagcaggctcttcctgttgtccttcatttggaaaagacagaagaacagagcgctttacgaaagtcaagttacagcttcctaattttctctcccatggacaaactcttccctccccccaccccgacctagcctcttacccactatcctttgcaaattcctatctcttatattgcccagtaattggggcgtgggggggtgaggggggggtgagttactgctgatgaaccaggaggcagagcaaggtttattttgctaaaggcttcagctgctactgcctggacctcaataagcattttctgctctttcctatcactactgtcttccctttctttgagaagcaacataaagataaaaagaaaaatacttgattttgtagcatgccagaatattaagatgctcctgaaaagtgtgggatttaaggcttctcaaaaaagagcagaggagggagtgagagaagaagacggagaaggaggagaaggggaagagaaaggggaggtggaagaagaaaaaaccaccatcagaaactgagtattacacaggacgtaacctgtgctctgagagtgaaggaggccacacagcagtagaaccccgacaggaaaatcagaaaacattatattttttcccagatcccagagtatcagatgttccattcagaaataatccctattgacccagtctctgtgtctctctctctgccaatagcatcaagcacagtaaccctttccatgctaatcccgttattaatgccatccacaacaagcgtagtgtaagtaagacacgaagtgtaaaaaaactttcttccccgcagtccgggctctcagagccctccttgtaggtcaacagtatcaaaggtgcttaacgcagatacaccaggaggctcaaagcccaaacatcgaaaaaaaaaaaaagacccactcttgtgctgtgtgtattgcccacgggtgggaggatgcaagtacaattacgttttttaaaactccagtccagatattggcttttccttggatacttttgtgtggctctcccagtacagtcagatccgccgccgcagcctagcgctccaccccgggttttgcgtcctcccctcacctgcctttcagtggtgcggggtttgatcccgagagcggtggactcaaagctgcccgccgggactcgggctgccggccgacaaaggacggtcctcgggggttctgaagtctgacccggccagtgggaaagccacctgcatcacaaagcgaggggcacacctgaaccggggctggcgggaagaggcaagtattgcgcgcgggctggctcccacatggagctgcctcccggtgcaagtgttgcaagggtgcgctgctccagcccggggagcgcgggaggcggcggagagagcgtccgggtgatgagcggggcactgtaactggattttaacacctctgcaagcagcgcttttggtcaaaaaatttccgattcttgatcttctctctgcaaggtcgggggttctttggggagtaaatcacagcgtttgggtttgcattcgaagcactaccaagtctactccacagggtcactgcacggggagcaagtaaaggaaaacgaggagaatctgagagtgctccttcgtgcagtgtgtgtgtgtgtgtgtgtgtgtgtgtgtgtgtgtaggcaaagctgagatttacatggtgtgaactgttaaatgttaacagttaaatcccacacttttcaggagcatcttaatattctggcatgctataaaatttttgagacttgtttaaagaaggggacttcctttttaatttagaacaaattagtagttgttataacattatagatactaatcagtaacaatactagtaggtaatgctttctgtaagtagacacaccccaaaagtatctgaaaagtatcaccaaaacggagcgtgctttcacactcctgcaaaacaaattagcccttaaacagaataattaacatcccgagggaagataaagcatataggttccttgaatcattacgttacatttaaagtcggtcctgttcagtttgcctttgtccctaaggagtaaaaatagcatcaaattgcttgtttggttttccccttttgaaactcagcatagtgtttggttatccat

SEQ ID NO: 11640 - DNA, 6000 bp, Homo sapiens
gaagggcgggagcctggccccacacctcgggcccgaccccgggccccccacaagccccatgaggtaccatgctctgcttcatgctcttccatcaacttcccacacgaccctgcccctacctctcagaccagctgtaatctcaagcctcagggttgccactgttgttttgttgttgtttgagacagtctcgctctgttgcccaggatggagtgcagtggtgtgatctcagctcactgcaacctctgcctcctgggtttaagcgattctcctgcctcagcctcctgagtagctgggattacaggcacctgctacgcccagctaatttttgtatttttagtagagatgcagttttaccatgttggccaggctggtctccaactcctagcctctaggaatccgcccgcctcggcctcccaaagtgctaggattacaggcatgagctgccgcgccgggcccagggatgccacctttggttgtgaaggttgtacactgcacaagagtgcagtatacacatcttagagcttattgacttgggcactgtgattatactccccatggtggatgtcgttgatttgagtattgtggttataattcacgtctgttaaaaggcctgcaaaacgccattgctttcatatacagtggccatttctcaagtgctcactctgaggcacgtagcgtgccatgtgcttttccttttcatccttctgacagttctttgaggtgggtattattcccatttgacagatgagggaaactgcgtctcattggttagtcagttgtccagggtcccagctggctgtgggactggtgcgcctgtgcaccacccactgtgctcgtgctctccagggtcacttggctccctctgacaccactcacctctgacacccaccccagggctgcctccggctctgtaccctgaaatgccttctcttctctccccaaggtgtttgtggagctgaatgagttgctcctggacaaaaaccaggagccccagtggcgggagacagctcgctggatcaaatttgaagaggacgtggaggaggagactgagcgctgggggaagccccacgtggcctccctctccttccgcagtctcctggagctccgcaggaccctggcccatggtaaccccgctcccctccacctcccgcctggccagtccccaggaaattctcccacatggccccaaatctgtcttgagccccacgttgtgtgacagccccagagcccagaggaagcatggtccacacccagctcacatttgcattttcggccagcagcttcttgatattctcagataacaactgaagccgatgtgttttggttgcgaaaatgttcgagaagctatttagatgtaaagctttctgaaattcctggcatgccttggtaccatcttagagattctgtggaatgtgatctaatctgcagctgtgtagacctcacgaaatgaccaccgaccacagatgcaggacttccaagccctgtgtttgcttgcttgctccttcccaatgagtgaccactctcagttgttgttaaaaggcctgtttctaagcagctgaggttctgtggtttgaggcagcctaggaaaaaaattaattttttttttcgagacaggatcttgctctgttgcccaggctggagtacagtggtgtgatcttggctcactgcaacctccacctcccatgctcaagtgatcctcctgcctcagcctcccaagtagctggaactacaggcgcgtgctaccatgcctgcctaattgttttatttttagtagagatggggtttcaccatgttgcccagactggtctcaaactcctgggctcaagtgatttacccgcctcagcctcccaaaatgttgggaatacaggcatgagccactgtgcctggcttaaaattaaattaaaaaaaaaaaagtaaacgaagcagctgctgggcgcggtggctcatgcctataatcccagcaccttgggaggctgaggtgggtggattacgaggtcaggagattgagaccatcctggctaacaaggtgaaatcccatctctactaaaaatacaaaaaattagcggggcacggtggcaggtgcctgtagtcccagctacttgagaggctgaggcaggagaatggtgtgaacctgggaggtagagcttgcagtgagccaagatcatgccattgcgctccagcctgaacgacagagcgagactcttatcaccaaaaaaaaaaaaaaaaaaagcagctgaggacctagaaaccggcttttagaattgtttcccaactaggagtccataggccgtgagtgaggctcagggtctttgggtaaagggccgccgtggaagggctttctcactgggcgttgtggtctccagcctggctgctcaggggtgtttggttctgtttattctttagtctttgttcctgaaagttggccttgccagatgaatgacctggtaacttttgaagggactgttatttctgtgtgcaatggcgaggggaggttgagaagccgacaaggaagtcaagaagcttggggcggaggggggtcttcagatggctccagggtggccacacggacgaggctgcagaccagctgagttgtgtatcagggtagaactaggcccctagagtgacacagcacctggctcacttagaggagagttttctaacagccaagagggttcagccagagtgggcggcctggaccgtccccatggaggccggatgcttcctggaaggggtgtctgacaggcgtggcctagatggcctctctggtcactgaggttcagtagtctctgtggagcctcataacgttcctgggggtctgggggaggggaggaaccagagggttgatgtgacgtaggctcctgtgggagccagaactcgagcccgcgtccttcatgtgtaggctggtgttccagccccggcacccacccacctgtccccagctcctgctccccatcccatctcctgccactgttttgtgacctggggctgaggggccctctgtgccatcttatgctaggggctgtgctcttggatctggaccagcagaccctgcccggagtggcccaccaggtggtggagcagatggtcatctctgaccagatcaaggccgaggacagggccaacgtgctgcgggctctgctgttgaaacacaggtgaggccctgtgggccagttggggatgacacttcagcccacctgccctggcccttgtcattgaccctcctttgcctcactgccctctgccccaccagccacccaagtgatgagaaggacttctccttcccccgcaacatctcagctggctccctgggctccctgctggggcatcaccatggtcagggggctgagagtgacccccacgtcaccgagcctctcatgggaggtgttcctgagacccggctggaggtggagcgagaggtgaggggagaaccagccctgcctgggctggcggcagggctgaggaagcctgggtgtggactcagagtgggaggggcctggctgggctgagccctgtctgtgtcccccagcgtgagctgccgcctccagcaccaccagctggcatcacccgctccaagtccaagcacgagctgaaactgctggagaagattcctgagaatgccgaggccacggtggtccttgtgggtatgtggggcaggtcacatgtagggggcttggtggccaggccttgaggcagagtcctgtagtctccctggccctgccttggtgccaccctgggcgagggactggaaggcggtcctgctgctctgctcttgcccacgatggtcccacgcccctaggctgcgtggagttcctctcccgccccaccatggcctttgtgcggctccgggaggctgtggagttggacgcagtgttggaggtgccggtgcctgtgcgtttcctcttcctgctgctgggcccgagtagtgccaacatggactaccacgagatcggccgctccatctccaccctcatgtcagacaaggtcagctaccctcctcctctgggccctgcttcctggagcccatcctaggccagtcttgatccccatgactgcctcccacccactggccttgcccaccctcagctccaggccctcagccctcttctttgtgctctcccccatccccatgctgctttggcagcaattccacgaggcagcctacctggctgacgagcgggaggacctgctgacggccatcaacgccttcctggactgcagcgtggtgctgccgccttcagaagtgcagggcgaggagctgctgcgctctgtggcccacttccagcgccagatgctcaagaagcgagaggagcagggccggctgctacctacaggggctgggctggagcccaaatctgcccaagataagggtacggccagggcgggctggggccagggctgcctcgagggggtgaggtgggcaagaggggctggggcgccctgacggaggcctgggttgcagcgctcctgcagatggtagaggcggcaggggcagctgaagatgatccccttcggcggacggggcggccctttggggggctgatccgagatgtgcggcgccgctatccccactacctgagtgacttccgagatgcacttgaccctcagtgcctggccgcagtcatcttcatctactttgccgccctgtctcctgccatcacctttggggggctgctgggtgaggagagccttcaggtagggggcggcggggactgcccagggcctggccaccagctcctgagctggttcctacacccctaggagagaagacgcaggacctgataggggtgtcggagctgattatgtccacagcgctccagggcgtggtcttctgcctgctgggtgcccagcccctgttggtgatcggcttctcagggcccctgctggtctttgaggaggccttcttctcggtgagggctcttctcgcccatctccagccgcccctcccgtgccctagacacctccccacagcatccccacccagagctcaggacctgactgcccctccctccagttctgtagcagcaaccacctggagtacctggtgggccgtgtgtggatcggcttctggctggtgttcctggccctgctcatggtggccctggaggggagcttcctggtccgcttcgtctcccgcttcacccaggagatcttcgccttcttgatctcactcatcttcatctatgagaccttctacaagctggtgaaggtgggcaggcccctgccgagagctgggccaggagggccgaggtctcagggctggagggagtctcttggtcccatcctctggatttgaggccaggctggtctggagcatccccggggcttgttgccaacacgtataccagggctgcagattactcttttaattaattaattaatttgagacattcttactctgttgcccaggctggagtgcagtggcgtgaccttggctccccgcaacttctgcctcctgggttcaagcgattttcctgcctcagcctcccaagtagctgggattataggtgtgcaccgctatacctggctaatttttgtaattttagtagagacgggtttcaccgtattggtgaggcttgtcttgaactcctgacctcaggtgatccacccacctcggcctcccaaaatgctgggatcacaggatttagccaccacacctggccttaatttattttcaaacagcaactcgaactagacagatcaatctttcaaaaactcatacttttatttctttttttttttttttgagacagagtgttgctttgtcacccaggctggagtgcagttttggtgcaatctctgctcactgcaacctctgcctcctgggttgaagtgtttctcctgcctcagcctcccaagtagctgggattacaggcacacgccaccatgcccggctaaattttttgtatttttttagtagagatgggggttttaccatgttggccaggctggtcttgaactcctggcctcaagtgatccgcccgcctcgcctcccaaagtgct

SEQ ID NO: 11641 - DNA, 6000 bp, Homo sapiens
catgactggctaatttttacatttttctttggagagatcaggtctccctatgttgcccaggctggtctcggactcctggactcaagtgatcctcctcccttggcctcccaaagcattgggattacagacgtgagccaccgcacccgaaccctttcctttgtcttttctattttgttcataaagcatgtctctgttgatcactgcatgtatatgtggagggaaggacaatatgattttaagaaatgtaatatttagcatcttggccccaagattctacaatcctttcataggatttttttttttttttgagatgggggtcttgctctgtcacctaggctcaaggggagtggtgcaatcacagctcaagctatcctcccactgcagcctcgacctccagagctcaagctgtcctcccacctcagcctcctgagtaactgggaccacaggtgtgtgccaccatgcctggatttttttatgtttatattttgtagagatggagttgggattacaggtgtgagccactgcacccagcaaggaagatctcttgagtccaggagtttgagactagcctgggaaacacaatgagaccctacctctgcaaaaattacaaaatttagccgggcatggtggtgtatgcctgtagtcccagctgctcaggaggctaaggtgggaggattgcttgagcccgggtgttcgaggctgcagtgagttatgatttcaccactgcactccaacctggctgcaagaccctgtctcaaaaaacaaaaatggagctcagagaaaagagatttccagttaaggtgagtaagtttaaacagtagtcatgcgggctctgggcctgaatctggtcttcgaatatgactaatggcctagccctggggtaagcggacggcagctgcaagagcacagggagggggcgaggtggggcagagaggggtcctactgatggccgcaggggaaggtgcacgtgaggagtgagcagaaatacagcaggagaggcctggactagaaaggcacagaaaacccaggcaggggaagtcaggccaaggcaacagggagatgccggagagacttctgcctaagcctctgcgtgcacacaccatcctgcagttttatttcttgtagaaatgtgagaaagggaagcggctgctctctcctcttttagatccgttgcctattggtgttcattggatctggtcaccaattttccaaaatttagcacagtggtgattccatcaatcccctgaacctgccgggccacttggaagcatgtcttgcaacagtgcacagctacaccacgacctgcccatgggacgcagcgagggaagcagcctcatgagcaggcctgagtctctgcggtctcactgtgtccagatctgataatagctaattccaccaaatattagagggggctcacatttaattaaagagtggccatttgtgtgctccagactggaggtccccactgccctgaagtcaaaagaaaagtccttcagggaatatgccaatcttttcttatttctctgctgagctcctgccctctttgaatgcaattatgggaacaaataaaatggcttaactcaagtcccctgtgggacagtcagctctctgctgataaaaccagttgtgtgggcaatcattaaatgagaaatctaatatttaactaaatttaatagtctgttgctttggtgctttcctgtgaagggtgggatttcaatagagaggaacgaggtattcacacgcagcctgtgtagtccatgagcgattagaacatggtgcgttcccacatgaaaccagaactctcagatccggaaactggtaacgggctgtttggtggccagcctgtgttccgttagctctaggcaagcttaactcagtaggcagcagagaacattgctccctgagtttaaccttctccttcatgaccagcatttgagatcgcacactgacggctgaaacatcaaattcacatgcatatatatggagacaagagcgtactttaaccagctgtaagagggtctgtccccattttctctcagtttgagatttggccatccagacaggctcttgccactagcagacccccccagctgaagccctttctgggacccagaagcagaagctaactgatagcaagaagcccatctctgttctcattggtagggtctttctacctttgctcctgccagttcccctgatcttcatcggttgtcacttccatcatttgacccacatttgcacaccccaagttcctcacctgttttgcacctgggatgatcatgtcagcaggcagaggagcagagaccacaggttctccaagggttacagctgaggcgtcgagatgacctcatgagatcgaggcactggtctcctacaataagctggagtttggagcgtgtggatgaactgcctcatagtcccagagtcgagtgaattaacttaggtgcatcattagtctcctaaacatcagaaaattttccatcaacttctaaacaccagaaacttttccatcaacttctaaacaccagaaacttttccatcaatttctaaacaccagaaacttttccatcaatttaatgcagtttgctttgggtcctcgggtctgagctgtgtgggaaacactggttgatagtctggcctcagtttttccaactcttaccgttcaagagatctgagccctgaagacctttgcagcttcctgagacactcaggaggacctctcctcggtcctgtttagtttcctggggccacatgggaacaaggagaaagacttgggtagaaacccagactcgttaccatctaaagatgcttaatttccaagatatgaatcgattttccacaaacccatctaccccgggtacccaaaactagtgcatttcgtctctgggataggactgaacactgataccttggcgaggggtagggagaaggatttgctgccaggaaaatgaccaaaactttcatttggtgttaagtgtatccagagagcttgacaggtgcctgagatagggtggtcaggtccctcttggaggaggtaacgcttgcgttgatggaggagaaggagctagcaaggaagatttcaaacacagggcagcacgtgcaaaggccctggggcagcaaagagcttgggaaatgctgttctcttcattaccaggcagcactccctgctagtcttcctttcctgtaactgtgaatagaacatgaatgatatgcagtcactgtctcataaaccaactcctctcacctgagtgtgtgcctggagcattgcattaaagggctgagggcatttggactcagcaccaatgagtgctgccgcccatccattaggaacatgggctgaggctgtgaagctggcgcaggggcatgcaggccccttggggtggagtgcacctcccctaactcacgtgcatgcctgtgagggagagtgcgccacctctgcagccaagtctctgggtctcagagttaaggtcaagtctacttggacttcccttggacttcaccactgcagacaccccttgcagacgtagctgtgtttcctgctgggacacgtgtcctgcaagggacacgtttctcgcatgctacgtggtgttcggaacctttcccagtggtggtctaacgtcagatttgttaaaactctacctgtttgaaaactagtgtcactatttctccccttattttttatcaaagctcaatattcaaatgtgtccagcaacttgcaagtcattttcattttatgtactcgtcacaagcgctgggagcttccatttccccctgttcctctacagaaggttgccaggccttctgggcagagttcttgaataaagccacagccccatgttctccacacaaagccacacgtccagattctcctagttatgggcggtcatttgacctccagctgccccggagaagcgcccacctgcagagcagctttttttttttttttcaagggagttatatgggaggatgactggacatccattctagcattgtttgtgatcatttgtttacgctttaaacaaatgcacaaattgcagctgcttccaagtgatttgacgagccaaaggcaaagttccttgcagaaaaattccctttcacaatgaaccacaagttatccccatgtgtaggcttagtgtgagaagggagaaaggaagttgggtggtttttatgacacgtcagatggtgaaatgaaacagaatggccatttcagtacatgaacggagagttcctcaggggacttctttgcatctgaagaaatagataacgaggacgtgtgtgtgctgtcgcggcagaggcacaaaggtccagcgcatccacaccacagggcagaactgaccttggtctctaccacggagggaggacagccagtcccactgcagtgtgaagcaaggctcacacgactccactgtccacaaatacagtcaccgaagttaaggtctctccagagaccagcttatcttctgttttgggagagagatcagaatccattttatttctgggaacatttaataaagatgataccctagtttctacccacctttccttttctggttattatggccacaatttttggaaaaccatttgtcctaacagatgtgtaatgtaggttttcttaaaaccagcagtcatgggaagaatcataccaaaacctgtgcgtgtgacgccacggagaacaaaaacctctggtgggggaaggagaaagcctaagacggtggggagaatctttaatccacccaaattccagatttgagtctaggcttttgagcgcataacttgagcgtgttttttaatgcccagtttctttttctgtacactagaaataataataatcacctctgaggctgatgaaagcagcagttacgcacatgaaaagccatggcccgcagaggtcctccatgagtgaccactgcatctcagtgtgtccctgtttcctctctttcagaaatgtttgacctagaaacaaatgaacatgtcaagaaggccataaatgaccgacagatgcctaaagtggaatacagggacattgagattgatgattacagtaagtactacgtttttcccctctaaaagaaaaagaaaaagaaaacgtgggctgtgacacagtgcagtcatcagcagcaggtgccctgcaaggaagactccccaagcacgggggtgtatctttgcccctcagctcctctggcatggagtgtcttgtgttcagaaccaagatgctcactctggtgacaaaaccaaaaaaagcagggcacaggatctctctccctgagaggctgacagttgcttcaaagcaagaccacagactccaacgctctccttctttggtgaccgtgtcaagacaccgtccagaaaaacctcttccctctggaaattccctttctgtgccatctgaagtccttcctgcctcatcagctggtggattatgggctgatgaggggcgtccttgcagccagggtttacgtgaggaggtttgagtgctgttactccctaggaaatgcttctcactctgcctttctctgcctgtgcccttctttccttgaactgtccctccagtcattcggtaagttctcctgggcactaactctgtgctaggcgttgctaagcactaaacaccccagagcattagctggacctggactcacagctctaggagggaggcagagcctcggagcctcaactcccacctccgcacagatggctcccaagtcacccggctggccccgtgtcctcactgcccaccaggtcgttactcttggaaacccaagtgtaaaatgcccacagcggatttcactgtcttcccccagaactctgtcccgctccagacttccccacctctatgcatagcagccttttggtggtaagttggtgtcgaataactgagacttcaaaccttgaagctgtctttgagtcattcatgcagacaccacttacccatcacctctgaggctgtaaacgggtttccctcctgtgcaaactccgactgactgatagtaactgcaggag

SEQ ID NO: 11642 - DNA, 6000 bp, Homo sapiens
tgcatgagaaggtcttttcctaactgtcctaaatggaatcatcagcacttgagtgttactgacctcccaggagcggaagcgttgaagaagcacacattccgtaataggcaaactcagagagaatccatttacagaccataggcagattttcccactctccagtcatgccaggctgctcccaaagggtctttgaggaggaaaatcagtgaaccaaccgcctaggcacctgcagcttctcatgtcaggaaaaaccacttgtcagaatccatttatcacaccttgaggtggtgacttagagaggtactaaaattttttgctttcaaatacaaatattaatatggggctgggtgcagtggctcacacctgtaatcccagcactttgggacgctaaggcaggcggaccgcttgaggccaggagttcaagaccagcctgggcaacatggcaaaaccacatctctactaaaagtacaaaaattagccaggtgtggtggcacacacctgtaatcccagctacttgggaggctgaggcatgagaatcacttgaacccaggaggtggaggttgcagcgagctgagatcacgccactgcactccagcctgggtgacagaggaagactctgtctcaaaaaaaaaaaaaaaagaagaagaaggaaagaaagaaaaatcagcatgggccagatgaggtggctcatgcctataatcccagcactttgggaggctgaggcaggaggattgcttcagcccaagagtttgaagccagcctgggcaacatagtgagactttgtctcttcaaaaaatacaataattagctgggcatggtggcgcacgcctgtagtcccagctactcggggaactgaggtgggaggattacttcaacctcagagttcgcaactgcaatgagctatgatcacgccactacactccaccctgggcaacagggagaacttgtctcaaaaaataaatgaataaataaaattaaaatattagtctgttttgttgttgtaaatcaattgaggcttttttttaaaaaaaagttttattttgaaatcattatagattcacaggaagtggtggctgggcatggtggctcaagcctgtaatcccagcactttgggaagccaaggtgggaggattgcttgagctgaagagtttgagactagcctggccaacatggcaaaaccctgactctactaaaaaaaaatacagaaattagcaagttgtggtggcatgcgcctgtagtcccagctacgcaggaagctgagaggctgaggcggaaggatcgcttgagcccaagaggttgaggctgcagtaagttgtgatcacagcatttcactccatactgggcaacaaagcaagaccctgtctcaaaaaaagaagaggccaggcacagcggctcacacctgtaatcccagcactttgggaggccgagttggggaggccatgaggtcaggagttcaagaccagcctggccaacatgatgaaaccccgtctctactaaaaatagaacaattagctgggcgcagtggcacgcgcctgtagtcccagctacttgggaggctgaaggaggagaatcgtttgaacccaggaggcacaggttgcagtgaaccgagatcacatcattgcactccagcctgggcaacagagaaagactccgtctcaaaaaaaaaaaaaaagaagaagaagaagaagacaaagaagaaagaaaagaaaagaaaggaatgtatagggatgtgtggttacccttcaccctagcttcctcaatgtttacatcttttttttttttctttctgagacggagttttgctcttgttgcccaggctggagtgcaatggcgcgatctcagctcactgcaacttccgcctcccgggttcaagcgattctcctgcgtcagcctcccgagtagctgggattacaggcatgcgccaccacccctggctaattttgtatttttagtagagatggggtttctccatgttggtcaggctggtctcaaactcccgacctcaggtgatctgcctgcctcgacctcccaaagtgctgggattataggcgtgagccactgcgcccagcaatgtttacatcttccataaaattataataccaaaaccaagaacatgacatgatacaaggtgtgtgtatagttctgttattttatcatatacaattaagatacaaaactatttcatcatcataaatacccctttgtactacctctttgtaatcacacccactcttgccctccacaatccttaaacctaaacattactaatctgtttttcacctgtgcaatttcatcattttgaagatgttttataaacggaatcatacaatgtgtgagctttaagactagctttttttactcattataatgcccttgggatccatccaaattgttgcatacatcaacagttattccttttttatctttttcttttctttttttttttttttgagacagagtctcactctgtcccccaggctggagtgcagtgacgcaagcacagctcactgcagcctcaacttcttgggctcaagtgatcctcccacctcagcctctcgtgtagctgggtccacaagaatcaccatgcctggctaattattttatttttgtagagttggagtctcactgtgtttcccaggatggtctcaaattcctgggctcaagtgatcctcctgccacagcctcctgggtagctgagactacaggcacacgccacctcacccagctaaaggaaattttgaatgcttcctgtttttggctattacaaataaaactgctatgagcattcacatactggttttttttgtgaagatgtaagttttcatttctcttggataaatgcccaggagtacaattgctagttcatatggtgaatgtacatttagatttttaagacactgtcagactatatttcagagtatctggaccattttacattcccatcagcaatgtgtgaggaacccagtttctccatatcctcactagcatttgatatcaccaactatttttttttcaaccattctcataggtgggtggcaataactcatcatcgttctttttttttcccctaaaacagggtctctctctgtcacccaggctggagtgcagtggcacaatcatagctcactgcaggctcaacctcccaggctcaagtcatcctcccacctcagccttgcaagtaactgactacagcccagtgcgcaccatcatgcccggctatgtttctaattttttatagagatggggtctccctatgttgcccaggctggtcttgagctcttggtctcaagcgatcctcctgcctttgcttccggaagtgttgggattacaggcatgagccactactcctggccactgtttgctttaatgggaaagacgagagcttgcttaggaaccgaaaaatctgattgggaaggagcagctgaacatggaagacagatagatgtgcagatggagggaaagaggtccctgagatgacggaaggaatggaatctggacttcagggaaggggcttccccaggccaggggaggagggagggaggaaggacaggtgcgggcagcaggggcgtggagattttgcagcatggtgatggcagccttccatcaagtattttcttttcttttttttttttttttttcttttgagatggagtcttgctctgttgcccaggctggagtgcagtggtgcgatctcagctcactgcaacctccacctcccgggttcaggcgattctcccacctcagcctctcgagtagctgggattacaggcacccgccaccacacctgactaatttttgtatttttagtagagacggggtttcaccatgtcagccaggctggtctcgaactcctgacctcaagtgatctgcccacctcagcctcccaaagtgctgggattacaggtatgagccacctcgcctggtacatctagtactttctttttccaagaaataggaaacagcatcatgaccaggagtcaggaaattaagtcctgccgggcccacactcatgccacctgttttcctcccttggcctcagtcttcccagcctcaccataaaaagctgggactggtccccaatttgtttgatcctcaggagcttctcaacattttttttttttggccagtgcagtggctcatgcctgtaatcccaacactttggaaggctgaggcaggagaatcccttgaactcggggagacggacgttgctgtgagctgagatcacaccattgcactccagcctgggcaacaagagcgaaactccatctcaaaaaaaaaaaaaagaactacacaagaaggcaaaattaggctgggtgcggtggctcacacctgtaaacccagcactttgggaggccgaggcaggcggatcccttgaggtcaggatttcaaggccatcctggccaacatggagaaacccagtctctactaaaaatacaaaattagcctggcatggtggtgcatgcctgtaatcccaggtactcgggcgctgaggcacgagaattgattaagcctgggaggcggaggatgcagggagccgaaatcgtgccattgcactccagcagcctgggtgacagagagagactctgtctgaaaaaaaagaaaaaagaaaaaaaaagaaggcaaaatcagcagcccccaagtgaggttgtgaggtcctgtctatgtgggaaacccactccatacactgtggctcctgggaccatttccaaaccctcagctgagatgtgggtcgggacatcatcaggcgggactcctgggctggatcagggctacctccaaagatcaggatgcttggctgccctgcaaaggggtggagacctatccaggccttcctgaaacctgaaccctggggtgggggggctgtggggggaggaggggctgcctggccttgagagtccatgcctcccccaaccacatagctccgcctccacctgggtgccctttttctggggccgctccagctggtgccggccacctccactcccctttgcttcttgctgtccctaaggtcggatggggacaggctggggccaccagccagctccatggacagggactttgcctctgctcaccttccagctgtggaaagaaaagaagaaacgcctgtgttgatttccatttggaagatccttcctcctcctaaacttccaggggcagacaaagtgattcgatcttggattgactgtagaagaagggacagaaagagcccagaacattcccccaggtatgaatccttcacttttgctggagtgtttgtgtgtgtgtgcgtgtgcatgcatgtgtgtgtgtgtgtgtgtgtgtgtgtgtgtgtgtgagacagagagagagagagagagagaggcaaccatttcccactggtcagatgggaaattgtccttgttaatctcccaagccccttctggctgctgttttctatgattctgtagccatcaccttgattcagtcactcaacaaacatttcctgagtatccaccctgtgccaagggcaaccactgaatgagatctggtttccaccctcaagggtctgcagtctcgatggagaaacagtaatgataacaatagctaccacacctagagtgggccagacactgggctaagccttgtgaaaacatttgctcattgaacttggcaaaaatgataaggggtaagtggatcacgaaagccattttacagatgagaacagtgaggctttgcaaggtgaaggtcatacagctaggagatggtggagctgatgctgcaatatgaaccgctgtgttaggctgccggctgtactgtagaaaatgtaggcaacagatggactctgaaagggatatgaagggatgggagggctttcaagagccctaatcaccaaggacagggagggatgaagccttgtcttgccagtgttcccttgggcgtgaagcaggagcagactggaggggcccaccttggagctgggagggtaggaggcaggcttggcagagggctctggggtcacctgggatttgaaatctgtgggga

SEQ ID NO: 11643 - DNA, 6000 bp, Homo sapiens
aaatggtgggtttccaattctgttgtttcatatttattataaaaaacaactttccctcaacaccaatttggttttctgatatatagtttaatcaggaaagatacatcagaaaatttgaattattttcttttaatggacaattttagaataagggcttaatgctagctacttgcaatagtgtccagtggattttttttttccttttattgacctcccctttttggaacatcattaagaactcatgaatttttatatattcagtatgtttctaacaactgcatccattactttttttgatgcttaaattgtccatctttggccaaaggagctatttgatattggtttctgtgtccctttgacacattttgttgttaatggattcccggctttgtgggacaagttatcctatgctcatcttgtgtataacctgacccagatctgaagtcagacatttggttggtcagctctagtttcttttagttggaaattgtattaaaaaaccccaaactggatgatttacattatttttatttgtaataaaaatgaaaggttatatatttaaaattttattccaaggtagtaagtttagaatcaagtatttagttcataaataaaactgtaattgcttgttttgtttttgttttaagctcgcttttaaattatttttataaaaggggatataccttgttataagcatacctaaaattggattaataactatataccaatcttacattttttccagatggtacaatttatattcaaaattttccaaaacgtttgagatgaaggatataaatgaaatctcaagtgttttcatatcaattcaaataataatatcaatttcatcagagttgctatagtaaaagcttttaaaaactttattgaaatgtcatggtttgatatgagctgacaaatatgagttttagcttgaaataagtaaagggctataatttcaggtgttaacagaagcctgtgtggaaatatatgacattcaaacaaatgaaatgcaaaaggccatttggcagtaattctccaagtgaggtttgagaacacctaggggttactgaaacccttcccggagctttgtaaggtcctctctttttcaactatgaattcgtatgacagttaattttcttcatatcttaggtataacaacatatcacaacagcctgaatgcagaggcagaatatgagaatccagtgctctccttaagccagataataagagatttataaaatgttaaaaatgccacttttctctaattttttggaaaaaaagtagtcattatttataaaaataacttttacagtaacatgtaatgggtttaaattaagcaaacacatgtctaacatttttctatcttaaattttaatacagtaaatatggacatatataacccacataaacaacagctctttaaagttctcaatcatttttaagaatgtaaagagaacttgagatcaaaaagtagtttgagaactgctactctatgataccttctattatttgcttaccaatggtaagtatgtatagataggaatatattttaatatctatatttgtggaatctgtaaacttaattattttaactttgtttaaatatctctttgaccattagatttgatgcctaactatagtttaaatttgtaccttagttaggactttatgattcattttcccctgatggtattaacaacaaatagaggtctgctttaatatataaggagacaaggcaaatatatttgaactagatacataaagccaaatattcagcttagaatttaattgataaattagaataaaataggatgctctaactgctgcttctttttctcataaacttttttctcccaaagatcagtttcaggttcagagcaaaattgagcaggaagtatagggttcctatatattcctgtaccccacatctgcacagcctccctgactatgaatatcctgtaccagagcagtatatttgttacaattgatgaacttacattgacatcattatcacccaaagttgagattttatattaaggctccctctttgggttgtatattttatgggtttggacaaatgtataatgacatgcatcaccattatcatatcatacagaatagtttcactgccctaaaaatctgtgcttcatatccccctcctctgtgacctctggcaatcactgatctttttactgtctccatatgtgatggttaatactgagtgtcagcttgaatgtattgaaggatagaaagtattgatcctgggtgtgtctatgagggtgttgccaaggagattaacatttgagtcagtgggctgggaaaggcagacccacctttaattgggtgggcaccatctaataagctgccagtgaatataaagcaggcagaaaaacatgaaaaggagagactggcctagtctctcagcctacagctttctcctgtgctggacgcttactgccctcaaacatcggattcaaagttcttcaattttgagactcggactggctctcttgctcctcaagcttgcagacagcctattgtgggactttgtcatcatgtaagttaatacttaataaactcctctttatatttatatgtctatcctattggttctgtccctctaggaaaccctgactaatataccatagttctgccctttccagatattagcttctttttaagtacacttgatgaatcttagtgataaaatcaggccagacctagcaactctttttgtatgtttattgacttcccaatacaataaaggccataaacacctgtctttgttgtttattcacctacattccatcccagactgtcagttcctagtgaccaggagctccattcaatttggggtcatggtaccaaatagttcttgactgctatttgatgagggtggtcctgtcacctaagtgctcttgaaattaagtccttaagcactggccgaaaagagcttactttgcagtaattatttcagtgacaagtaagaaaaactgggacatatccccttcacaggagagcaattttgctctctttaggaaactcttggaattttagttatcaggctatttaagaccctgagtagattcttaaacctttagaataaattttgaaccaagagtgccagaatgtctgttatttacattagtattaagtgatctgaaagtgcacagagtagtttggcagtatctagagggagaatagagacagaaataatgaagatacaactggaggagtaagaaaaggagaaaaaaagtattttatgtctgttcagtatttctaggtgccactgctgctaaatgcctgggcttcagcctaggttgggttgctcctagcaaagaaaaccagtccctgagacaacgagtattgccagggaagacaggctttaatgcaggtgatgctggcagggagaccagtctcaaacatgtcttagggagactaaagttagggctttctatagcagggaattatggaggggtaaggaagaggagtttgtgaacaggcagcagatgcacctcattgtccagatgtagtgttctggaaagttgcatttccttgacactatctgggaggtctgacagtttatctgctgagaaaggaactcaggtaaaatgcacgcaagtttctcaagtttcacttcgaagggaaaatttggccggtttcggtcttccctttctatttatcaattcctcaatcatgcggaatctggtagttgatctttctggctgcttcacgtgaaggaagggcatcttgggatgatatggaatgaaaatatcgcacctgtaattgcaagtacttacgagtacctggttggcatccagcttgttggagcaccatgatttgggtactttcatcaacattttaaaccacattgaattaggataattaataacatggataagaaggtttctttgtaggttgtaataacccagttaagagtttgtaccattcggccgggcgcagtggctcacgcctgtaatcctagcactttgggaggcctaggtgagcggatcacgaggtcaggagatggagaccatctttgctaacacggtgaaatcccatctctactaaaaatacaagaagattagccgggcatggtggcgggggcctgtagtcccggctactagggaggctgaggcaggagaatggcgtgaacccgggaggcggagattgcagtgtcgctctggcgacagagcgagactccgtctcaggaaaaaaaaaaaaagagtttgtaccatttgagggcaaaagcttcagtatgaaattcccgtttctctcaagtaaaccgcctgtcctgtgttactcactttgttttacctggaggcagcaaaactgaatagttttcctgagtgctcatgagtaggaaaaaatgaaatgaagagttgcccagagatcgctagtgaggtgctttgccactactgccctgtacttaagtaactgtgagggttctctgtttcctggcttctaaaacaagaggaagagctgaagacacagtttcatagacttttcggctctttattgtagtctcccccattagtacgttgctgagcttagggcaagtgctcaataatagcttgctgaattagtgttgtgtttgatcctttcagatccacgccgcattttgagcccgacctgggcgggcggtccagagaccagttttccgccgggggcggagcttcgggcggccagcgcgcgacggggcagcggggcggagcttgccgccggcggagggcggggtctgcgcggggacttcccccgggctgagctgcgcagcgggtgcggagggcgggcgcccggcgtccggcggcgggtggggggctgtgaggctggcaggggtcggcgggcgcgtagccgccgacccttggtggtctcttgggctggggacccttccctgggagtcggccccggccccggcggggcgggcgttgccgggaggcggaggggtgcgcggccgcgagtcctgcgtgatcgcgagcatgtgtgcgtgcgcgtgtttatctgaggcgcgtgcggcggccaccccagcctagtcctcttcttggtgccactggctaactaggttgagaaaccggcgccacaggcggcacacctggcccggagctggcccgctcctccccgccgagccggcgccccaacaacgcgccctctcccagtcctcacaaaggggcctagtccggcccccggctctggccgtgagggagcgctgtgggggcgcgctgccttctgcctggaagtgttgggcaggtggtgggagagcgtcaggcttgaacaacatgattttaaagcacgtgtctgtctgtcgttttttacttttagggttttggccaaattgggcgagggcacaaaataaccacttaccccttctcaccgaggaagagcgggagaaagggtaagtaaggaatggtcaggggtggaaggacctaggactttatcctgagagcgagcgagagagagaagggctagatgtccagaactgctcgtggggaacttgggcccagattctaccttttcatcgggaactggaggacccaccttcaaagtcacaggctccaggccccggactgttttcagcctcacacagtctatagagtttaacagcttgggcatgtggatcccttttagccccttgacccgacagaaaactgcacttcccctttacctgtttttaccttggaacattggtcctctctagttgtctgtctccggcccctatcttattagccagctttgactaatccctgagaccatagcactaaagaatccaggtcctgtttgataatgaacagtaacccccctagggatgtttacattttaaaagggtactcctgaaaaaatcctttaggaccccaaagcataaagttagtaacaagattacaagtgttgaagttctttgggatctctcaagcttacagaagaagatgttttgaggggagagagatgaccaggctgggcctttttctctgggctttcactcttggtacctcctggcaagcattccat

SEQ ID NO: 11644 - DNA, 6000 bp, Homo sapiens
ttgatgccatttattgaaataggaaatacaagaatgaggagtttacatcacctgctacccttccctctttcttccagagacatcacacatgagatagtaagttctctggaagataaacattaccaaaatcatcagataataaggtccagaatccaagcattagcaaaatcatcaactactaaacacccattcggagggaaaaaagttgactttgacagaatattacaatatggagatacagattaatactcagaagaaatagcctcagtcacaaaagcctcctaaatgtattattactgaattgtgctaccttgctgatttttaaaaacagcaaaagaacaaatgccaatgacaccacgtgagggatgctgaatctatttattatctgttcttaattttaggagacaaattgaaattctggttactgttcagatgtatgtaaagcagtgtcctttaacccttgacctagtgtgccaggtgcagtagctcacgcctgtaatcccagcactttgggaggccgaggagggtggatcacctgtggtcaggagtttgagaccagcctggcctagatggcgaaactctgtctctactaaaaatataaaaattagctgggcatggtggcacacgcctgtaatcccagctactcgggaggctgtggcaggagaatcacttgaacccgggaggcggaggttgcagtgagctgagatcgtgccactccactccagcttgggttacagagcaggactctgtctcaaaaaaaaaaacaaaaaaaaaaaacaaaaaacaaaaacaaaaaaagcaaaaaaatccttgacctcaatgtggggactttcttggagaaggatggagccacagaagtctggcaacacagtggtctcagtgagtgttgcacctgcctgcaccccacccactgactcactctagcagagattttgaggaattgcaaggatttctataaaaagtcttcctaggcctcactgtcccagggtattaaacacacagactaacattttaatcagagcaagaagaaaatctcttaaaagaagcagttttcaagaagtcaaaaaggtgtatgttttttaaaaattttatttttattatactttaagttccagggtacatgtgcacaacttggaggtttgttgcatatgtatacatgtgccatattggtttgctgcacccattaactcgtcatttacattaggtatttctcctaatgctatcccttccccatcccccaaccccacgacaggcccgggtatgtgatgttccctgccctgtgtccaagtgttctcattgttcaatttccacctataagtgagaacatgtggtgtttggttttctgtccttgcgatagtttgctcacaatgatggttttcagcttcatccatgtccctacaaaggacatgaactcatccaaaaaggtgtatgatttttacagggaaagacatacttgataacctaaatgactgcctaacaaaaaatatacttttaatataaatatttacacctaaaatttatatcacaccttgttggctttgaaaagattttggaaaaagtaacagaatgatacataggttattaagcagaatttttaatgacaactttatcttataaaaatgacataaaaaatcaaccattaatttctcctgttgactgctacaagtcaatgagaatactgggtatttctcaccgagggtgagaaatttttttatgttatagataccgcaaattcactactactcaacacttttattgaaaacaaactggaatcaaaaactaagctttctatcagttacttaattcaatctactagtcattgaaacattggtcctggattatttcctcaaagtttgtgacaatatgggggaaagaacactcatatactacaggtggcaatgtatgctgaatatattttaagaggaaagtctggcatctgtcaaaattttaaacttgcataacctttgatccagcaattttctcccaaaatatacaaccagtgggcaagaatatatgtacataaagttgttcattgcaacattactgaaaaactaaagtcacactatatgttcatttataagggaatggataaagaatggcacaatcatattttggaatatgatgggcacagtccttaaaaaaaaaggaaacaaatgtactgacgtggaagggtttctatgatagactgctgaaagaaaaaagaaggttgcagatctttcagtttatatagatttatccctttttattataaaaatcaaatcataggccgggcgcggtggcttacgcctgtaatcccagcactttgggaggccgagacgggcggatcacgaggtcagcagatcgagacctcctggctaacacggtgaaaccccgtctctactaaaaatacaaaaaactagccgggcttgttggctggcgcctgtagtcccagttactcgggaggctgaggcaggagaatggcgtgaacctgggaggcggagcttgcagtgagccgagatcgcgccactgcactccagcctggttgacaaagcgagactccgtctcaaaaaaaaaaaaaaaaaaaaaaaatcaaatcatacagacgtgtgtcatataagaatatggtggtttaacagaatacggattgtaggattaaaaaaaaaaaaagaagaagaagaatatgttggaaagaatatgtaccaaactcttatcacttaatactcggggagtggtgctgtgaggtgagggaattttcattttttttacttcatacacttctgaatggtttgaagtgcttttaaaaacttttaaacttgtaaaatttaaaaataaatatttttaaatattttacatttttgaaaggcatatcctttttttttgttttgtttttgatacagagtcttgctctgcctcccaggctggagtgcagtggtggatcatggctcaccacaacctccgcctcccgggctcaagggattctcctgcctcggcctcccgagtagctgggactacaggcatccgccaccacgcccggctaatttttgtatttttagtagagacggggtttcaccatattggccaggctggtctcgaactcctgaccttgtgatccactcgcctcggcctcccaaagtgctggtattacaggggtgagccaccgtgcccggccattttttaaaataagttagactgtgagataaattcaccagtttagatcttaaactggtagccctctggaactttgaaaatctaggaaaccgtaatagtctgttaccatcagatagcccaatatataaccaacccaaaaataaaccattagggtgttaaattcaatatttaactcaggagactaccaaagatttgtttggtagaggtactaaaataatttcagagtagggagttccactgttgggaagtgggaaaaaactgcacttcaactctgtgccgctgaggtaaatacttaagatgatatcaatttaactgtgaaagcaaaaacaaataaatcgaaaaacaaagtcgcaacagtctgagaactatatttaagccccaaaccatgttcatcagaaaaagacaacttgtgctaaattacacatcaagacaaaaatggggtggggggaatgggggagggatagactaaaggtaaaagagtcctaaacacaatccacctgcagctttcaaaatttggttttttattcctacagtggatcagaggacaacctgaaagtcaggtacagccaaagttgtgatggttttcaaaactcttttcaaatgttctttgaagccacgagtgcaaattatctatcactttccttttctttctctaaggacccagagactgggaagatctctcaggctccacatacaaatctgaagaacacccagagcagttaaccatctacagggaggttgtgagatacacacactttcccttcagaggtcacctcagccacaaactgggcaaatctgtagagtggagagcagtgaccaccagtctgcgactggaaatactccggaagctaaataaaacacacctgcgaggtcaaaccaagcaaaccaaggcagtgtactggtgaggagaaagagctgctaatcccaaaattataaacacacgcgcgcgaaccagatctgaaccaaacccactcagcagctagctcaaagctgggagctccaaaccagaagacaaacgctcagggagcttccccggcggaggggaaggccattccatggcattttctccgccatcccatggcattttctccgccatccccgggcagccccaaccaagtagccgccaccggctccaacccatcccgctgggccaccacccgtggggcccagtcgaacccaggtggccccagagctgaagggctcctagggtcagaccagaggtccgttgcacacccggtcatagagaaaggaagacacatcagccgcgcctccggggcaccgtactcacccccataacctacacccccgactgtgctgcagctcccatcacggtcttcctgcattcgggcgacagccccctgggtcttggaagcagccattacccggcagaaaagaaaagggagggccgcagggcgggtcggaggcggggtggcaccagtagaaacgctactggaggcgaactccccgtcgacgtaatgttttctccacacctacgccgcgctctggaccaataggacgcaatcagtaaaactgaatccccgccccgaaccacatttgccgcgcccacttccgggatggggaggccaagaactacaattcccagcgtgctgcggggccctgggacgggagggctggactaggcgctggcgggcgggggtgcgccggagagtgccccggcgtgttcgcttagttcagtgaatcagaacaatgactgcgccgccgggtacccgggagcgcgtcggaggactgtgagcagccgccgccgggagagctgcgggcggcgcagtgtcaacgctgggctcgggagcctccagcgcagatcctgcccagcgcccgcagcccgcgcgaagccgctgggctccggcactgcagcgctgctcggggactgtgcattgttgtgagccggagaaggggcgcggggattacaaagcctgaagaccccggagcccctttagccatgtggatacctacggagcacgagaaatacggcgtgggtgagtctccgcggggcgaacttttattctgctctggcccgagcgagtgcgcatttctcgtccttgcccccgcgcccctctcgctccgcccggttgaaaatgcctaatcctggcatcgcgcagctggtacggggctttgccgagccagctccaggcagagggctgcgcaccaggctctcgccccgcaccgcctgctcggcgcgccccgcactggttcccgaagcgccgggacagcttgggggagcgcgcggccggcccgctagcttcgggctctgcctgcggagtttggagtggcgactgggcgtgtgtgtgtgtgtgtgtgtgtgtgtcaagttggaagaggaggcgaatggggtttctctccttccttacccttcttccccaaagcgacagggagctgcaacggttcctctgggtggagagggagacaacaacactcgggcagagagaacacccccaaaacagtagggaggcgcaaacccttccctctggctcggatcgacattcccggagtgtggaatgtggcagggtcctggagagagccgctctgacaagctgagccctctctgaccctcctccctctctgcgatcccggatttatggggtgtgtatgttgcggggcgggggcattggtaaatttcaacatctgcgccgctcggttctttggtctttggagaagaacgggtatttcagcagtgtttttacttctggccaccctctcgaccccgggtgagcgcagtgggggcggtgtggcggtacagggctgctgagtgataaatggggagggggatcggaaagcctggttcttgggggcagggagatagcttttaggaaagcataccctgacactggcgttcgg

SEQ ID NO: 11645 - DNA, 6000 bp, Homo sapiens
cacaccactgccctccagcctgggtgacaggtgagactctgtctcagaaaaaaaaaaaatcaatttcttggtgcatctcttcatttattttctctttatatctctctgcctgttactattctttggtcttttgttttttgagatggagtctcgctctgtggcctggctggagtgcagtggcacaatcatggctcactgcaacctcccaggctccagtgatcttcccaccttagcctcgagggtacctgggactacacacacatgataatttatttatttatatatttttttgagagatgagggtctcactatgttgcccagactggtctcaaactcctaggctcaagtgatcctccctccttggcctcccaaagtgctgggactacaggcctgagccatcacacccagcctctgctcatttttctatagggcttgttcatctatttttcttattgactcataaaagctgtaagtcttattgactaacatagatagtaacattttctccagtttgttagttttttttcacagtgccatacagatgcttttggttttgaattggtatacagttcaagctactgatgttctagaaagttgcaaattgtccttttaaaataaaaatatttctatcatttaaaaaaggttctcttttatgtgatggcccataagaaaaaggaggagaaaggacagaatgaagcaaaagaggaatgagggctctattatattcctcagactcaacgggattgatgagtgattttcgaactttcatttacacaggaatcacttggagatctttgaaaatgcagagtatgagtcagcaggtccgggactgggcttgagattttgcatgtctaacaagctcccaggtgaggtagatggcccacgggccatacctggagcagcaggctttaaatcacaacaagggaaagcactgctggtttcatggatcatcctaacgacgtgaaaattatcatctgttttgaaaactcttccttctctctttttaattaagcagggaaaattctaacttcttattctggaaagtaggagatggccagggctcattgggggaaggagaagaagaaggagaaggagaggaacaggaagaggaagaggaagaagacaaataagtggaagaggaggaggaagaggaagaagaagaggaagaggaagaagatgaataagtggaagaagaggaggaggaagaggaagaggaagaagaagaggaagaggaagaagacgaataagtggaagaagaggaggaggaggaagaggaagaaggaggaggaggagaagaagaagaaggggaaataataataatcagttttcatggagtaacatccctccacctcatggcctttagcgtatatggttacaatttttaatggcaagtatgcaggtataaaatgctcacttcttgaggccctcttgtagggctgggcaaaatgaagttgagagattcactggccttaagggcagaaatattccagccccctcctggctgtctcccctccccagcattataaaggggtttctctgtattattgtttgagaaagaatagctgtagtctaaacacaggccccaaaatggtaacctaataggtcctgtgaaaagcaacatggtcggggcgaggaaaaacaagtctcagaacaggactcaggagagctggatgcttgttctggctttagcacggttgcttcgcatgtattaaactttctaggcttggcttctccaactgtagaatggagattagagtagaaccttatttctcaaggctgatattgggataggaagaaaaaaaaatttcttggagaggtttccagaccttctgtagtaacagtgaggtcactgatctgtcttttttttttttttttttttttttttttttgagacagagactcactgggtcacccaggctggagtgcagtggcacgatctcggctcactgcaacctctacctcctggattcaagcgattctcctgcctcagcctccttagtagctgggattacaggcgcccgtcaccacgcccagctaattaattatttatttatttatttatttattttttaactatagatggggtttcatcatgttggccaggctggtctcatactcctgacctcaagtgatccacccaccttggcctcccaaagtgctgggattaaaggcgtgagccactgcacttggcctggtcactgatctcttataacctggtgtatactaacttggctttccaatttccaagcaagtttccacaaagctttctgctacctgcaaaataagtcatggcaaaagaggctctgggtaattttgacgtgtcctaaagtcaagaagttgcttgagttatgttcgtgcctatgtggactggagcggtatatgggcacaggtttctacgtgaaagtggtggatatagatcgatactggagaggaaaaggttaaatgtgcagcaaactcaaatggcggggagagcaagggtagtttgggacaaggattgccacgttagtagagggaaaggaaaaccagcatttactgagtgtgaattatctcactctgtctactaccctggagatgggaattattcctaactttttacaggaacttggagtcagcgatttgcccaaatttcacaactacaaagggcggagctgagtgagacctcaaagccccatgactccactcttggatcaccagcctctatctcccagcaaagcagaggtggttggggtgaagaggaagggaggtgagctcccgaccttgggcaaaacacttcacttcctttatttatttatttatttatttatttatttatttatttatttatttattgagacagagtctcactcagtcgcccaggctggagtgcagtagcaaggtatcggctcactgcaacctccacctcccaggttcaagcaattctcctgcctcagcctcccgagtagcttggactacaagcgcacgccactacgcctggctaatcatcttcttcttctgtctttcttcttcattttcttctttcttttttcttttcttttttttttttttaactgcagacgaggtttcaccatgttggccaggctggtcttgaactgacctcaagtgatccgcccgcctcggcctcccaaagtgctgggattacaggtgtgagctaccgcgcccggcccacttctttatgcctcagtttctccatctgtaccagggccagcacctctcacacagcaggtagtgaagctgctgctgctgctgccctgggctggcctacagtgagtgctcactgcacaggaggtattgcttccccccgcccagcaggttctcattataatcttgcaagtttgaagaaacccagccttgctaccaacagaagataaaaacagacatgcctctctgcctccagtctcatccccatgtccttggggagctgtcctcttccggctcgtcccatctatgcgccctcactatatcctcagaacagggcactccgtggctcctttaacttttttgcccctcctagcatggtgtggaaagggggcagatgggaggcctctttctgaaaccacctcctgttcggcggctgtacttggacctcagtttccctgttttgttcacgtggtcattgttaagtcttaggggacgtgtacagaggctaatattgagccaccaatcagttatttgacaaataccataggcgctctgtgagcaggagctggctcctatcccagaccccagccctgtgacctgctctccactcgcccggggtctttcttggctgggacaataaacctactgcatcaggtgattcctggggagtcagccccgtgctgggctcacacccagcccctctgcgttcatctcttacatgatctcatgcgaccatcatcacacgtccccaggctcctcccgggccaactccagaggcagtgcgtgtcacctccagctctcctcccacaaaaatgctggcctttcagcctccagtgcgcttagttcaccccataaactctgctaatgcttaccacatgctgagcgtcggcgcccgtccccacccccagccccacaggctcccgggtcccgccctgggagaccctcccactggccgaccctgccccaagactcgcccactccacggtgggaaacctgcaatgtgtccctccctaccccgccctcctccagcgccggccaaaagtgaccttggacgcttctacaatgccatatccactcctctgaacaggaggcgagtttgcacccagtggtgcctttggttgctagaaattaaaaacccgattgcgcgtgtttgcaattacggtaacttggcgcgtcacccccaagcactgagctagctggtggtagccgggcgcctctcggggcgcgccctattccgccctcggccctgggctgccgcacgatctgcgcgtcctgctgcacctgagcccttcccactcgggcgcccgcaccgctgcggggccgggcgaggatgcaccacccccgcccgcgagcccgccacgggagcgcgtgccgaatcgacgccgcctgcagtccccactacgggtccctagggggcgcagccggcgcgggaagccgcccgagccaggcgccgcggccggcacaaaattgcaggcgggcgggcgccgcgactttgaaaacaagcgagggcctggggggcgggccctgggagcgggcgccgcctccctcggccaatcaacggcgggcggcgggcggcgggcgcgggcggcgcgtgcggccgggctgtgaatggggagcggcggccgcggcagctgagggcgagcgcgaccgcgacgtgcgggcgggcgcactttcttctcagcgccgggcgggggcggcggcggcggcggctcctccgcgcccggcggacccctcggagctagcgcggcgggctcgggactgcgtgagcgccggacgcgaatttcccccgttgacaacttcttctcgcccggctcgtccccggcccgcgccgcgcccctcacgcggggacccaggacgccgcccctcagcgctgggcggccgctcacctcgggccggggggcgccgcgcctcccgcggagtggccgcgcccgctcggagccgtcccgcctgtcctgcccgcccgtccgtccggcgcggcgctcggggtggcggctgctcggcatggcccggggcgcccggccctcggcggccggtggcggcggcggcggcgcggagccccctgagcgcgcgggccccgggcggccgcggggatccccgcccggccgcgcccgcccctcgctggcgccgcgccccggcccggagccctcgcgaccccgggcggcgcccgagacctccggcggggacacggcgggcgcggggcggtgcggcgggcggcgggcggcaaagttggggccgggccgccgcggctggtgggcgctgctggcgctgcagctgcacttgctccgggcgctggcgcaaggtaggtgcgcgcggggtcgcgggccgggggcgtcgcctcggggcgcggaggcgcgaacttgagcagcgagagtgtgtccggggtccccccgcttcccggcccgggtcgggatgcgccttgctgggggctctagggagcccaggggctcctccacgccagactcggaggagagggaaacggagccccgtagagcctgcaccccgtctgctactttgcgttttattttttttataccgcagtagcacaaacaaaaatttttaagttgaggacccatttctcagctccttaaaaggatgcccgagtccccttcccattgcatggatgaaaaaggggctggtctgtacctgagtcttcgcaccgcagggtctggtttccggtgagtgacatccagaagacttggaaatatcaagtgccagtcgctgtgaaaagccttttccagcccctccccagggcctcgtcctctccccagcccccgcctgctcctgactcccccaagtcccaaagcccgaccccaagtgggtgctgcgcggccggtggagcaaaactttcagtgcccacagctt

SEQ ID NO: 11646 - DNA, 6000 bp, Homo sapiens
aacaagaaggccaggaggtggcagctcaccctcctgtaatcccagcactttgggaggcagaggctgaggtgtgaggttcacttgaggccaggagtttgagaccagccagggcaacacagtgagacctcatctctattttttaaaaagtggaaagaattacacagtgaaaactcacgtgctcactgcccgcattctgctctctgccttttctgatccctacctatccatctatgtagctccctatccacctgccaattccaaattttcacgcatttcaaagtcagtggcagacattagggcacttggcccttaaacatgcatatcgttagctagaggtcaaaatgtggtatgggctttgtttagttttgtttttaggcacagctgataaacagtgaaatctataaacttctttctttctttctttcttttttttttgagacggagtctcactctgtctcccaggctggagtgcaatggtaagatctcagctcagtgcaacctccgcctcccaggttcaagcaattctcctgcctcagcctcccaagcagctgggatcacaggcatgcaccaccacgcccagctaatttttgtatttttagtagagacggggtttcaccgtgttgcccaggctggtctcaaactcctgagctcaaagtgatccgccctccttggcctcccaaagtgctgggattgcaggcgtgagccactgcgcccagcaggaaagtagaaattctttaaccaatttccccatgccctttccattgttctatttagatttctttctttctgataacagcttttctgcttatttatagtttaccagaaaatcattttacccagttttttccttttttgtttttttttttttgtttttggcacacagcggaaggtatcttttgtgtttccctttgctgtttctgtatcccctaacgctgtcatgctgccagctttccatattattctaaatcttcctaaccgcatagcctggtggtgacttcagatttctctgcagggttacatattatttcactgatttctctgggtttttcaaatataacaatcatgtcatctgttccccatggcgggtaacgtaaatcggggactcgtcttggccaaggggactatttgcagtgtttggctcttatgacgaacgtctttgtatataaaaacttttctgcatttagaaatatttcctcaggccagatttttctggaccaaaaggtaagcatgtcttttaagccagtttatgttccaaaagggttggtcccattttcagtcccaccagcaacccagcaatggggagatctggaaaaaaaaaaaaaagaaaaagaaaagccttgtggcgggcgcggtggctcatgcctgtaatcccagcactttgggaggccaaggcaggcagatcacctgaggtcaggagtttgagaccagtggtgaaaccctgtctctactaaaaatacaaaaattaactaggcgtggtggtgggtgcctgtaatcccagctacgtgggaggctgaggcaggagaatcgcttgaactggggaggcagagattgcagtgagctaagatcgcaccactgcactccagcctgggtgacagagcgagactctgtctcaaaaaaaaaagcattgctccaaggattccaacccctcaccatggccaacaagaccccccttggctgtttcccttctccaacctcacctcccttctccccgctgtccctgttcccacaacagtggccctcctgttcttgaattaaatgagctgtttccagactcagcactttgcattggctgttccctgtgctgggaacacccttcccactaacatttccatcattcaaatctctcagttcagatatcgctttctcagaccacctggataccaaagcccagccctgtcccctagtcacgtgctggtgcctgctccacccccatctagtcttccaagcatttgatgcttccgaaattactgtacctgtttattgccagcacccaccagttaagtgcaactccaggggagcagggaccccttgatgcgtcccctgcctctagaaaatgtctcacatgcacctaataatgtttttattattgatttacttatttatttttagagacagggctttgctctattgtccaggctggggggcagtggcacaatgatagctcactgcagcctccacctcccaggctaacacaatcctcccgcctcagcctcccgagtagctgggattacaggcacacaccaccatgcccagcttattttcgcttttttttttttttttttttttcttggtagagatagagtctctatgttgcccaggctggtctcaaactcctgggctcaagccatcctctcgccttggcctctcaaagtgctgggattataggcgtgagccgctgcacctggcccaccaaataattcttatctggaaaccccacccccacatccaggacaaggcagggatccccgttgaaagctctaggcttatgggaagcactggagcttgtgaactttatttttattttattttattttattttttccagatggagttttgctcttgtcacccaggttggagtgcagtggagccatctcgactcactgcaacctctgcctcctgggttcaatcaattctcccgcctcagcctcctgggtagctgggattacaggcgcccaccaccacgcccagctaatttttgtatatttagtagagacggggtttcaccacgttggccaggctggtctcgggctcctgacctcaggtgatccgcccaccttggcctcccaatgtgctgggattataggtgtgagccactgcgcccagccgtcatgaactttaagattaactagttggagcaatggactgggcccccctgcagcagcacccccaacctccgcccagacagcagcagaggaaggagaggggtgtcccgccctaagagtgcgtcagcagcccccgccaccaggtgattccattcacctgggagaaaacggaggctcccaggtgaatggagtcacctcactcaacacttccttattcagctcccaatgcagtctgcccttcaagcaaatatttggctcctgctgtatgccagcccctgtatgcctcactgcgcactgaggatccaaagagaacgaaagcaggtctctactttcagggggctcccagtcctttagaagggatgggcaaggcctggagcaaaggtgctgaccccattggtggcggggcagaagaaaccgtgggggctccctggagcgctgacaacggagatgttgcttaagggggagaaggagctgatctggtggaaagtgaaggaagggcctcaggtaggagcctggtgggggcctgggcaggcgcctgtatccatcccacctggtggctcagacccggagggtctctcctgattcccatagacaggcccccacagagacccaggacaggtgtgattcccacctggttcctgatttcacctcgaggctggacccttctcccagccagtaacactcccagtcccccagggctggctgatgtcctatacctgggtcccctgggctctgctcagtctgtcctagagccaggctacaggtgagtagagggagaatagggcggggtcatgattccattcacctgggagaaaaacggaggctcccaggcaaagggagtcatgggaagcaacctagccagttctgatcccaagctgggaggagaaagggagcgggtcgaggtaggaaccaagtgagggcagggcatgactgagggtcggccacagcccccactcctggctggacttgctctccgccccttctccagcaggtgaactcctacccgtccttcgaaactttcaatctggtcacccagtggcctcgtgactgaacctacccacccactggcggcgttgctggcctcccaggcgagtggatctgttgagggggagcagcctgggcaccaaggctgaggggtgggcagcgggggtggtgggctgggtcagccgcaggtcacccggccctcccggggccaccatgccgcaccctggtgtgttggggatcctgatttcagcctcagcctgggcctggcgcctgcacagcccagctggatggaagggtggggggagggagaaaggaagaaaggagatgggagcagaggggaggagggggaagatgggggagaggggagggaagaggaaggggaaggagagggagggaggagggggagaaaagaggaggatggaggaggagtggggatggtagaagggaggagggagggaagacagagggaggactgagtaggagaatggggaaagcggaggagggagggagagggaggaggggagagacaggaagggaggaagagtgaggaggagaaagggaggagggtggaggggaggggagaagggaggagagcaggaggagggtaatggaggactttggaggaggggaggggtgggaggagggaaggggagggaagagaaagggggaggagtgggagggaggaggagagaaagggaaggggaagagaggaggagtggggagaatggagaggaaggggagaggagagagaagaggtgggaggtggaggaagagggaggggaagaggaggaatggggaggagggagagaggaggtagaaggggagggaggaggagggagagggggaagagaggaggaggaatggggaggaggaagaaggggagggagagggaggagaagagaggaatggagagggagggaaagagaggaggaatggggaggagggggagggaggagaggagggtgaagggaggagggaagagggtgaggaagggggaggggagggggagggaggagagaggagcgagagggaagagggaggaggaggggggaggaggagggaggggcggggccgggcgcggggggcgggcagaggcggggcgtggtggcctgggctgtgctcgtcgccgcgctcgtggaccggggccgggcggactcggggaccggcggaggacgccgggcgcgcccggcccgaggctgggggagcggggcggcgtggcgggcgcgccgaggaccccaggccgggccgggccgaggtaagcggtggccgcgggacgcggggagacgccggcggggacctgtcggagcctttgtctgcggcgcgcgcggcttcccccgccccctcccgcccgcccgggcgctgccccctctccccagcccgcccctgtcccgggaacccgaggccaccccggccgcgtcctgagcggcccagccccccgcgcccggcgacaagcgcggacccggacccctgggccctcgccatggagggggtcggcgccaccgcctccctgagcaccgcgcgggggtcctcccgcacgaagttcctccccggacccccccgcgccaccccatcgctcccctgcccccgccggccccttcctcgttctcggaaaaagcggccgggagaggcggggcctgggctccggggtcacctcgggacggcccagggggtctgtcctttgcctgggggcgcaggtccgcgagccaactttgcggctgatgaggccggacaggcggcagaaaggcgcggcgacccgggccggggagggcggtgggcccggggggccagcctgtggcccctgcatgcatcggtccccggggggctgcagaaagggggtggccggaggggcttgtaacccacccccacaggagttggagcagcttagaccgctgggctgcggaaagggcagcagaggcatcgttagccccggttaacggggaccaggggtgtaccaggcatcaactaaccagggctggtgactgagccgggagtgcgagcccaggcccgctttccaagtggaattcggttcccctggtccttcctggctggccggaggagcgcggcccccgagtgaggccagactggctttggggtcccgacgcccagcgcttccagctgccctgggccactgtgcacttcaggcccagtggaaatgggaggagccggagggggtcactgggccaggctccagtct

SEQ ID NO: 11647 - DNA, 6000 bp, Homo sapiens
aatccattcctataattttgagaaagtgggctgcaagggatttgagtatgtgtttgttcaggagatggtaaaaggaggtaaaggaaaggaaggtgccagaaaaaccagcaggagcaaccccgtgaatagcttatctagatggaaattttcaacagcgagttgaaaatatgcctcaagggagaatagatacagatgtggaagcattggtgctagagtcctaaggatccctgggattctcaagataaacagtactatctgctctttttaagtttctcctcaaaaatttatttcattcttagtggaacatttttctttaggaagtaggaggagataacacagcaaagtaagggtcagagatggaacagtcagagaggtcgaaagagctcccaggtggtatggtatcagagaagttaaaggaaaagagaggtttagagagtgagagtacgagagattaacctcctcaaacactgcagagaagttcaatggcatgaacactaagcaaagaccttccccactaattctgtcatatactattaagacacctggcatagcacttattatgtaatattttgcttattattcttcgccattaggtagggactacttgatattgttaatttttttattttcattatgcttcactagtaaatgagtgactgaatggatgaacacatgaatgaaaatgttaattgtgatggaaatagtagtttcagcagagaagtgggtgtggaagcccaattccaatgcctaaaataaacaaataatggtaagaaaagtcaaggagatatgctgagatatatagttttcttttttaaggaaaaaccaaacaaccccaaaactcaagttcttataatgtttggctttaattgtgatgattaaaaaaaaaaaaagaactgccatcgtatcaggaaatgttttttcagacagctagtttagaggagaaagttctgctaagacatttctgtttgagacagttgacccagtgggacttttggaaagatttagattataagaaaagcctctgacaaatatctatgaaagcaagattaaaacaataatgtacacaatcaactgaggtccagcggtttgtaaaccagtgccagtcgggatgctcagagctgggaacggtgatcttcaggcagccaggtgagactaatctggagaagctttaggaaggagataaatttaagctgttttgaaaggggactattctagtcaattggcaaagagtcttaaagcacaggattaggaattttaatttgattactcgaggtaatttggagctaccccactgttgtgaagatttggtataaatgttgtttggaagatgattcatttccatagttcttaactctggctgcgtattagagttatctggagagctctgaaaaaatcctggcacccaggctgtgctccagagcaattaagtctgggatggcatcaaagcatcagtgctttgttttgtttcttaaagttctctgggtgatttcaataaagagccaaaaattaagaagcactgctctgagtataggataaattgcaaggaagcaagagagaggctagaattagaaaggttagcaaggaggctggaaattggaatctgacctagctttgtgagcagagataaaaggagtgaagctaaataaagtattctgaaggaaaacttggttggactttgtgatgcatgccagttgcatttttaaataaagctatcctccaggagtgtcactgcttttactatgatggattagttgaaaaacaagtacacaggatttgcttttgctaaaattcggggctattagcaaaattctcaatttctgtaggagcaaagcaggtcagaagagaaaagaaaatgtaatcacattaaaagtgtatgttgtttacatttgaaggaggaaacaaaattgagtgatggatgctcctgaattaagaatcaaaattcaaattttaaattgaattaccgttgggagatactgggctgtggtaaaattatgatccctttagagtaaccttgaaggaaatgaaaagtcagactattaaggacactgaagagaaagatccaccatcattctcaatcatatcattcccctttcttggaatgaagaatttgtaaccggtatgggaaatggatggtggtgtctcagtatgatgacctctcagaaagctgagttgggaaccaatgatgggagttccaatgtttaactgagaacactttaaatttatcctggcatgtcccacctttaaagtttagaggaagggcagaatgttataaaatgggaatatcatttataaaaggaaatagtgtttccttttataactgtatatgagtatttgatacaatactcatctgacactgagagaggaacttcaccggcaagagctttctgaaggggagcaatcaaagacagttattggagcaaaatcatttttctgactctaagaatgaagctgagtcttacggcagtgataagcctccatctgatagctgctgtcattacttagagcacagacttggaactgcaaatgaaagataattgttcctgtattcctgctcccaaatgctgggtctctggtagatgcagagataaagcagttggccaggagtggtgccagctttaagtcaggtaggtctgcatgtaatttgaggggcagagcctaccccaaaccctccctccctaaaacttcctcagttaacatcattctacttgcagggagcaggggtagagtaggttaggacattgtttccagaagacccttgaggaaataaaagtgcactattaaggatcactaacatatctggaaatgacattcataccctacctcccaccccaaccccagagaagctcagggcaagtaactaagtggctgggtccaaggggatgtgttaaggttaagagtcagaagggaaaagagttcacaagcctgggtagggtacagcagggaggacccatgggtgtcctgtgagaagcaagtgggcctggggcagcaagaaggacctgaaaggtcttgctgacaccccgagaagacaaaccccatccttccgctttgtctctgccttgggctccgagcccactccacttcatttcatccagccatcctgactacagggggcccaaagctactctgtgccctgggcacgtttgagtctccttaaatgcttccaattacctttgcctgggtttgtggttccaggaaagaaggttctaaattaacactgtacaaggcccccctgcatgttggtttgcaaaattaatgatcctaatggaaaagtaaattaatctttgatgcttggttgaggataaacacaaaaatcactgttttggacactggaccttcttaatacatctcatcaatagtattttctctctcccttccatgcctgccacattcacaaagagaggagacaatacaacttataacttcatctctgaatccaaagggccatgatgcacgcatttattctgcaaacacttattaatggtctggtttgtgcaaggtgcccaagagaagccaggaaaggctgcacagaggaggccacctcataacactcctcacacgtaaagtttgacttgcactttctacgttcatggtttgaaaagattgcagtaagcattttgtaaaatgtaaattacattcttcaattttaggaagaacacaatagtttttccaaaagccgcctgtcacaggtctgagggttcacagagctcttttaaggggatcggaagttctctggctgccttgctatgtttttctagccagaagtctctgctgcagtgcattgctcagttcctttcaactgaaaaattaaatctgcacttctgtcaaaatgtgtcatctacacatccggacactcatcacagttcaccaagctctacgcagagtccaggctgaaaggatggcatgccctccccaaccccacccttttgaggtctgggaagcccaggtgctggggaggagctgaacaactgtgtccagggagtgtctggcaaagccgacccagggagttccacgggagcctcggtgctatgaaaagagccagtgtccatgcatttcctcgggtgtgaatcacactgcccggtcgggcctttgggaaaaaattaatgaaggacacagtcagcgccgtagaacctgccaaatacacatcagatccagtggagtctgtgaagggggagggggagatttttccagaggcttttcttctcgttccatttctcttttgtgccccacgactgggttcttgaatgtaaaactctcagaaaggtcagggcggagcctgttttatgccccgaggagtatcttgcccacccgtaaatgctgacagacagctgcgacttcggcccaggagacccggcggggactgggtccgaccagccctctctcgcgggcgcaggtccgggacccctgaagcgagccggccgggcgcagagcgcagtcagtctgggcgctcagaagctgggagggggctccacctgggcgcccagccgcggcgggaggggcggggcccggctttccggaggcggtggcacctcctcgcgcccgagcgcgcgctccccgacgtccggcgcacgcgcgaggccggctgggagcgcgcccaagcggcggcggcggcggcggctggaggaggaggaggaggaggaggaggaggaggagggcggctgaggcgcggctggctgcgcgcgcggaggcagcggcgggggcgaccggagctggggcagagtggggagcgagggagggggaggagagagagggaggcggagggcagtgagagacgcatttccagttctcaactacgagccacgagtttgcagatggggctgctcggcggcgcctgtggctgagggagagcagcggcggcggggagcgaccgggagcggcggcagcggcggcgcggaggcggctgaggtgcgagccggtgagttaactggacccccacgccgctcgggtaacggtcgcgccgcgcgccgggccggccgggggcgccctgttgctcggcgcggcgcgccacgcggggaccctggcccgccccgcccccctcggcacctgggcttcggcgggcgcggggaagagggaccggcaggcggcggcggcggcgccgcggtcggggaggctgctggccgcccccagcccggcccgcgcggaaggggcgctcggccgggctcctgcctctctggctgcgggcggctgggcgggccggagctcggcaacgtgtctggcccatgctgcttgccgccgctccccacgcgctccccggcgcggccccgactggggctagggccgcagacgcgcggggccccttcgggcgcggggcttgggtgcctacacctctgcggcgggagtcgcggtggagcctgaatggagagccggcctgggggcggcgttgctgtgactgacacctccggggtctgtcccgagagggggtgattccgccggctcccggttctctcccgagctcggagttggtaggggaggaggctttctccaactaccgccgctacttccgaggtacgagactccagttgtttggccaaagtggctgtgggccgagcacaggctgccgcgggggcgttcgctgctgagatcgtgctcgcggattctcggtacgtttgtctgaaaccaaataggtgctggggcttttttattttggctgggtggagggtcagcaggggagtcgattgaggtatccgaccgtgtggtgacaggatgtggattggttggtagatgtttttttgcagaaggactttttaacactttactgggagtttattctcaatcctaccagtttctgggattgcagctcgagattacatttgttaaacttccatcagttgggtgtgcatctgtgtagggggtgggggtgaagcgagggagagaattgaagactgccggggaagctcagaaaattctccgcattacttataaacagccgggtaaggtcaggctagccacgttttattctttcctacgcctttggagagtgttggaattttactttgtgcttca

SEQ ID NO: 11648 - DNA, 6000 bp, Homo sapiens
gtaactaagctgagaatggaagccaggcagtctggctccagtgctctcattttaaaaaacagctttattgagtataattcacagagcatatactccagccatttaaattgtacaattcggtagtttttagtatattcacagtcatgcaagcatcaccacaatctaattttagattattttcatcaccccaaaacaaaaccctgtacccattagcagtcactcagctattcccttatccctccaatccctggcaaccactaatctactttgtctttatggattttcctattctggacatttcctatgaatggaatcattatagtatgtggtctttaatgactgacttctttcccttagcataaggttccaagggtcacccatgttgtagcctggatcagtacttcattgctttttatggctgaattatattatgttccatattttgttttttcattcatcaattgacagacatttgggttgtctccacgtgggagttctcatccttagcatttatggtctacagcatttagtgatgaagatgatcatgttcctttgaatttgcatagaggctccaaggcacattcacatacctgatctcttttttttttttttttttgagatggggtctcactatgctgcccaggctgcacttgcattcctgggctcaagtgatcctctcgcctcagcctccccagtagctgagactacaggcactgcaccaccacacgtggtttcatctcttgattgttacaacattaatatcactatttagaaatgttttattcctgttttagatataacagagacccagcaagtttaaatgatttatctgagatcacatagccgtaaaaggtgaaataagaacttcattcagtctcctgatttccagttccaggctttctgtcatattgccatgtatgtctatcgctgtttgtgtgagctctcaactctttcttcaagggacctgctcttcccacattctgtgggattcaagcagggctgttaatcaaggaagaattccatcctgttcctaacctctagaaatggcagattgcttagcacctcaactcatctaggctcaagtgtttggtgtattgtcctagtcctgtgccctccttgcatcacatcccgcagctgcgtacaaccctgtgttggtactaagatgggccacagtttcacaagtcatgaagctgttcttaagaactgattgcttctccccagaaactacccaacgtcctctaccatccctccaagaagatcctactctccaaccgaaattgctcacaagagttactcctgcagccttccagacatgaaaatctccatggcagaatctggcccctccttggatagccttgacattctggaggatggcgagtctgggtcaccatttcttgtgactcatttgtactttctgggggtaaactccaaatcatgcaagaggccaagcctccctgctttgggacacagctattgagacttctggtggtgcagggggtggtgaggaggagtaatgataataatgaggaggaggatgctaacatttcatttacggggcatttaccatatgccaggaatttccctaaatattttgtgaatgcatttatttaatcctcataagaatgctatgaagtggtgtactgttgcttgcacactgaaggtgggaaaactgaggcatagagaggttgagcaacttgcccaagttcacataactaggagatggcaggcttgagatttgcaatcaggtaggctgccccaagaattattgttcatagccctcatgctgcgctggtttgctactgcccagcaagagggatgtcctcattcagccacttgtagctaatcataggtcaagggtgttttcctggagcagcaccagaagcatagcttaagaggccagggaagagtgactgccagctggctgcggagagaggggctctctgaagtcctgtggaggccagcacctgcccctctttcatttgtccatctctgagcttgactcccctcttttcccatctactgtcgtgagcactgtggcctacaaatgtgctcggccttatccagaacaacctcaaatttaacatgcctaaagtgaaacttactgtctttcactaaaactctgtagcaaggttgcccacaaccaaatcgagggtccaccactcccagctatgaccttaggagagctccttcccctccctctcctagctaatctccttaaatgtgaaatggaggaagttttaccaacctatggtcattgtgacaatcaaatgaaatactccacagaatgacttggcaagtctggcacataaatgctcaataaatgctggtaacaacaacaacgagaacagtttttccatttgtgttgagagcaaccccattcttttggttccaagatacaacatttttggaccattttttgactgttctatttccttcctctggggtgtgagagctactccccaaggagaagaggctggcaataggtaatactgaggtcaaggatctatccaagcttggcatgcaggaggaggctccaggcttagcagggagccaggttgtaaatcaggaagccagggtgtaaatcatgagaggggatcatctcaacagaagtccacctgctctggtggacatatattccttgaacagtttttgactacttaatgattagaaaagtcaccatttgcagagtgtttgctcagtgccagacagtcttctaagtacttcccatagattagctcatcgaatcctcatgataacccaaaaagtaggtgttattatccccattttacagatgggaaaactaaggcacaggaaggttaagcaatgggaaggctgggctttcaagccagtcagtctggctccagcatctgtgtgtttgacccctgtgctgcccctcactaccatgtgcccagcatagagaccagttcatctacacttacgtggctcctaggttgcctctgttcaccagtagacacaagaatacctctttttcccccctcgacaatcttccataccctctcctttcaccacaagtactcattcacatctgtggccctgttctcttaaccaacctagaacttgcaatgtccaacataatacctaccaactcctctacgaagccttccccagctaaacacagctcacagtgaagttttctctccttcagtttccatagtagcttgacctagctttttaataccttgtatcattcttcagctgtttaactagggcaatgattatttccctagttacaatcacatggaaacaaaatcaaggaaagggaaggtgattttcccaaggccacccagaagttcagtggtggagatggagttggagccaagttctgtcttcacagcaagatgctgagtgtctcatcacctggccctagtcatattaataaccgaaaggttctactgacataattaaggacatacatggaatttagtcctcaatgtccccaggggctccgggccttctgggagttcaaggctctaagttggtgggagtctgtgcctatagatacgagcaatcacaggctggtctccagttggtttcagcaggaccctcccaacacagaccgccagagttcctgctggcaatagctctagattctggtgatgtctctctggccctgttcctcgcatccctcccacatctacaaaatactgatagtgcagacaacaaaagctcctgacaatggaagaatgtgtggaaaggcacaaagaaagtgaacagtctgttgattaagtaaatatcattacttacgcagatgtatctttcatctcttgtttatttttggatgtggctttgggaaaattagaatgaagtgatgagtcaagatataacttaacggcaatcccaggaaagcttagtattctttttttaaattttttatttatcatgtttaatgatgaggtttgttgcacaatggacctgcagcaaccttacgcgtaatataagatgtgcatggtcttagacccttgaacatcagcatatagatgtgcatgtatacaagttatggttctatttttattttttatttatttttgtaattatactttaagttttagggtacatgtgcacaacgtgcaggtttgttacatatgtatacaggtgccatgttcttaacaatgaggaaatctaactatattcagggtagttaaaggatttttctaggagcctacccccaagtagtggaaggttttttttttttttttttttaattttttttttttttaatttttttttttttttattatactctaagttttagtgtacatgtgcacattgtgcaggttagttacataaggctttccatctccagtcaattgcatcagaaggtctcctgactatttttctttcctaggaaacgcagcatcacatgcaggagtccctttagtgaagtatcatagggcttatgttggaaggactaaggcaaaacaactggttcctctgacagtgaatgaatgctggtttccgggatgccagatgcttccttcctaggaatatccctttgcaaagtgcatgcatgcaaaacagatcttctttcacatggttactaagaattttgcattttgttttaggttgtcaccactgggatggaacaactagattttgaaacaggaccaaacatatttgatttgcagatttatgtgaaggatgaggttggtgtcacagacctgcaagtcctgactgtccaggtaacagatgtgaacgagccacctcagtttcaaggcaacttggcagaaggtaggatacaccaggatgtgcactgcagcccagacagtggcatcagggagggccctgggggacagagagaaacagaaaaagtaaataaacaagcagctgtttccctggaaaaggcagctgcttaatgagcagggaataaatgaaatgtcctccagctcaacactcccaataataatgtccaacagtttgcaaagcccttcacaggcagggtttctcctggtcccctcccagtcccagggaggaaactgaagctcagagagagacctcgagtggatcattgtggaggaacctggctgagctgcccctaggctcatccctgtgtaccctggtcattgactggcttgttcattctccccatggactctgacttcttgagggcagcgtgtttctgctacaatagggacaatgtaagggaccagagcacacagtaactaatgtcttacaggatctcccccaagctcatggctttgagcatcatccctattctgacaactttcaagtctgtcatttcagttcaggttctgccctgagctgtggcggtcgtaacacaaacatccacctttctcacccagcatctccacttggatgtttgacaggtcaaacttaatgtgcttctgaaccaaactcctggcttcctctccaccctccacccccacccaaatctgcttctcctatatctttcccattttggttagcagtaactccatccttcctgttgcttggaccaagccttgagtcatccttgactcctctctctttcacacttgacatgaaatcctttaggaaatcttgccagcttctaaatatacccagaacctggccccaccctagtgtctgcatcactaccaccatggtccaagccactcatcccatctcacctggattgttgcaatggctggcagctggcctcccagcccccctgcagtctgttttccatactgcagtcagagggatcctattaaaacgtcagttaaatcaaggcactcctctgcttaaaaccctacaagaaattcccgtctcactcaaagggagtctccttaagaaccaattaaaggccgggcgcggtggctcacgcctgtaatctcagcactttgggaggccgaggcaggtggatcacgaggtcaggagattgagaccatcctggctaacatggtgaaaccccatctctactaaaaaatacaaaaaattagctggatgtagtggcgggtgcctgtagtcccagctactcaggaggctgaggcaggagaatgg

SEQ ID NO: 11649 - DNA, 6000 bp, Homo sapiens
aaatgcaggcagtgagtcccacagggtggcagtgctggccgagggtcccctgcctggggaagaacaggaagcccttctgactaggtttgtgccccctccacccacccctcaggtccgaggctgtccggaggccacagccttcacgaaacatccacggttctggtggagactgtgaccaagtcctcctcaagccggggctccagctacagctccatccccaagttctcctcagatgccagcaaggtggtgactcggggccctgggctgtcccaggccttcgtgggccagaagaactccttcaccgtggactgcagcaaagcaggcaggtggcggggggagggcgtctcccggggtgtgagcaagaagccgtcagggagcagggtgtgggtcacagtaggggactccctggtgtgagcctgtccctctgcctccctctccaggcaccaacatgatgatggtgggcgtgcacggccccaagaccccctgtgaggaggtgtacgtgaagcacatggggaaccgggtgtacaatgtcacctacactgtcaaggagaaaggggactacatcctcattgtcaagtggggtgacgaaagtgtccctggaagccccttcaaagtcaaggtcccttgaatcccaaaagtgcctccccagcctcagcccccacctccagccacacacacattacacacacacacacacacacacaaatgtgccacacccagacacgcacagaatcagacactacaaacacctgccttgggggtgaagtgaaggcccagcctccccaccccaccgcgccccaggggttggaggaccttgtctgtgtcaggacagtgtccctccctgggaatgtgacatgagggccgactggggccaggctcaggggcagaggctgggacacaaggggctggcgagggctgcgaggccagggaagccctgagtttctggcggggctgagcagtgggggagcattgtgttgtgggtgtctgtgtgtgaggtcaccctcaaactgcaccgccggccagataccctcctgaccccgaggacttggtctggtctctctggtggctacaaccccagagttttaaggacttggaaaggaaagcacaatcagagaagaaaacagcccccgaaccagcaggagtggcctggcacatggaccggcctgagcgatgtgcactccacccaagccaggctcccagggggcctgatttctctctcactgtctctttttttaaaatggttgcacggctctgccccatggggggccttttttacacactgcgaggcccagctttctaggggacttttgcacatgtcatgcagctcagctgggagctgcttaggtggaaaactccaaataaagtgcggctgtcgcagagggttggctgttccttgggggtgtgctctgtgtggctggctgccctctggcctgccacacgaaaaaccgggccctggggaggcagaggcggcctggctgttccctggaagattgacccagtcgagggaaaggtcctggggcagaagtgaggtctgggatgttggcagagtgcttgaaagaaccgggggtgggggctcggggatgtgggaaggggtcccagcgggagggttcgtggacagtacagggtgtggatactgtgttctacagtactgtcccaggacccctgggaggccagtttcagttcagcttgacctcaaggatgtttttcaaattaagactttaaaacagtgagcactgactcaaacaggaatattcctcaaccagcaggcaggcagaaccacctgcagactcagcaccttccccctagtcagttcctgaatcaacttggcctgtttcatgcccctttccagcactaagcttgcacagggcctccctcctgaactcctgcaacagccctgccctggccagctccctccaacctcccctccatgctgcagcttggcgggggggtcactttaaagatagtatatgcccctctctggtttagggccatctgtgactccctcctgctccagagtaaagtctcctcttcctgacaaggtctccagggccacccaggttcagacagcagcctccccagccatatgagttgggcagcaggcccactctccattgtgccctccacctccaaccccccttcattacctctgggcacccatgctgtaatttgggcccttgcccggaaacacctttgcctccccaccctcttcatcttcctggccaacaggaagttttcctggacccctccctacccctcctggatcagtgcccccagctcccaaactgccctgggacacatctctagttgcagttacgaccctgagctgtggccatgtatccacggctccccaccagatggagctccctggccctgggtgtgaatgagtgagtgaatgggtatgaatgaataaatgagcagctgagtagctgcagcagggaaaagaagtctttcattcaactgatcccacaatctagacccacctgggcatttcagcacatggtggtgggcttggcagaaaaacccacgagtccccaactcctaatccctgacctccccacctctctcaccaggctctgtgcttcctccctcttccctcacaccctcccacacacccatcctcactctctgcccccctcaccctcaccctcacccctagatgtgctaatttccccctcagcttcggctgcctccacctgtgtgtggctgataagctcacagacctccagcctgcctgcttccagccagccacagtgtggccctgggtgctgagccttacaggcccttcctcattaatcctcataacagccctatgaggtggggctactaccatctgaagaaaccaaggccctgggaatttcagtgatgagtctgaaaccgtacctttaagtagtggggcacagattgaaacccaggtgtgcccgaatcccaagcttatcacacatacaatcgctagaccagaccacgggcacgtctcaagcactccaaactcacaaaccccatgccagacaccgggagtgctgatttgttaaaagggaggaggaaagagtggctccttccccttcagcctgctcatcttacagaggtcactttcttggcaatgttactcccatccatgtgctgcacaggccagaaacctggaaatcacccaggtctctctctctacctcactccccaaacacatccactctgaaaccagttttgtcctaaatatctaaatatctctcggctctacctacttctctgcgtttcccattatcaccacctgagtcctggccaccattatctctcacagtggcctcccaatttggtttctcctccctcagtttcgcctctgcacacagcacagtcaacagtgagtgacagctctaaaacgtaagtttggcgatagcactctcttacttgaaatccctcagcagcttcaggataactgtcctcaggataacttccagatctttttttttttttttttttttttttagacagagtctcactctgtcacctaggctggagtgcagtggcgccatctcagctcactgcaacctcccttgcccgggttcaagcaattgtcctgcctcagcctcccgagtagctgggactacaggcacacaccacctcactgggctaattttttttgtatttttagtggagatgggatttcaccatgttggccagactggtctcaaactcctgacttcaggtgatctacccgcctcagcctcccaaagtgctgggattacaggcgtgagccaccgcgcccagcctgcagatcctttttttttttttttagacagggtctcgctctgctgctcaggtttaagtgcagtgccgtgatcatagctcactgtaaccttgaactcctgagtaagccctgctgcctcagcttctcgagtacctggaactataagtgtgcaccaccacgcctggctaattttttttttttttttttttttttttttttgagacagagtctcgctctgtcacccaggctggagtgcaatggcacaatctcggctcactgcaacctccgcttcccgggttgaagcaattctcctgcctcagcctctcgagtagctgggactacaggcgcccacaaccacgcccggctaattttttgtgtttttagtagagacgggttttcgccatgttggccaggctggtctcaaactcctgacctcaggtgatccacctgcctcagcctcccaaagtgctgggattacaggtgtggcgtgagccaccatgcctggccttaccaattatttaactttccttgaaggccctacgctctctagtcagtacgcctttgcacatgctgttcctctgcctagaacaccgtcttgtcctcacttctatccccttcatcctgcaggtccttcaggtctcagcttagatctgaagcaagcttcttggggaagggttctttggacgccccctctctccatgggttagttaccatggatgtgtgcttccatatacttttcacattctaaccattaacacacagctttgtagtcgcctgttcccttgactttccacctcactaggcagtatcatcattaacttttgcattcctttaactgaacaaacgtgtgttacttgttaactatgtgtcatagttacacacatacatacacgataaagacccagaccctgcccttgagatgagtaactgcgtctcttctctggggtctcggcgtctaacagcgtcaggtccaaagcgcttgttgaacgaatgaaccaaggaacgagtgaatgaacgaatgaatgcccgcgaaggacgtggtgccgcgcggtcttctgggaatcgtagtcccctggttcgggcctgtctttacggcgcaggcgtattcacatggaggccgtgttgctgttaatgcgcatgtcccggaatgcggctgggaggactgcgcatgctcgaagggtgggggttgaggccgacggggcgccgtacggcggaggcggggtttcagtggcttctggtgctctagggtgagctctgcccggctgcagggatggcggggaggggtaagctcatcgcagtgatcggagacgaggacacggtgactggtttcctgctgggcggcataggggagcttaacaagaaccgccatcccaatttcctggtggtggagaaggatacaaccatcaatgagatcgaagacactttccggtacggtaccgcgcgaggcctgaacgggcccttctgctgctcggtggagtgcggggcgaggctggaggctgcccggacgggggtgaggggacgatcctgaaagtccttccgcccttccggagcggaggcctccgcgccccaagtccccgtttggggctcggtgggacagaagctgtatcaggtccacgagcccccccacctcacatgatcgtgtgtcatgaaagaaggggaacagagctcgtgacagcctagacagtgggcttggactttgttctgctttctcctcctttagaggctcaccatcgtcccgtaaggcagggatgatttttgtcctactcacaggtgagaaaactaaagctcggagagggtaaggcacacactaaagttacgagtcggcagaggcagagctagaatttgaacccaatctcaaccctttctgcctccggtaagccaggtacacactcttggcaggtctcctcaggcggcctcggaatttccttgtagtcttgagcacagtaggcagaaatgtcgggactgtgagagccttctgctaagaccttgcactcaagccctcactgcctgccttaggtcagagtgtgggtgcaggcatgcttttaatccaccaggggtcctggtgactggaattaaggataccagcctcctattttattcctcaccccttctccagggcccctgtaccaagtctcaggaataaaccactcacctgtttcccccaaacagtccagcccagggctgctggctgagactggttcctgctgcctggtgtattaggtagtccctgacctgggaggctgttatctgccattctctaa

SEQ ID NO: 11650 - DNA, 6000 bp, Homo sapiens
ccatgtgggcaagcccccgcctgctgctgggtcctcccgcctccgtggctcactctgagcatctgctccccacacagtttccagcacggtgggtgaggggccttgagtgtttgctgctgctgctgctgttcccaggatggaagaggagacagagggcctagggcagctactgcactccaagcacttcactaggcacttaagtttgaaaacatttacaaatttttcattgtgatgaaaaacacataaaatttaaccccccaaccctctccagatgcatagtgttagcattgtgcaacagatctctaggtctttctcatttggcagagctgaaactctacagccattgaccagctccccattcccctctccatccggccctgggaaccaccatgctgttttacgtttccatgattttggctactcttgatatttcatataagtggaattataaagtatactgtccttttgtgattggcttgttttactcaatataatgtccccaggtttcatccatgttgtaacatgtgacaggatttccttttgagacagggtctcactgtgtcaccgaggctggagtgcagtggtgcaagcttggctcattgcaacctctgcttcctgggttcaagcaattctcgtgcctcagcctcccaagtaactgggattacaggcaagtgccaccatgcccagctaatttttgtatttttagtaagagatagggtttcgtcatgttggccaggctggtctcgaactcctgacctcaagtgatccacctgccttggcctcccgaagtgctgcgatgacaggcgtgagccaccgcgcttggcctgttattctgttgatgctgttgatgttcacgtgggttgcttccacttcttggttatagtgaataatgctgcagtgaacatgaatgtgtaaatatcttttcaagatcctactttcaaattttagaaaagttttaaaaacatttaatgtagccagtaaggtctatacattgtgttcttgctttccagtttttaaacatatgccccaaagtaggttttctggatcatatggtatgtttttagtttttgaggaacttccataggagctgtaccattttatatgcccaccaacagtacacaaggggtcgtttctctcatcctcaccaacacttgtcattttctgttttgtttttagtggccatcctaatgggtgtgaggtgatgtctcattgtggttttgattgcatttctctactgattcatgatgttgaacatcttttcatatgccaattggccatttgtataatatatcttccttagaagaaatatctattcaggtagcacttaatttttttaaataaagtatttgacagtaacacagagataaaggaatctaatccacactaagaaccccccacccagcttcagaatgaaagcattcccagaggtgttagagccctgggttcccacccggaccagagcctgtgtggccaatctgccaggctggaactccacaagctgctcctgggagcatgctgctgcttctggatccacctgaccccgacaaccttccagcccttaacggagacaaatactctttaatttctaacaaagaatatttcccatgattcaaccttccatttcttgaccttctgtccacttaaaaagcagattcctgttcttctaggtttacatctggctctattcctcctcactcagtggccttgagcaagtcattgaacctctctgagccacagcttctttctctatagaatggggataacgatgatacttttgaagaatagttgaagaatccatgtcaattgctattactactaatctggctctgaagggacagctgtaccctgtttgagcagtcaattgtgtgttgtctctgattttttttatttttttgagatggagtttcactctgttgcccaggctggagtgcagtggagccatcctggctcactgcaagctctgcctcccgagttcaggccattctcctgcctcagcctcccgagtagctgagaccacaggcgcctgccaccatgcccggctgattttttgtatttttagtagaggcagggtttcactgtgtcagccaggatggtctcgatctcctgacctcatgatccgcccgcctcggtctcccaaagggctgggattacaggagtgagccaccacgcccggcctgtgtgttgtctcttaaaaaggctattgtagaccagctgacatggctcctgcctataatcccagcacttggggcagccaaggtgggaggattgcttggggccaggagttcgagatcagcctcgtcaacattgcaagaccctctgtttacaaaaaagagtcccagtctcaggaggctgaggcagaaggatccctgaagtccaggagctcaaggctgcagtgagctatgatcttgccattgcactccagcctaggtgacagagtgagaccctgtctctaaaataaataaataaatacatacatacataaaggttactgtaggtttcgaagaattacctgtatttaaatgtatagtttctgggatgtgtgtgaaagatttatttggtcattcattcatacacacatggacacaaacctagaaaagtatattccgcacccctagatttttccttagtgtgtccagtagatgggaggctgggcgagtaggtgagatggttggggagatgacgcggtagagaagagaatgtcaggtagatggtaaacatcccgtgggcaggtctgagggaggctgagagtggacagcaaggtgattatccagaacacacgtccctgtatcagcatgttctgagatgaactgttctgtttttctgttccaggtaaagcttgagagcaactttgcctccattgtgtttgccatcatggtgttggaggggcttggccgctcactggaccccaaactggacatcctggaggcagcgaggcccttcctcctcacgggcccagtgtgccccccgtgatggggcagtggcctctgtgggcccttgtcaagagctggaggccactcccaagagcctctcctatggcagctgggacgttttaaaattgggacaccaatttcaaatgtaaccctccagtggtggaaggcacaccatggcttcctctgcttggtttgagggtctgttcaaaagctttgggccaattagggagtaaaaggagggaaggggcctatccattccattgtggaagctgggccaggtgccagggacactctccttcagggaaaatgttatgtggaggaggacgaataaatttattttgttttcctgtttttctcatttcttgacccgctatactccctggtcagatgggtactgctggtagttcccagactttgatattcaggttagaaaatgccatcaagtcctactgatctgtggcatgtgcacacacacacacacacacacacactctttatgtataaatatcatgcaggtgctacctgccagcataatatacacttagggcaaatttcattgtacttcaaattatcttcttggtaatttttaatagattttgctaactccttggtaacttttattacaaggtaaaacaaaactgatgaaagtggctgacataccggggacgtgagcagaacggcttggccacttccttaacatggccccgggttcacccgctagtccggaactacagtttctctgccacagtgtctgcgcctgtccacttgcaggcattaattttggtgaatatgaagagagttaatataaccagtgtgtcctcttctccatggcagcgcccagggacagacctgcagtgaccaccacctgcccctctctgccaggcccaaccacgggctttcttctcagagctgagctgatgtggccgtctggctgactaggaggggcccggggtcagcctggagggggggtatttgtaaagcttaatttctctttttttttttttttaggtaaaatcacagtttatccctgcaccttcatagattatgttgctcgtcttagagaccaccaggcagcgaatggagtcaagcccttgcgctctccgagagtcctgccctgactacaggactagtttctcccattctttccttctccaggataaagttcctcattcctgtcttttagtgagcagtatggtttaggtggacagagattcctttggtgcagtttttttcaaggaggtgatgttattttttccttcccaggtcttgaggggacattcaaagcaggcagagaggggttgggatggctccagatggctgggagggagaacaccagctggtcacgcagcccctcgtgccagtgcgcatcaggtacagtgtggaggcgggaaagggacaaaaagacggcagtctcttccctgagcctatgccaacccagccttaaagccagtggatcgaatcaagccatttgtggcattatctattgctgcgtacgaacttagcctggcacaatgcctgtaatcccagctactcgggaagttgaggcaggagaatcgcttgagcctgggaggcagaggttgcagtgagccgagatggtgtcactgcactccagcctgggtgacagagcaaggccttgtctcaaaaagaaaaaaaaaaaaaaaaaagaattatacaccactcagttttaggaggggcagaacacggggagagccctacaggatcagaggggcaaccaacaagctgtttcagaaggcatggggcagctcagcaaccataagttatgcgtgggctttgctctcgggagagaggtttcctgcagccgaaggactcacagctaatctgggtcaggagcggctgccggctcccccactcctggagatgagcgactctgtgacgtcacgggaggcgcgggcggagcgccggggaagcgaagtaggcaggggcgaggcggctggggaccgcggggcggacgggagcgagtatgtccgctctgactcggctggcgtctttcgctcgcgttggaggccgccttttcagaagcggctgcgcacggactgctggagatggtggagtccgtcagtgagtgtggggctggggatgggggcctcgccggcctgtagcggacagcgcgggtccctgggacgctctcaccttgactggggcgcctgaagaggccgcgtcccgaggcatgctgggacctgtagtccgcgtgtctcctgaagccgcgactcgaggagagggaccccgctggccggagggagagggagagacttcgctgggcagatgggacaccgtgtgcagggccgtcatggtagtaggggccgcctgccctcgggagacgcacgcgtgaatgcggagcgggctgagccagtcggcgccggcgcgggcggtccaggcggaggaagcagcgtgcgcggcgggtgtggacgctcctggagcgaggcggggggcggcggcggtgaggcctagggagggcgcggtccagggtcccggtgcctggctgcggaatttagggtagagtctgttcggcagcctttaatcggagacgtcacgtggccgctttttaatgctgaaaaatcactctggctgcagggagtggaggctgtcgcccagagagagcgccgtcgggtgagaggagcagaaagccggaagccaacgctggggcagccgtggcgtttaggagagtgacaggcagagccgcccgcgaggtggcccgagacgcagaccggagggcggagggctgggggtgcgaggtagggagcgggtgcgaggtagggagcagctgccgaagccgagttagtggtgtgcagagattccgtaagagcaggactggaaaagagtcatggatgattccaggtcccttagatcatcagctacactttaccaagaggcagtgtggggtcgtgattccaagcgggattctggccgcacagtggctgggttcaaatcccacctctgccacactccagctgtgggaccttggaaaagtttcttattctcttaatgcctcagtttcctcacccatttggcgtccatttgcaaggaactaaatgagttactgttatctaaa

SEQ ID NO: 11651 - DNA, 6000 bp, Homo sapiens
caagttccaaaggatttacatcctggaaaatataaatgttttgactacagttttcaggaaatatgtcctttctctctcttgctgcttattgctgacttagactattgctatggatctaccatctgtacgtgggtaaggcaagttctcaacttcagcaaagatttagtgcaacctcaaactgttttgagaaagaaaatagatataaaacacatcaaagatttaaattaatgtatgtggatatgttagtttcctgatgtccttatatatagtgatgtttaaaaaaaagaaaaaagaaacaggacttgccagttttttagctcctaaaaaagaattcaaacgtttaaactgggctgcaagcatttgtgtttgaatcaacaaatagatagatgtctttggcagcagtaaacgctacccagccaggagtgtgaagtcatgtaactctatctagattagtcccttagaattccaaagggttgcctgctattaaccgtagctgataatgtcactttcacaaaatttaccatggctttttccttggcacaaagaaatacgttttaacttgcctagaaatcctacttgtgaaggggaggaaagagaataatagttgggtatgtttcaggtggaagccaagctaattgacaaactggatagcctgatgtcagaaggcaaaggtgacgaaacataccgcgagctcttcaacagtatgtgagtaatatgtttatctcaagttgattccattctgggggatttggtgtcagtactgagcctctctgcaccacggtagctgagagctgcaaagacagcttaggtctcacaggagggctttgtctttgtggagtgtgaaataaaggataattgcctaactctggcgaatggatcttataatgttgatgattaggcatgtcttcctgttttaatctctgattaggacaggttgcatatgttacataacaaatctccctcttttcatgcctgataattttaaaaccattcctgcaagataatgattttaagtggggttataagtgggagaggagaaaaggggtgtgattgtaatgtttgtgtgcactgctttccaaagcaagatactgatgctgatttgctgttggaaaattaacctagtttgcatctgttcttcaacacctgatttaattaattaatactgattgttcgctcagcattaattgcttcctaaatgctttttattagaatatctcagaagcaaatcacttttagtaaattctgtgttttggatttgtatggaagatagagaaataatggaatgctgtaaagagactttaaggttgccctacccatagaatctgatcatagccacaggatgaattgcttgtaccaagtattcatgcgttgtgtttaaatggccagaagatacagtgagaatgttttagtgctttgggatttcacttctggcacttgttttctctacagcttcctatggatcttagtcattttcaaatctaacatatgtgcaaagtatttctttttgaaagaagaatttgcttattgtgcttgaaaaatgtttgcagttctttcagaagtgcaaaataatgcagtaacacatttttttctatgacaaaatatattcgtgtttgtatttatgcccaagtatcacctaaaactaaatatcagtgctttagtattgatggccaggtccaaaactttatgatcatgaatttacaacagtagaaacattaatatataggcttgaagaatataattagtgactaataggttagatagatttcagcatgcctgattaaaaattatcttgaagcttttaagaaaattacattaaaaggaaaagccaagaagggtatagagatttcctgtggtagtggtgggtgataaaatatattctttgtactggattctgaacagtatcatttttttctgatatggtaattaaatgagaggttttcataattattcaccaagacctcattcattctagtgtacacagcttcagtcttttatggcagcttggagtttagcaagaattctgattaaaatctcatgcagtataataaattgcttttgaaaactgctctcatttcagttactagtccttggtttgaacaaagaaccaaaatgagaaagcactcagtgaaatgaatctcttgagatttgtgattaattatttataacaaattcacaagattaataaatactgacatagttctttagtgcctcttatctactttaataaaggcttgataatatgcaatttcagttgctcatgtataaatatgactttgaaatagaagatgtacctcgacatgagaatcaaaccaataattaaaatattaagcctctataatcaggactattttaaggtacctgattcattcaatagagatttttatacttttgttgatttttaggatattactagaaatgctactataaataatttcctttcatgcttttacgatcagcatattgggaataaatcaaatcaaaagtgatacttaagtgtcattactacctgagcacaagaaagaaggcgtaaatattactttatttcaggaaacaataaattgcttttttggcaacagaaatcacaatgaattagtataatcacaatgggtcactgcacacattatgaattaggaacacatgccgttatatggtacaaattctcatttgttacgtgtaattcatgtctaaaacctcttaaaatttgttctgaagctgaaaagctgtaagtagttcactgcttcctaaattgtagtgcttgccaaaatggaccccttggagtaagactttaaatttgtctagtaccttccttgctaagaactcaactcatctttccctaagcccaaacattatcttcattaatgcatactacatctttgtgaaacttatttcataaagatgtattcattttgataacactgaaattctagattatagacaccaacatgcaatatccagaatagagtatcacaactaaattctgcttcccctggctccacctgattcgctcattccgctttatctattgggcactccccagggctggggatccagcagtgactgtgctgtggaagcatacagtaggtctacctacagtcttgggggctctaaaggggctttccagaagaagtaacattcatctcaggtatttcttagtctttcgctctgccttctcctatgcagttctaaataattcaataagactccacattatttcaaagatttttagtgatcacacatttaattaccatttggagacagagaattcactatgtgacaccataccttacatctctaactctactctttggattaaaaagagcatgcacagacacaggtgttatatattagagtgatgacttctacgtaaccccattatgataccgagagagggagattgagggtgaaatccccgacacacacacagatttctttcatagagtgaaaacctggtgagcagagtcatccctgcagggccatggcttgtcttgcttcccagggttaggaatttctattgcatagaacagagcagccttatcaattagcaatgagaaaccccctttcactgttatcagggttccctagctcaatgtgggcacatgggcattattatagagtaaatgaaaatacccactctcacccgggttacctagaaagactcttctcttcttgatgatagcctctctttctcagtttgtatcaggtaaacagggaaatggcaagattcccaagagagggaacaaggctggctgagcacacagatgatctgggttttagactcagtcctaacatttggtcttgagttagtcaaggaaacaggttgtgcataactttgcctcttcttacaagaggattatgtagctcttactgcatcagaagtctgtgcaaattaatgaaacttatgcccataaaagaagtctccatgtatttttagaattattacctaacttgagttctttgtttttcagcctctaaagtatgaggtgtaggctgtcacggggaaatttctacatcattccgcattgctttttggcaggcagattttcatttgagttcaatacaatttgcaatttaagcctgaaagaggtgctgttcagaggtttttaaaagaaaacacattttaaacaaactaggggaccttcgcttgcaggactggtcagggcagattccatcccttccatatgcagtttccactcttaacctaagaaacagtttagaataaaccagaaaaacaggatgagggatgcacaggaaacacaggaggagacaagacagaaggctgggcactagaatgccaataacaagagaaagaggtaggggatgatggagagaaaacttgggagagaacatagccacagacaagagaaagctttgacaaaacagctttcttcttgaatgtttatttttgaactaagtacatatatgatatgcttagactgtacttgtaagaaatgttttctctcttattcctgaaactaagatgaaagacaaataagattttagacagaaatggcaatcattaaatttcaaggggtagggaagtatccacatattgccatgcttaatgttcttgcttttatcttttgggggaagttcaatcataaagcctttgccaagtacactgttaatttgctgagaggtgggagtgaaagtgacacagattgtaattatcatgattgttattattttgtgtttacatagtacctgtgctccaaggtgcttaggattaggggaaatgtaggaggagagatgtggttcagtacttgtcatcaatctgctgtaacaaccacatggaaaatcctctgtgattagtgacaaaatgaatgaaactgttgagtgagtgcacagatagtacaatatgtattgagtgggcaaatgttaagtgaaaggaaaaaacgcaaaacgtcataccagctgtacaaggattttcctgtagcagttgcattgcagtaaaattgcttggatgaagatgcattccactgagaggtaggaaaatatttttatgtgaataaagcaagatcttgcttaaaagtaaacttggaggcactcctgtttttgctttttgcagtgttatttgatgtggtaagacgcaagcctctgttagtgtaagggagaagctaggaaaaaatgtctttgagctgtgagatgcttgtatattttgaaaatatgattatatgcatgtgtttgtattttatgacttggataatctgaaaatcaatttgctttgtcaatgcttcctggattagaattccactatttggtccctatcctaggtaagacattgtttgcaaattgtgctacttgtgagatgttgcagtggttgctaaggcatttaaggtactgatgaaagtaaagtggttgtcatggtgactgataaaaataaatgttgaaaatgccccgggttctttcttttccagtctactaaagaaaattgagcgggaaacatggcgggaaagtggcgtttcattaattgctactgtaactcgtctaatggagaggttgttagattacaggtaagccaagtcgcatgtttttctgaactccagttcatgctgaactccagttagaaaatcaaatagaatacaatcaacgttccactcttgtgaatcactcaattgattatcagaccatggaacctggtatactaagataatgaacttctaaccagctggttcagagctgttaatttgagcttttgtttgttttttgttgctttgttttgttttttgatagttctttcaaagtcttggtgaattgagaggattctcggagtccctgagagttctcaaaaaaaaaaaaaatctttattttggtatttagacttagcccctagaaccagtagaaccaatccattttagggtgaaaacaatgtaatggagaattgtacaatcatgctattctcttaaatattctcttaaaaaggggacgtgggtgagatgaaactcacagtgtcaccttccatagacctatgttttttatttttatattatctaaactgttaaa

SEQ ID NO: 11652 - DNA, 6000 bp, Homo sapiens
cgggttcaagcaattctcctgcctcagcctcccgagtagctgggattacaggcacccgccatcacgcccggctaatttttatatttttagtagagagggggtttcaccatgttggccaggctggtctcaaactcctgacctcaagtgatctaccctcctcggcctcccaaagtgacaggattacaggcctgagccacggtgcccagccgccttctagaaacttctaaggagaaacctagtgcagaagcgtgaaaaagccaaaggcaacataaacatttctttggctcaataactcagaaatccagacgtgctcgcctgggggaccctgagagtatcttttgagcagggcgtctgtcctgttgtggaaacagagggtcctgagttggtaaaggatgtgagtttggcaggggcctcctgtggtcactgcctgtgaaagcccatggcccctcacacagccagctggccctttgctaatgactttgattcaagagcactttcagagactgacaggagctgagacgtgtgggttctggggccaaattgaggctttgtggaggccaagggggagggagctggtggcagggagcagcccagacttaagaaaccacttcagacactttcctccccatatccagggagagcaccgatttcttcctcaactcttccagcctgggtgacagagcaaggctccgtctcaaaaaaaaaaaaaaaagtttctagaaggcacttgtaactaataatctttcaaaagcaggttggtgggggaggagggtacgagtgtcctgacacagtgacagatataacaaataggatccaggcgttcacaaatagaattcaggagatccgtgagcttggatggggaaaatacacattttattttcactgacctctaactagaatttggcatttcctgtaattatggatgcaggcacattcgttatccagggctgccttagcaaagtcccacaaactaggcagcctccacaacagacatgggttgtctcacagttctggaggccggaagcccacagtcaaggtggcagcagggcaggctcctcctgaggctgtgagggaggatctgtttcctgtaacctctcccccacttctggtgattacaggccatcctgggtgatctggggctgacaggtgcttcacccatctctgccttcatcttcccatggtgatctccctgtatgtgtgtctgcatctcagttttatcttttatgaggacgccagtcatactagactggggacccactctactccggcaggacttcatcctaactaattacatctgcaactaccctatttccaaataagctcattgggaggtattgggggttcggacttcaacgtatgaatttgcagtggggggcagagacataattcaatgcataatattagctaagaaaccacataactcatagtaggccctgtgacacttccaggagtactttcgtatgacttccccgccattgcagatatttcacaatgctgtttagatgtgtccttacgttgaaatcacagtcatttgtagactctctgctggaccttgttggctaatgagtccatgaagcgtagacttttgagttgtgctgggataacggtggccacaggtcacctaaacccaactcttcatacgtcttccaaggaaccacgtcgctaaacaagttagtgcaaagaaaaccacccataatccatgcctccagcattacctggagacacgagttcccaggaacctgcaggtgcctccaggtgatcgtaggcattaccagttctgtgactccgttctcacattgccataaagaaatgtctgagactgagtaatttataaagaaaaaaagtttagttggctcacagttctgcaggctgtacaggaagcatggtggctttgcttctggggaggccccaggaaatcatggggagaccccaggaagcttccaatcatggcagaaagccaacagggagccggcacgccacatggctggggcaggaggaagagagtgagtggggaggtgccacacgtttttaaacaaccaggtctcatgagaactcactccctattgtaagaacagcaccaaaggggtggtcctaaaaccattcatgagaaacccactgctgtgatccaaacacctcccaccaggcccctcccccaacaccggggacgataattcaacctgagatttgggtggggacacagagccaaacaatatcaccagtagaattggtttccttttcaattttagtttatatatctacaaccattctgagaaagtgtccttgagccaacagatcgccacagggacccatggtgccgagagcagattaaaaagcctgtaatcccagcactttgggaggccgaggtgggcggatcacttgaggtcaggagtttaagaccagcctgaccaacatggtgaaacccagtctgtactacaaatagaaaaaaattagctgggtgtggtggcatgcacctatagtcccagctactcgggaagctgaggcaggagaattgcttgaacccagaaggcagaggttgcagtgagctgagatgacgccactgcactctagcctgggcaacagagtgagactctgtctcaaaaaaaaaaaaaaaaaaaaaaaaaaaaaaaaaaagacacccgcactagaaaactacagaagggcctggctacgaaacttcctcctccctgaacgcctgcctccctgactacagattaaggatcccagcagatgggtggctgtcacagggtcacagaaggaggcattctggatctcgaccgcatccctgcccatgtcccagttgtgagactgcagcacagttttgcaggatgttaccactgggggacactgggtaaaggatacacagacttgctctccgttgtttcttacaaccgcttgggactcttcaactacctcaaaatgatatgtttagcgtcaagtaatcattgaaaaagccacggtgtccgtcctccccagcctgctcggacaagcacaccaatgtgtctttgagcactcttgtgtgggagagcggcctgtgggatggggcggtaccagccagacacgggtgcctgggctcagcctcttaacgctgtgaacacatctcagcattttccaggcagcgataaggcattggttctcaggcttgccgagagagcccttgactttctcctcaggttctcatatgctgctccgccggctgcacgaagggaacaggacgcctgttggttactggtgcggcccagggagcctggcaggccgtgcggattagaagtaattggcgtgtcggcgagggcttcacactgggcccacgcctcagagtggcttgcctaacatggagaagcttctgaagtcagctgagtctgagctcagcagggttggggccagtgtgtggaaactgacccacaggggaccaagatgtgacaacagacttatcaagaagaccccagctttttcggcgagggctgaagatcctgcacttaattctgcttggctgctcaacattcaaaagcaggtcgccaacgatctcccctttcggatcatgaagggaacccaagcaggccgcgggacccgtgttctttcatgggaagttgagacgccccctcccttcaatgattaaggccagcagcagctcaggcaaatgaaacgctttatggattgtcaatatttaagcaccttgctggtacctgagggctttggatctcagctgtcatccattacaggcctcattacacaaaacattaaatgctgtatcatctcattttcccaccgaagctccctggcaagacgttctccaggtggggtgtggtttgctccaggtgcaatgaatgggccccgttttgtattgggaggggccacacaggggccctcaccgctgggtatctgggagacgggcactcggtgccaggcagcccctctggcccacgtggtcggctcggcctgatgtctctctatccagctgagtctctaccttgcccctgggagacaagacactcatcagctttgttgctgctttgcagagggtggccagcgggcctgggcagcccgggcagatggtagtggagcgtgctgccctcccatccccatccttccttacaccccccgcacattctactgcatagcccctgttgctgtggccatgtggagacgcagaactgagcagcagctaatgaaattagcaccaggctagaacacagatcccctcttattcctggagagggcgctccatgagtgtgagcccaaggacaccgccaccagcttccaccagcatggcctggcccacacgttcctttctctggctgtgcgtaagtttcctccaaattggtgttgcaaaactccctggaaggcactggaaactatgcactggacatatgcagatgatctatttacacagattattctaaggcattttactgggtagatcatgaagcctaatttacatatttacacaatagactggaatgacgctaaaggaactataaatatattttcctctccaaagcagccatgaaatacatatttagaatgtgcccaatgcaggcagatattgtattgcattttttttttttttcttaaataatgtgtgtagcccagagacgagggcaggtggctggaggacaggtcccgtgcctgatggggacaccccccagccggaggcctggactgctgtccactcgtagtcccctgggggctttccagttccctccccattgattttgttcaatttcagtctttggcaacgggagttttcaagtgagtaaggaagaaaatcagtatttctctgaaggtttgacatccatagaagttccaagtcagcaggttcagcaagagggggctgttgccatggctctgatggtgcccggtcccctcatgtgctgcttgtctttctcataagctgcttgtctttctcataagcgtgtttctgacagcttgtcagcccggcttcccaccccttcctgggatcagcctgcaacacgggctttcttcgtcatcttaacatgcaatgcattttgcctcctgccttgaatgaggatccgatggaaggtaactgtcttttttttaaatcagatgtatttagcctcatgtttaagcgccaccagcttcagtaaaatttctaacctggattggccattcatacaaaaagaaatggcagtatttaagaaataaacaactgacaggcttgcatttgctctgagctgcagactgacagtcaagcggttggttgtgtgagtgcgtggaaccagaaatctcaggcagtgaatgacggtttcattcagcatggagaccctgtttaattgtccatgaaatcaaacttttgtattggcatgacgtcggccctaatacctgcagcacgcagctccgttctgggcgttggagggataaattgagtgcagacccttcgacgtgctgcgctgggctccagctcaattcagaaaagaggtgatcatgtttctgggtgtattaggacattgtctgggaacagatgtgcctcctaccgcttgggcggggggagatgctggcaccagaagctaacagctgactcattctgtcggctggagacaagcatggatggatagcagaacctatttatacagaaaagatttcttttttcaaggatcttcaatattagccacttacttcccttgtttaagtggacaaatcacgccgtaaaaaatgaagatgcatagttcatattctttaaagaaaagccgcctcaatgggaagctgaactggctcttgctttttcccactcagccttccttctgaggtggacaggattggaggttgtggtgacagcgtggcttcttcaggaatattttgcaaagtctctttctcagtggcttcccactttcttagtggtatttctccaatggcgtttcagtaacaagagtccaggaaggtgctctttcgggcagccaggaatgaaagaccaagcacgatagacaggtgtgatttgcagtcacatcaccatgagggcacctccgccctccacagacatgaagtggc

SEQ ID NO: 11653 - DNA, 6000 bp, Homo sapiens
attgctgtgagcatgggtctaccctgagtgcctttcctgagggaggcctgagatgggggaggtgcttgaatgatggaacctgggtgttctgttctaggttttggattcctggaagcccatagttccagtcctgaacaaacggaccatgaacagaactgccccgcagatataaaggtgatgaggcttgcaggccagcccaccaatgctcgtggagctgctaacagagcccagccattgcacagtacttctgtgtctcatcttaaggctgtaatatttaaaatacagacaagtacagttagttaatgatggggatacattctgagaaatgcaatactaggcaatttcatcattgtgcgaacatcatagagtgcacttacacaaacctcgatggtatagcctattacacacctgggctgtatggtatagtttattgctcctgggctacaaacctgtacagcatgttactgtactgaatactgtaggcaattgtaactcgatggtatgtatttgtatatgtaaacatagaaaaagtacattaaaaaatactgcataaggccgggcacgatggctcacgtctgtaatcccagcactttgggaggccgaggtgggtggatcacgaggtcaggagtttgagaccagcctggccaacatagtgaaatcccctctctactaaaaatacaaaaaactagctggacatggtggcgggtgcctgtaatcccagctacttgggaggctgaggcaggagaatagcttgaacccaggaggcggaggttgcagtgagctgagatcgtgccattgcactccagtccaggtgacagtgcgagactccgtcaaaaaaaaaaaacaacaacaaaaaactgcataaatgattttttaaaatggtacacctctataggacacttaacatgaatggagcttgcaggactggaagttgctgtaggtgagtgagtgagtggtgagtgaatgtaaggcctaggacattactgtacactactgtagagtttgtaaacttagtccactccatttatttttcaatttttctttcttcaataataaattaaccttatcttactgtaacatttttacaaacttttatatttttaaaacttttgactctgttgtaataacagcttaaaatacattgcacagctgtacaaaaatattttctttctttatagccttaatctatactatttttctatttttttttaacttgcaaaccttttttgttaaaaatgaagacacaaacacacacattagtctagacctgcacagggtcaggatcatcaatgtcatgtcttccacctccacatcttgtcccactggaaggtcttcaggggcaataacacacatggagctgccatcttctatgataacaatgccttcctctggatacctcctaagggcctgccagaggctgttctacaattagcttttttttttttttttttttttttttttgagatggagtctcactctgtcaccaaggctagagtgcaatggcgcgatctcggctcactacaacctctgcctccctagttcaagagattctcctgcctcagcctcccaagtagctgggactacaggtgctcaccaccatgcccagctaacttatatttttagtagagacggggtttcaccatgttggccaggtgggtcttgaactcctgatcttgtgatccacccgcctcagcctcccaaagtgctgggattacaggcgtgagccacggtgcctgtccagctttatttttttaaataagtaggagtatactctaaaatgacagcatacatttattatcattataagtattatgtactgtacataaccgtatgcgctagacttttgcataactatcagtgcagtaggtttgttccaccagtatctccccagacacatgagtaacatgttgcactatgatgttacaacagctacaacgtcactagttgatagtaatgtttcagctccattatcatctatgggaccaccattgtgtacgaagtccatggttgatggaaatgttgtcattatgcggtgcatgactatatgttatagattatgtaagggtaattgagttccaagttccaagtcaaaaaatgtttggaacacaactcctttgctagcaaattagacacttacagtagctagttcccagggaagtcccctgaaatactttaagggcctgaatcactgctgagccagacagcatgtaggagaaggctcctgggtctcatgtgaagctggaggggtgcctgccctagagattccgaccctgcctgaggaacccattcatcccatctggctgagaccttggtggatccaggacagctcagcatgctggcagtcagggacaggagagccaaggaccgcaaggtcccattcagccttggtgcgattcaggcccagttgggtgtctggtgctaggactaggtgctttcggagggagatgggaattgacacatgggcagcagcccgcggcaatggcagaaacaacctcggggctggaaacagaagctgtaattacaggagaaaacacccacaatgaattccaaaagatgacccttttgctccctagaaccagggagggaaaggaaggggaggcacgatctcctggtaaaaacagggtaacatgaaaaatgctgtgcagtcaggctgaaaactaaacagatgtgagtttctttaatacaaaagtttaatcattctgacgttttccataacttaatctgagccatcgcttcagcttgaattatgcataatgaaatggattatttacagtatctcacatgacaggaaaaactgagaggtgagaattggtagcttggcaactgttgtttatttttctttttatttggccaatatatattgagtacctactatgtttcagcccttgccagggtcctattaggaaaaaatagtgtggcacatgcctgtaatatcaacacttcgggaggcggaggtgggagaatcgcttgagcccagaagtttgagaccagtttgggcaacatagggagacgtcctctctaaaaaaaaaatttttttaattagcctggtgtggtggtgcacgcctgtggtcccagctgctccagaggctgaggtgggcggattgcttgagtccaggagattgaggctgtaatgagctatgatcgcgctgctacactctagcctgggagacagagtgacagtgagatcctgtctccaaaaaaaaaaaaaaaaaaaaaaaaagtatttttaaaacacatagtatgggccagtttctttcacttctttctcttgtgtatcgcttgcgatgatactgtgtagcaggtattattttccctgatttacagaagtgagtggaactgagattctgaaaggttaggtaaattgccaaaggtgacacagcaacactcccttttgttttgttgttgttgttactatctatgtgcttcgaacagagacctatcgactagctttcctaatcttactacctttccttcatgctttacacaagaaaagtcaacttttcttaagggaaaggttcttgttattttgagcaggaaagtaaatgaccaaaattgtactttggggaaattaacctaagtttctgtaggatgtgctgcgggccagagcccaggccagaggcaaggaccttaagccagggcagtagcaacaagcatgggaaggggcccggcagcaggccctggaggctggaaagggcttgtcaaatgtttggatgtggtggaagggaagggcagccttgccaccctaggtttgggacgcaggggacacaggggacactggcaggtggcgcagcctgggtcaaacccctcactctctgagcccttcttgcttggcacccttgcaaataaatgccttcctttctattgctgcaaaaacctcggtgtggatatccggttttactgcacagggtgagtggacccagtttggttccataacactgtctccctctatccctcgttggtgacctccgtgtagcaggtgctaaaagctggttcacctgtggggcatgtgtagttttcagagcgcctgtggggtctcgtccagactgggaggctctgactcaactccccaccttcttcactgcattcctgcccccagccttgggctgctggcctctcctcccctagctggcagaggaatgggagaggtggtccaagcccagctgccttccactgtgcccactacttctcttactgcaccatgtcaaggggacaggccactgctcggccgttctctctctgctctgctgttgctccttctcagtggagactagaccccagcccgcgtttgttcacatgccacatcttgtgccctggcacagggctgtgtggaacagaaaggcatcgtgaagggcaagacctgcatcactccccagtgggcagaagcctcaccactccagtaaccttccttcacagccttcttcgagggctggaggggcggtggtggggggtggagtcagagggcagtcttccacctcaagtcagcctcgaggaggggtctgctcccagctctcagatcttgtctttagaacgagtgccagttaattcccaagtctgaatcctactcattgattcaggacagcagaaaaactcccacttcccacccctgtttctggaaatgaccacaagcctggctacagggcgaccgagaccatcatgggtggactacgcacgtccagctcttagtgtggtctccgtgtctcggttttctcttttgacttctcttttggagctcttggttgagacacttggtgagtgtggacttttaaggtaaactctgagctgaccaggactggctggttggtctcttgggtgctatgcagtcacagaagcaggtaatcaaagaacaaacagtcctgtggtgtttggagtctcccttggctaccgccaaagcctctgtttgatttcttgcatggcaacaaaaccaggaggggaagctgagtggcttctggaataaactttgggtgtgagacgggattcaggctgtggctaatgtgctggaagcacgcacagttgtgaccatcaagtatgcaggaagcaatcattctcctggctctcctgggtgccatgtcaggtaggaactcaattttgctttggaaccttgcttgcctacttggtctgcataataccattgaatgacaatgtcccccagaaaggaaattgcccctgggaggcttgttcaattgagggcttagctgcagtaatgaatgaggtgatgccgctccagggagccctgggggaccaggtaggagccctggaaaagagagatgcttaaagagcctaatctaatctatgttggtgtagacttcactttccctcttgggttaactggcctgcatttggtagtcctcctgagatttaaggttgggaaaatagtgttcatagcagagctttgtgagtatgtcaagtgagtctttgtggagattctggcccttttctggaggctcgtagggcaacttgaggttgacaagtgatcctttgaggaaagtgagttactgagggggtgtcttcctcttgagcaaagaaaacaccttctgatagaagggtcaaagactcaagctagtgatcattttactctctcttcctcattcaagggcatcaagaatcttagatgatctttttaatgtcagcttggattattgaaattgagattttaaaattaaattttatttctgaataggtagtatatgcataatatattgaatttatgttaaatttgcaaattaatttagggataatttacatctttgacaagttatgtagtaaaatacttagaagagtgtctgagtacatagtaaatgcttagtaaatgttagtgagtattatttatgatcttgagtcttcctaatccaagaacagggttctagatacttgtttgagtcttcatttgtttttcttaggagtattttgaggtttccttcatatagatttggtacattcttattatggttatttctagttcttttactttttctttttttacatttgtaaatggaatctctt

SEQ ID NO: 11654 - DNA, 6000 bp, Homo sapiens
aatccttgacctcaatgtggggactttcttggagaaggatggagccacagaagtctggcaacacagtggtctcagtgagtgttgcacctgcctgcaccccacccactgactcactctagcagagattttgaggaattgcaaggatttctataaaaagtcttcctaggcctcactgtcccagggtattaaacacacagactaacattttaatcagagcaagaagaaaatctcttaaaagaagcagttttcaagaagtcaaaaaggtgtatgttttttaaaaattttatttttattatactttaagttccagggtacatgtgcacaacttggaggtttgttgcatatgtatacatgtgccatattggtttgctgcacccattaactcgtcatttacattaggtatttctcctaatgctatcccttccccatcccccaaccccacgacaggcccgggtatgtgatgttccctgccctgtgtccaagtgttctcattgttcaatttccacctataagtgagaacatgtggtgtttggttttctgtccttgcgatagtttgctcacaatgatggttttcagcttcatccatgtccctacaaaggacatgaactcatccaaaaaggtgtatgatttttacagggaaagacatacttgataacctaaatgactgcctaacaaaaaatatacttttaatataaatatttacacctaaaatttatatcacaccttgttggctttgaaaagattttggaaaaagtaacagaatgatacataggttattaagcagaatttttaatgacaactttatcttataaaaatgacataaaaaatcaaccattaatttctcctgttgactgctacaagtcaatgagaatactgggtatttctcaccgagggtgagaaatttttttatgttatagataccgcaaattcactactactcaacacttttattgaaaacaaactggaatcaaaaactaagctttctatcagttacttaattcaatctactagtcattgaaacattggtcctggattatttcctcaaagtttgtgacaatatgggggaaagaacactcatatactacaggtggcaatgtatgctgaatatattttaagaggaaagtctggcatctgtcaaaattttaaacttgcataacctttgatccagcaattttctcccaaaatatacaaccagtgggcaagaatatatgtacataaagttgttcattgcaacattactgaaaaactaaagtcacactatatgttcatttataagggaatggataaagaatggcacaatcatattttggaatatgatgggcacagtccttaaaaaaaaaggaaacaaatgtactgacgtggaagggtttctatgatagactgctgaaagaaaaaagaaggttgcagatctttcagtttatatagatttatccctttttattataaaaatcaaatcataggccgggcgcggtggcttacgcctgtaatcccagcactttgggaggccgagacgggcggatcacgaggtcagcagatcgagacctcctggctaacacggtgaaaccccgtctctactaaaaatacaaaaaactagccgggcttgttggctggcgcctgtagtcccagttactcgggaggctgaggcaggagaatggcgtgaacctgggaggcggagcttgcagtgagccgagatcgcgccactgcactccagcctggttgacaaagcgagactccgtctcaaaaaaaaaaaaaaaaaaaaaaaatcaaatcatacagacgtgtgtcatataagaatatggtggtttaacagaatacggattgtaggattaaaaaaaaaaaaagaagaagaagaatatgttggaaagaatatgtaccaaactcttatcacttaatactcggggagtggtgctgtgaggtgagggaattttcattttttttacttcatacacttctgaatggtttgaagtgcttttaaaaacttttaaacttgtaaaatttaaaaataaatatttttaaatattttacatttttgaaaggcatatcctttttttttgttttgtttttgatacagagtcttgctctgcctcccaggctggagtgcagtggtggatcatggctcaccacaacctccgcctcccgggctcaagggattctcctgcctcggcctcccgagtagctgggactacaggcatccgccaccacgcccggctaatttttgtatttttagtagagacggggtttcaccatattggccaggctggtctcgaactcctgaccttgtgatccactcgcctcggcctcccaaagtgctggtattacaggggtgagccaccgtgcccggccattttttaaaataagttagactgtgagataaattcaccagtttagatcttaaactggtagccctctggaactttgaaaatctaggaaaccgtaatagtctgttaccatcagatagcccaatatataaccaacccaaaaataaaccattagggtgttaaattcaatatttaactcaggagactaccaaagatttgtttggtagaggtactaaaataatttcagagtagggagttccactgttgggaagtgggaaaaaactgcacttcaactctgtgccgctgaggtaaatacttaagatgatatcaatttaactgtgaaagcaaaaacaaataaatcgaaaaacaaagtcgcaacagtctgagaactatatttaagccccaaaccatgttcatcagaaaaagacaacttgtgctaaattacacatcaagacaaaaatggggtggggggaatgggggagggatagactaaaggtaaaagagtcctaaacacaatccacctgcagctttcaaaatttggttttttattcctacagtggatcagaggacaacctgaaagtcaggtacagccaaagttgtgatggttttcaaaactcttttcaaatgttctttgaagccacgagtgcaaattatctatcactttccttttctttctctaaggacccagagactgggaagatctctcaggctccacatacaaatctgaagaacacccagagcagttaaccatctacagggaggttgtgagatacacacactttcccttcagaggtcacctcagccacaaactgggcaaatctgtagagtggagagcagtgaccaccagtctgcgactggaaatactccggaagctaaataaaacacacctgcgaggtcaaaccaagcaaaccaaggcagtgtactggtgaggagaaagagctgctaatcccaaaattataaacacacgcgcgcgaaccagatctgaaccaaacccactcagcagctagctcaaagctgggagctccaaaccagaagacaaacgctcagggagcttccccggcggaggggaaggccattccatggcattttctccgccatcccatggcattttctccgccatccccgggcagccccaaccaagtagccgccaccggctccaacccatcccgctgggccaccacccgtggggcccagtcgaacccaggtggccccagagctgaagggctcctagggtcagaccagaggtccgttgcacacccggtcatagagaaaggaagacacatcagccgcgcctccggggcaccgtactcacccccataacctacacccccgactgtgctgcagctcccatcacggtcttcctgcattcgggcgacagccccctgggtcttggaagcagccattacccggcagaaaagaaaagggagggccgcagggcgggtcggaggcggggtggcaccagtagaaacgctactggaggcgaactccccgtcgacgtaatgttttctccacacctacgccgcgctctggaccaataggacgcaatcagtaaaactgaatccccgccccgaaccacatttgccgcgcccacttccgggatggggaggccaagaactacaattcccagcgtgctgcggggccctgggacgggagggctggactaggcgctggcgggcgggggtgcgccggagagtgccccggcgtgttcgcttagttcagtgaatcagaacaatgactgcgccgccgggtacccgggagcgcgtcggaggactgtgagcagccgccgccgggagagctgcgggcggcgcagtgtcaacgctgggctcgggagcctccagcgcagatcctgcccagcgcccgcagcccgcgcgaagccgctgggctccggcactgcagcgctgctcggggactgtgcattgttgtgagccggagaaggggcgcggggattacaaagcctgaagaccccggagcccctttagccatgtggatacctacggagcacgagaaatacggcgtgggtgagtctccgcggggcgaacttttattctgctctggcccgagcgagtgcgcatttctcgtccttgcccccgcgcccctctcgctccgcccggttgaaaatgcctaatcctggcatcgcgcagctggtacggggctttgccgagccagctccaggcagagggctgcgcaccaggctctcgccccgcaccgcctgctcggcgcgccccgcactggttcccgaagcgccgggacagcttgggggagcgcgcggccggcccgctagcttcgggctctgcctgcggagtttggagtggcgactgggcgtgtgtgtgtgtgtgtgtgtgtgtgtcaagttggaagaggaggcgaatggggtttctctccttccttacccttcttccccaaagcgacagggagctgcaacggttcctctgggtggagagggagacaacaacactcgggcagagagaacacccccaaaacagtagggaggcgcaaacccttccctctggctcggatcgacattcccggagtgtggaatgtggcagggtcctggagagagccgctctgacaagctgagccctctctgaccctcctccctctctgcgatcccggatttatggggtgtgtatgttgcggggcgggggcattggtaaatttcaacatctgcgccgctcggttctttggtctttggagaagaacgggtatttcagcagtgtttttacttctggccaccctctcgaccccgggtgagcgcagtgggggcggtgtggcggtacagggctgctgagtgataaatggggagggggatcggaaagcctggttcttgggggcagggagatagcttttaggaaagcataccctgacactggcgttcggagaaaaaggaacaggatagctctcgctgttctgtgtaaaggtgaacaacaaaggacattaatgttgactgatgaatacaggagtctcccttccttttcctcctcccatttcaggcgggttacagttcccgtttttgttgtttgatttcagctgggtcgccccttgacagttactccttttagggttgagactattaagaagccaggctctccgacaaggctgcagccggccaaatgcaattataacctcccagaaggtctaacagaaagcattatggattttactaacactctttatttcctataatgccctgttctgccgactggtgtactttgtgtgtgtgtgtgtgtgtgtgtgtgttttaaaattgaggacaggtctagtgatttaggtgatgtgtagatatctgcttatgttctaaattcattttcctgcaatttaaaacatctggaaagccttcccagggagtcgtagtccgaggggatttttgtttttttttttcccaactttgcctggggataggactttggggtccattgaaaggactgtaggattcaacaaaatcattcccacatttcacgttagcttccattctggattgtgactaattaccaagacaatagtttgacctgaacccacctttgggaaaggtttccagctttccctccttcaaagtgtcagaggagtctttgccagcctctttactggcaaggagtagatgttagtagttgttattttcgttctcctcactcttctcttttttgggaggtagattaacccttgctagggaaaaagatagtccctt

SEQ ID NO: 11655 - DNA, 6000 bp, Homo sapiens
catttcatactttataggtggagaactgaaagaaatggaaagaattgaaagaaagtttaaaggggtgaggaatggggaactgtattacagtaatcaagttattcaaaaagtctgcaagtccttgctgtgtcttctgaagttgtggccagatagaggtagaaaccaaaataatttttttttttttttgagctggagtctcgctctttcgcccaggctggagtgcagtggtgcgatcttggctcactgcaagctccgcctcccgggttcacgccattctcctgcctcagcctcccaagtagctgggactacaggtgcgtgccaccacgcccggctaattttttgtatttttagtagagatggggtttcaccatgttagccaggatggtctcgatctcctgacctcctgatccacccaccccagcctcccaaagtgttgggattacaggcgtgagccaccatgcctggccaaaccaaaataattcttatttcacatttccagcctaacttctcttcctgagtttagtctattaaaaatatatgacaccaatgttcatagtggcattactcaaaatggccaaaatatggaaacaacccaaatgtccaccaacagataagtggataacaaaacgtagtatatatacacaatgaaatattattcagccttaaaaaggaatgaagtactgatccatgctacaacatggatgagctatgaagagatgcgaagtgaaataaaccagatacaaaaggatacagattgtatgactccacttatatgaggtatcagaataggcaacttcatagagacagaaagtagaacagtggttaccagggctgagaggaatggggaatggggagtgattgcataatgggtacagagtttctgactgggatgatggaaaatttgggaaatggaaagtgatgatagttgtgtaatattatgaaagtacttagtgccactgaattgtatactcaaaatggttaaaatgataaattttatgctatgtatattttaccacaaaaaaaaaaaaacatcaaaatcggaaccacccgccgggcacggtggctcatgcctgtaatcccagcactttgggaggccgaggcgggtggatcacgaggtcaggagatcgagaccatcctggctaacacggtgaaaccccatctctactaaaaattcaaaaaatcagccgggcttggtggcgggcgcctgtaatcccagctacttgggaggttgaggcaggagaagggtgtgaacccgggaggcggagcttgcagtgagctgagattgcgccactgcactccagcctgggcggcagagcaagactccgtctcaaaaaaacaaaacaaaacaaaacaaaacaaaacaacaacaacaacaaaaatcggaaccacttcccttcaattcccagttggaatttctaaactgtattttgttcattcattcccattaaagccgaatttcttctcaagacctgcttaaagccaacagtgtcatggacaatctacatacattcataagcacaggtacacagccacacacaggctactttgtgtcctgcagtgacccatccacaaacatgtatccgtcccaggactttgttgatcactccaaaaagagggcccatggcaagcattactggagatccaggtaaccaaataaacaccctgtctcagctcaacccttcaatttctcaccatgggggaatacgtattcagtatatagatattttatctataaagaaaactgcatgcatatataccagaaagaccatcaggaattgctcacccaagtctgttccaccaggcctgtgaacaaagagatttcagcccatatatggctattttggtgaagttagcaatttcaagttacactgaacagtgggtgtccttaatgcaaatatgtataattaggagctaaatcttcgtacctttataggacaaaggacctaataagcgggatgtaccacctgtgacttctgaggaaaggagagcttttcattttttcttaaaagaatccgtttctcagccaggcacggtggctcatgcctgtaattccagcacttcgggaggccaagtgggcagatcacgaggtcaagagatcaagaccatcctggccaacatggtgaaaccccgtctctactaaaaatacaaaaattaactgggtgtggtggcacgtgcctgtagttccagctatgcaggaggctgaggcaggagaatcgcttgaacccgggaggcggaggttgcagtgagccaagatcgtaccactgtactccagcctggcgacagagtgagaatccgtatcaaaaaaaaaaaaaaaaaaaaaatctgtttctcatgaggcaaagagaatctgagaacaacagtcttctgaaatagaaacagggactggggggaaaggatgtgagttttgtgtgtgatagtcataacgcatcacccagacctgagaggtgacaatcctgtgctataccatgacctttactcaactttaatttaaagatttccacagcctcatcatcttttatggacacgttgccagtagcctgataactgggtcttgcaagcacttagagatctcaagagtttgtgtgtgaagaaaaataatctctagtgatgcttcccactgccaacacacatgaacatttaacacaaataagctgccacttgtaagaagtccacttgacatcaatccctcgtgcatcctgaagacacctgtcaagatcacactaagatatttagaagcaaacatctttagaataatgttttgttcccaaagtgcttaattagcagaaacattatgctagggaactgtccttgaatatgtacgcattttaaccttcatgttattttttctgaagcacaaaatttcctctcagtggatggtcaggaaatgattgggcacagaaaaccaaccatctgaagtgttgattcataaaatgagttccatctttccacgcaggcttcagctgccttccagggtgacatccctttttatgagggggaccattctttggcatctaatggccttttctccattcatttgggatgaccaatgcacctatggcctacttatgtctgaactctttcaataccaccaacctcttctgtccccttgtgccatcttcccacccccaatttcagccaattatgtttataagacatcagttagtgaatcacaattcaaatgaatccacctatttgcttagcagcaagtggcccccggagttgctccatttgaagcccataggccagagttacatacggcaggcttgcaaatgagaacaggatatgatttatttatgacgaccatatgtgtttgatgcccaattgcagcaggttgtggcttctcttgcatatcttggtctgggatgacctatctactcagtgtgtcccatttcaggtaccgtatttccatgctgggaaaagagagatgatgactgctgaggggctgcacatacagatgctcctaaccctgcttgccacataacaatctgtgaccaaatgcaaagtgggccaaatgtaacttgctgcaaaggtttgccatgtacaatggttttcagtggtgagtggagaagtagctgctggaatgactgaccatgtggggttcattaagctgttgtgcattcacccacgagaaaggctgggatgcttgtgaagggaactccactcttcatttcagaaattttaacgccccaccatttggcaatgatgctcccaaggagaatggcagatatgcatcagaaggttcaaacgtggagtccaactgaagtgcagtaaacttctgccttcaacagtctcacccccctttaccccccccccagttgtatttatactttgaaagaagttaacatgaagcagtagtcacctgggcgtgctcaatttttgacaagccttagtcactctgtacccagcagaacaattcacattatattcgaaatcctgtgaagattctgccacacatgctaacactaaaatgccagtagctccacttaccttctttattaagcctcataacctccctgctttttccaccctcttttccagcctcttctaaatctacatctgcagatgaaaaagaaaaggaaaacagaaaataaggaaaaaaggggggaaaaaagccaaagtcaaggggggagggagagtgtttatttgcaaacagatcgatataaatactgtatatgaaattctttcaaaaattgacaatgcaacattttctcccaagtctgggtttccatctacctggcccagataggtacccaaaaaactatgcaagcagcaacaaagtagccttttaaacggacaacaccgtggggctgcgagcccaccccgcgggctgccacggggagccgggcacagacagacagacagccctggcagccgggcctctccctgtgcattgatgatctgtctctgtgtgtatttatttagagagagagggagaagcatggaggacaccgggggccactctctctctcacacacacactttttcccagtggctctaggtgaatggaaaggttacaggataataaaaggaggaggaggtggtggggttcttactgtcggagcagtgtaatttggcggcgtcgatccaggaggaccagggtttgcccagaaacgcctccggactgggcactttgcgatccagtgtcgccattgctcttccttcttgttgctttttccctgttccttcggcagcagcagccgagagacacgggattcgagaacgctccgacgtcatcttcggaacgttccgacattgagtgttctgaaagggggagggagggaggaagggcgggatgggaggagggcggcggaggaggaggggagagggagcggaggaggggcgggcgctcgggctcccggagccggctcggtggggctcgcgcgcccgcggccgccaggggcagcagagaggcacctgcagtccgcgcccgcccgcccgccggggccgcccgcctgccggggaggggcagcgcggacgggcgagcgccgcgtgcgggagagcgaaggctgcagcgcgcccggcagccgggatgcagcggcgccgcccaagcctggggcgcaggggtcggggcacacggggataggcccgacgcggggccgaaggaagggtggtctttcccgcagagttgccgctggaggaccgaaagttttgcaggcagcccttgcttccagcttgtcgctctctccccgcgtccctgtcgcccaacgcgaggcgcccccgctggggtcccgacggcttggtggggaggagccgtgaggggttgcgccccccacccccacccgagccagggaagggaccctggtgacctcgcctcccagccctcacccccgtcacccctttcttctctttcctggaggactttggaccatggagattctgcagttgttgctctaggagctgaaaccagtgggtagatgtcgttctgaaacgcaggtgagtttggagcgctacgagctaccttcccatctcaggctgcggggcgtgcaaaactcaaaagttagggcccccggacccccgggttccccgcgcggtgcgtatctccggctctcagagaaccactgcatggactttgctccagggtcagcagagcgggagggcgaatttacggctcttggaagacgacgctaacgggcctagcccctgagccgtttccagcgctccctgccgtgagacgagggtggcccgggtttgcgcaggcaacctttggccaggaatctgattcctgggagaattcacttcaggcttaactgctctagccagctagaaagggagcgctagatttcctctggattttggacgttgggtgctttagttgagattttcaccctttaaagaaggctttaaaaagtcttctgttacttctttttaacaaatccttttgtttactagaattatctaaactatatggacaccgccctcaccccacaagcgacatatttttttttctctttcgccagcacccttttagctctcaccactgctgtttcccaagttgtcaca

SEQ ID NO: 11656 - DNA, 6000 bp, Homo sapiens
agtgagcagagatcatgccattgcactctagcctgggcgacagagtgagaccctgtctaaaaacaaaacaaaacaaaataaaaaccctagtatcagaagaataatataaatagatctttctcttcccctctcatggcaggctgcatccataaaattaaaaaaactgtaaagggttattagtttttcctatttcagttttcaccatctactgcttattaattacttcctattgcattttcattgttagtgaatatttggataaataactgaattctctacttcccttagtctatgtaggcctacataaatggattccatatacttttgtgctgtcacagtcaaacaacaacaacaaaaaaacacgactccaactctatggggtgaagaaagatcttgctatgaaattcagattttagagatgaatagttttgttttgtttaaataggaagtcatgttgtaggccctgattttttctgaatgtgtttgtttaatggaggaaacgggagagaaagagtaaaataaaacaagaaaaagaaattgaaagaaaaattctatgattagagattcaaaataaaataatattgaagttattgcttgaagacatgatggtattttaaaatataacagctacttttttctaaatatttaaactagcataagtttgccaatatggggactctgatggacaaataataaacttccaataaatacttgtttaatgttactatgcatctctttagaaaaggtatttctttcatcagaaattcaatgccctatcatttcaatagctgtattacttgggtcaaggcaaatttttttctaaatagttgtcttgtttgtagaaaatattttaccttgtttattagtttaggatagttccttttctatgctttttattttttatgcaggcttcaatgtgccacttcactttaaaaatgccaaatataaactcttgacttaaaaatcactacacactcttttaaccattctcctgagcattgatacttctgaattgcttgctttcttattcctgtctcttgaaagtattccccaaagaagtaagattgttgaagctttctttccatttgtctttacttttcactttctctggcacacatctttgtgtgcatggaagcatagtaccatctcaaatcacaagtttttctgattatgactcttaacagtatgtctatctcagagatgagtcatatacacctatatgcatacaagcaaataaggccctttgtcaaggttttcaccttagttttcttaagatgtggaaagtaatatgaaagttaattatttcctttaaatttttttggctaaggataattattttccttttcagtgtttgggtttgcctgtttgtacatgagaacaaaaagagagaaagattaaataatttcaattaggttactctgtctcattttttcaggcaaaatgttgaagaaattagatttgatttactgaaaaaaatcacagaaaaatgtttgtacatacatatactcatataaaaactacaacaaaaacataattttatgctgccaacattcacagtatcacctaaaaaaaggaagaataaacatttcatggcaatcaagtttttattgttctttattcacttttagttactaaaaaatgaaatgtatatgaacaaattaaatatatgaattaaaaactgagatttagccaaaaggtgccaatcgcaagtttgttgtaggtaaaggtcagtgatttgcatgaattaaatctctttaaactttgttctagaaatgattaaatgcaaaaatctcctgcaatacttcactaacttactaattaaaatatttcttcttaaatgaatagtagatactgatttgcgacttcttgctcatttataacctgtaatatattaactgtatttactgcacatttacatcatttactataacagcttaacaacaatccttatgatttgtcaacatgttgaacagcaaatttatcgtgattaagcaaaattttattaagattaatgggatataatctgattttaagggaattttccaaaataacagaactgagctgaaaaaatgcattgttatgggtatagttaatccaacagaaacctaatgctatgttatggaaatggtcttcttttagctgtcatacatttaaaaaaaaaccacattttgaatatcctcaataagaaggtttagattggtaaaaagcaattaatagcaaacctcgcaacagagtattaaacaatgatttaggctcacagatgataaccaaccctttcagtaagaattgtagaagcaatatctttcctcaacagcttcacatattggagaactcagtgcttcaacagagtgatccaaagaaattgagatttggctcaaaggccaacaaagttaataataaaggctgacttaccttctctacaagcttattacattcttttattctttaagccctttctcctaaagatataaaattggaaacagtgtaccatagtgggaagtctggagttgatgttgaaataattgacagaatatataacaatggtatttttaggtagtgaggctattgataccaacatatcacatagacaataatgggcatctctaattctgctcttcttagtcctcatgctggggaagaaagtctgcttttgaattattaaaaatggaagaaatgatggatttgactatttacttatctaattttggagtggaatgctatcttcagttatataaaatatccctcctgagctgtagttctcaatcccattacatcccacttcatccctcatttgcgcagctcctgctgccacagtatccatgcctagcataaaacaaactaagttaagtcacggtggggtgccttttgtgaggccactcagagtagaaagaaacaaagagcaagacagagatgcgaagaacataaagaaaacaaataaggcattaaaaaaaggagaaataagtgggaaggaaaaataaattcaccaggctaagcatcataaaatcacacacgctcttaaaatttggccagtaattaatagtagtagtattattattagtctttgttttgggagattgccttcagagagctggaaaattcatttcgaattaataagggtctttttctttcagaagcatctcctaaaaataagaacgggctaattaaaaatctgacagccaccccgatacttacagaatttttgcatatgcaggatagtcatcacaaattgtattctctgcacgtcatgtcaaaagtattctcatacactactagagggagcttaagaatttaaggtgtgcaagaatatatttctatctttggcccaccagggccctcttgtaggaggcctgtgttgggcgggagaggcctagtcgcagaccctgtcttttcaaggagaaagcccgccactgcttcctctgagtctggagataaaaccagtccggcattgctactccctagctctctccccctcccttaattcctcctctacatttcaggcgcatttctcagagtgccacctgttcctgctgcttacccttttcatgccttcgcattgacaaaagtgagctcaccctgcggtaaccttgtcaggcagggcaggccagtggccagagcagggcgttaggacccttttggaggtagtcccaactgggatgctgcaaagcgcttctcttactactgtcctccctagatgcagaattcgtccctccacccctctgtccaatggaaccacagggctgggaagattttacagcgtcagtacttctctgtccgtccacagcccggtccctgaggctctgtcctcgccaggtgagccgagcagtacctgggcgtgggaccgctggcacaaagggcacccagccccggcagaggctctaacctatggcacacgcgggcatatagtgccacctggtagagagtcaacagtggtgctttaaaatgcaatacaaacccctcctacatttgttgtcaaatcacttcacgattcccaggcaggcactggattctgcgcctgggagtagggctgggggggaacgctgcctgcatgtgcaaaaataacccccgaagacgcgagccaagtcctgggttggagcctctgcagcctgtggatgcccgctgggcggctggccgtcccccgggagccccgcggggctggtccgctccgcctgcgcacgccgggcggcgggagcgagccggcgccgactttgggagttcctggctgccttgtatggagggctgctcccggcccgtctccgcccgactgctctgacgcccagccctcccgctgcccacccccagccgcctccctctgacttgcctaagaagccagacggagcctctcgcttccacaagtctctctgcctgccattccccgattcctgcagccacccccaccctccagcgccgtcacccctcctccgcccccgcccccgcctccgccttcgcctcggcaatcgggggaataaatcagggaggaaaccgagagggagagcgagagcgcgcgagcgccggcgggctcgccgaggtctgtttccaaagtcgcccttgatggcggcggaggcaaggcggccgcggcgcggagcagccgacgcacgctagtgggtccgcccgccaccgccccttcctcggcgtccgctcccgcccttgccgtcccccgcgcggctccgcgcctcgggccccgggcgcagccagccctccagacgcccgcggtcccggcggcgtgtgctgctcttcctccgcccgcggtttccagcgccgctccttcccccgcttgggcagggagggggcattgatcttcgatcgcgaagatggctgctggctgcctgctggccttgactctgacacttttccaatctttgctcatcggcccctcgtcggaggagccgttcccttcggccgtcacgtaagtcggcgggccgggcagggagcgccggccgaggggcgccgcgggagttgggggtgggggtcggttcccgagtcgcggggcttttccgcccgtgggggtggggagcgagcggccggggagccaggctcggatgcggagacgccgggcaggcggtgcgcgccgctcgccgctggaatgcgtcccgaaccggcgtctcgggcgcctccacggggccgggcactgggggccgactgtcccgggaagcgcccgccgacgactcgcggcgtctcagcccgtctctaacgggattctctagacttcagagtgcagccgtactggggaaaaaagtttccagccagctcacccgctctgattcaacccagttcaataaaaagttatgttttggttgggtaatttacaaacaggtaatttcaggcttgccgaggtagcgtggacttcccccgcacttggcctcggagatgctctttaattgctgtagtgcccaaactcgttttatcccacgttactggatgcacttgacagccttccgattagacgcgtgctggctccccgcggccgagcgtgctgtccacgcagggggctcgcaggtactgggaccacgcgatccaacctccccaacccattatttgaaacatctaagtgtcggcagacacgcggtccctgttcttcaaatgaatagagcctattctttgaaggagggactatttccagtctcctacaaattttcttttatttttaccatttctaaaataacttttaaaaacctcgctgctgttctggaaatagagggcttataggtagctatagtcacaccacaggaagggaatgaaaaataataattctctcctttcttagcaaaatagaatcaaactcaatggcacatataaatatatacatattttttaatgcaccgaatagcctatccggcattctgggaaagcatttattttggttcttggagcttctttaaagcttctaaaggtaggtaatcttaagtggatgagtcactttaatgcattttacataacaaaaacaaagcccaaggtagctttcccggtatttatgctgctgggaattacttgctgtcctttgtt

SEQ ID NO: 11657 - DNA, 6000 bp, Homo sapiens
gtgtatgttgatgtgtgtatatgtggtgtgtacatgtgcatgtgtgtgtgtctgcatgtgtgtgtgtctgcaggtgtgtgtgtgcgtgtgcatgtgtatgtgtctgcagatgtgtgtgtgtctgcaggggtgtgtgtgcctgtgcatgtgtgtgtctgcaggtgtgtgcgagtgcaggtgtgtgtgtctgcaggtgtgtgtgtgtatagtaggagagagtgtgtgcaggagtgtgtgtctgtatgtgtgtgtgtgtgcaggggtgggtgtgcatgtgcgtgtctgcaggtgcgtgtgcgtgtgtgtgtctgcaggagcgtgtgtgtctgccaggagtgtgtgcatctgcagttgtgtgtgcagctgcctgtgtgtctgcaggtgtgtatatgtagatgtgtgtgtgtctgcaggttatgtctgtgtctgtaggtgtgtgtgtgtctgcagggacgtgtgtgcatgtgtgtgtctgcaggtgtgtgtgtgtgcatgcactaactgtcatgggctcctttgcaggctttatgagttggcgcacggctggtgaacccagtgactggaacaaactccaagctgagtgagtaagcaatgcttttgacctcactaccccttgctggttccatccctcatgagcagagagcaaggacacgccctccaagaggccaggggacactgccacaggccacacactgacacttgacataccacaacacatataccacacacactatacaaatagaccaatacacccccaaaataccacacacactatagaaatacaccaatacacccccaaaataccacacacactatagaaatacaccagtacacccccaaaataccacacacaggcaatgcatgtacacacacactacacacacacacacacacacacacacccctcaccacagagactaagagcaagggagcagagatactattgcacagtgacagaggcagtaagaggaaaaacttgagcgaaacatagaaagacataggacaaataaaaagtgacaaagccagaaaaaaactatacatatacttttctggctctaaatcagtggttctcaatggagaatgattttgccaatgtcagcgtgtaaagacattcatgagcagcgtgtaaagacattccttggtggtcacaatggaggggagggacatgctactgtcacccagtgagtggaggctcggatgctgctaaacttcctacaatgcctaggacagcccttgcagaaaagaattatttgttccgaaatatcaatagtgccggggtcgagaaattgtgccccaaatgcggaaacatcgggggcacaggagctccaaagagctcctgtgcctccagctcaggactgtgtaactgtgacctctctgcccctctcaggggccgtcagaggaggctctgacactctgccctggggcccccagggaagcctgaggacctcactttcacttagcatttgaggctcagccccaggcagggaggactggtttaaccacctggtccccaggttgcctgctccagtcctgtcctccccctctcttggctcctgaccccttcggttctcttcagggcttggtcagaggccaccacgagggcagaaaagaggtcaggccatgcactcatcattatggataaaatcattgagaggaagagcgactcactcagaagtcacacaagtcttattatttttggagcctgggaaagggaaccgggagaggccagccccgtgagtgctctcccaggatctccagtctccccctcaccaccttcaccccaaaactcacagcctcctgggcatgcccactccttgactgtgggttacagaaccgattcctcccatgtcaggaggtgctgccctggggtggagtggcacagagggggctgtgctagtctcaagggagaaggaggtccacggcatccttcctgtcccctggaaacaagcaatatgggatgcaggtttaagatgtgagactgaggctggacgcggtggctcacacctgtaatccaagcactttgggaggccgaggcaggcggaccacaaggtcaggagatcgagaccatcctggctaacatggtgaaaccctgtctctactaaaaatacaaaaaattagctgggcatggtggcaggcgcctgtagtcccagctacccgggaggctgaggcaggagaatggcgtgaacccaggaggcagagcttgcagtgagccgagatcacgccactgcactctagcccggatgacagagcaagactccatctcaaaaaaaaaaaaaaaatgcgagactgaaagtgattggtgggggtgctttcaggagcttctgggggtagtgccacctaccctagggccaccttcccttactgatacgatgttaggtccaaagaccaagagaacattgcagccagaagcttatatcctgcaaacttgtcctcccctcccatccggacaccccaattttgagtctgttggctgatccatgcacaacaccaggtggaggaggctgaggaagaggaagagcattggaaaacaactttgtcctcctcctatcctcctccctccctaagtctccctcccaaagcctccctcccccagcctccctccccagcgtaacgaaggcctcattgctttctctccttccccaccagacactaaactggggtctttgaagctaaataggtctttgaagcgacaaaccactggcttaatgggcacaaaggtcttggggttcaaggtttgggttctagcaccttcccccaacccagcccgaacccactgacccaggtgggtggggacgaagctaatccaattgaactgtttgctcaggactgcgtggcctggcctctgcccagcggcaggaacacaaatagctttccacttgaaggggtccttctctcccctgccctacctcagcatccacctccctccacacaccgactccccccacacacagcacatatgacacacaccccatgacatacatacacacacaacacacaccatacatacacacatagtaaacccaccatacactacacaaatcatgaatactatacaccacacacacacacacacacatcatgtacacgcacacataccttaaaggtaccatatacatcacccactacacaccatacacacaacacacatgcaacaatctttccacaatacgtatatacacaacacacatgtcacacataccatcacagacaccacatccacacgctctacaggccatacctacacatatcacatatatcatacacacgtagacacataccaaacacaccacaggcacatcatatacatacagcataccacacacaaaacaccccaccgatgcacatcatgaacacacacataaacaccacacacaaatgcacatgggcacacacgccatacacacgccacacacacactcccctggctgggtcttccaactctgagtcagagaaagttaggacaaaacagactctgaagctaggaagtgatccacacacctgtgactctgaacacccagacacctgcccctaggctattggcacctggctggcaccaggaggttggataagcccgggcttctgcccctttccagtggaaaagttgaactaaatgacctttccgacagcttccagcaagctcatgatggagctctttgttgtgggaagacgatgggccatgcttaatgccatcattcttctgtatgactgtgcgagtcacttaacctctctgaagctctgttggccagttagaatgaggaggtgtgctagggagaaagaagtgggcttggaatgagggatgggtgtgaatcttgcctctgccacctctatggccttgggagagttcctttaccatggtgagctttggtttctcccatcaatacaatgtagataataatacctgccttgcaggtttgttacgagtttacctgggaacgctcagttaaaaggcccagcacacagtagcagctgaatgtcacctccacgggaaggctggcagatagaatacttgcaaaacgtggggtatatttatactaaaaaattctttgttgtttatctaaaattcaaatttgaccacgtgtcctgtattttatcgggcacccaccccatgcacggggcattgtggacagtctgtggagctcccgagcagggggtctgcccagagctagattttgtgccctggctggtgagcgaagaatgcattttacatctttgggggtggttagaaaacaaccaccaaaacaaaaccaaagaataacgtacattagagagtgtacatggcttgcaaaacctaacatctttacatttcctatcagcccttccagaaaaagtttgctgacccaaaggtgatggggactgagaggaaagtctgggagaactgagaatcttcgcaatttatatacctatttcaggcctggcaagaatgaaactggaagagtccagaaaatggaattctccaggacataagcagggggaggcagagagtgaggcaggtggtcggcagaagaggcactgtgggaaagtgtggcgctccctcctgggagtcctcaacattgggaatgggcctgccctgactcctcccctcctttctcactgcctagagtctctcagggtaggtcactgggtgttctgacgtccaagggaggcctcgccagtctttctgaaggcctccctggttgtgactggcctgggggcagggagagagccctgggtggagaaagaattggagttggcacaagtcccccttggtaggcaggtctgtggctggcctgtgtctttaaatctcaggtaatttgggaggagggagggcgtgtccgtgcagctttggctcctcctgctcactcccagcaggagctccagacaggccagccctgcagagtcctggctggctctgccaagtgtaacaaactcacagccctctccaaactggctggggctgctgggagactcccaaggaactcgtcaggaaggcaggagacaggagacgggacctctacagggagacggtgggccggcccttgggggggctgatgtgtccccaaggctgagtcccgtcagggtctggcctcggcctcaggcccccaaggagccggccctacaccccatgggtttgtcactgcccaaggagaaagggctaattctctgcctatggagcaagttctgcagatggttccagagacgggagtcctgggcccagagccgagatgagcagaacctgctgcagcagaagaggtaaggcccccttggtctgctcccttccccacctccccaggcctgcacctctacccctcacccctccctcacctcccgtctttgtttggcacctttggctggacagatggtgctcccaggcccggactggctccttgggagcattctgtcttaagagcctcagcctgtagggctggtgaaagaggatggggttgagatgggcacaggtgttcactatcttaagatctaattcgattctgcaagcctcttgtgagtacttctctaagggccaggcgtcttgctggggcttgtaaggatagagcatcacagcccctccacccaagaggggacggcaggtgaggacaatgccttctgtatctccactgcttgcctctagaacagtctctctggcaggaacacatagtatacatatgttcgcatggaggaatgagtgaacgattgaatgaatgaagcagagagaaccgcggacaccaggaaccagaaaataagacaaaatgtgaaaaaagtgaccattcctatgtatctgtctcatcagacactgaccaaggccttactatttgcccagcactggggggatatgaagacctacaacgctcaaacccaaccttgaggtgtatttctctctcagtgcgggtggggactggggggaagcgggtcaaaataacagatgttccgaggacctgtgctcttccgcattcaggtggtggaaatcgagactctagcgtttaagccctaaggacattcactggtggcttccagcccctgaaaact

SEQ ID NO: 11658 - DNA, 6000 bp, Homo sapiens
tggtagagcccattcacaccctctcttcaccctcccctggttttcccacttttctagcctttgtcctcttgtaccaccaggttgaaacaccctcttctttcattttacacctttctgtactcttagacgaaagaaaaggttgttagaggctcatctccaacctcattgcttggcaaaaggagttagagtctgcagagaagccgcagtgcggcagggagtctaggatcccaaataacagatctgggagaatcctgcctcagtacttggatgcgcctcctgcccatgagcctggtgagcacagatctgttggcagtaaccggctgtgggtaatcacccccaactgcttcttgggcagagatggttggagggttgtgagttagggagacagaatgaaggccttttttcgaaaaccagcaacagagacataggccattagatgcaggatggctgctaagacaggtaagagaagactttagtcactcctgaactctcataaccagttcacactgctcctgctcatccatgcataccagacctgaatgaaataccacatgcaggtccaaggacactgcggagacaggcaccctttctgcaagagggaactgcagacagaaacacacaaagagatgctttcccacagagtttactcgtgttagcagacatgcccacatggatgctgtctcacatacagcagacaccatctcttacacacttcctgatggtccaagccagatgacaagggactagggagtggtacggaggtcgcttgaaggtgagtaaggaaagattcaagtaggcaggtgaccctgctcaccccaccttgaacccattgacgtgagatccaaagaatgatgcttgaatggaaaaaaccatcactaatctcctccctcctggctattttgggggagcagcctcttggtttcctggcaaaaagagaagccatctccagctctgtgggaatgaatggggagggcggctggggtgagaattgcctcccgggcaggcttgagtggaaataactgagttgtttccattacttccatttccttgccaccaccacccgcctgacctccgcagtgttaaaagagataaattcttgcagaaaacagggaatcccttaaatattttttcttattacaaagtagaaaatatagaaaaatacaaaaccccaaaaaggctaataattccaccatccagtgataatcacttttttttttttgagatggagtctcactcttgttgcccagacgggagggcaatggcacgatctcagctcacctacaacctccacctcctgggttcaagtgattctcctgtctcagcctcccgagtagctggaattacaggcatgtgccaccacacccagctaattttgtatttttaatagagaaagggtttctttctgttggtcaggaaggtctcgaactccctacctcaggtgatctgcccgcctcggcctcccaaagtgctgggattaccggtgtgagccactgcgcctggccacagttagttttaaggtatggtatttgaatccttttctttctttctatttttttttttttgagatggagtctctcatactgttgcctgggctggagtgcaaaggcgcaatttcagctcactgcaacctccacctcccgggttcaagtgattctcctgcctcagccttctgagtagctgggattgcatgtgcctgccaccaggcccagctaatttttttttgtagagacggagtttcactatgttggccaggctggtctcgaactcctgacctcgtgaggcgcccgcctcggcctcccaaagtgctgggattacaggcatgagccaccgcatccggccctgaatccttttcgtagatggctgtggccacgtagggtgggagtgtaatttttaaaaatggaaatctaggtattatggttcctcctcctctttattatgttagaataagaggtcaggctgctttggcgtgaagggttctgggacttgacggtgtagtttggtgcccccagcccagttctcccgagtgcctggaggcattactgaccattcatcagtggcagggaagctgctctctgaaggcgagagtttgcagatgtcctcacttgcagaaagctgagagaggcatgaaaagaaaggagagaaaaggaaaaatagaatggtgatgtcgaatatcacaagaggaagaaacagtctggagagaaggcaaggagagaacaggagagactccaaatctctggtctaccagctgggactgccgggggacaccatggtcctcacccaggttacttgtccatgcccttcccactggagaggacgaggtaggcagagaagggcaagtgagagggcgaaggcccagggatggcgggtgggggggcctgagcattgggcctcccctttctcttccccagacccctggacatgcccttggcggcaagtccctgcacacctgctctgtgcagctcagactgggccagcctcctcccctgccggccccccatgtcccaacccccccgccccaggaccagctttatgggttgtagtttccttggcaggtgctcctttcctgacctgcctcgcttatcaaggcatctacaacccccacctcacccttatcgctccctccatctccttagactggaagtcactccacaagggcgtcacccccagcgaggcagaaaaatgtcccacaagttgagccctccccactcccagtgagaacataattccactgtatctttttttttttttacttaacttttccttttggcttttaataagaaaaagatccaaattttcccccttttgaaacatcaatgaacactagctcctcttagtttccttatttattttcctttcaattcttgtccttctctaaaggttattttgtccatccctcaatcttgggagcagatctctctttcttacaacaaaagaagggggcagtccccactcctcaagacccccagagggagagtcccagcgtatcctcacgctggtctctcacacctttacagccaaaagattcccaagaagcaacaaggtctggagagtggtttggagctgagatcccaagttcatggccagttacagtctcgccactagccatgggacttggggccagcacacccaagaattctcacagacggaattcttccttgttctcatttacctgataggtctattgagtgaatgcaattcaataatattgatgtacctctttgaaaacaatgagaacagaattgaacaatgagaacacttggacacaggaaggggaacatcacacaccaggacctgtcgtggggttgggggaggggggagggatacattaggagatatacctaatgtaaatgacagttaatgggtgcagcacaccaacatggcacatgtatacatatgtaacaaacctgcatattgtgcacatgtaccctagaacttaaagtataataataaaaaaaatgagaacataaatacaagctatcatatacagtagtcaccttttatcctcaggggatacattccaagacgccccagtggatgccaggaaccttagatagcaccaaaccctgtatatactatcttttttcctacacgtacatacatacatacatacatacatacatacatacatacatacatacatatgatgaagtttaatttatacattaggcacagtgaagagtttaggccgggcatagtgactcacgcctgtaatcccagcacttcaggaggccgaggcaagcagatcacctgaggtcaggagttcgagactagcctggccaacatggtaaaaccctgtctctactaaaaatacaaaaattagccaggcgtggtggtgggcacctgtaatcccagctactagggaggctgcggcaggagaataacttgaacctggaaggtggatgttgcagtgagccaagatcacaccattgctctccagcctgggcaacgaaagtgaaactctgtctcaaaaaaaaaaaaaaaagagtttaacaacaataaaatgaaaattataataatataaagttatgtgaatgttctctttctctctgtctctcaaaatatgttatagtactgtactcacctattttccaactgtggctgaccttaggtaactgaaccatcagagagtgaaactgtggataagggaaactacttaatatataaaatataatataaaatatataaaatagtgcaacattacttattcctcctggtgtttcattcctggaaagagtcccaaacatggaatcacgatttatttgtcgtctacctttgctcagtttctgctgttcaacctccataataactcgaggcccctgggggctcctctgacctgcgtccccaggtaccagagcctgctcggcgacgctccaggaagctggccggtcacggtcatgaggacttctcacagagagggattggcctgggaagtgggggtcagaaaccctcctttgaggtacagggttgaggacagagatgaccacaagacacataaatgggaagctctgagaagcagcccgggggtctcttgagccctcttgtggaaggaggatcggcagtgattgagtacttgtgacacatgctttacagatgctcccgtgagacggcatagccgttaccccaatttcacaggttaggaactgaggctcagaaagctcacctaactgtaagggataagagtcaggatttgaaccaggctctgcctgactcttgagctggaagtctttatttcctcctctccctcatgcaactaactgtgcaccttgtttgtggacccaccttccatcccttttctttttccaaattcctctgccccacctcttagcttctcgggtctcagccatcccagcccacagttaggaaccttccttcccctcctccttttcttccccagggtggttctgtggctgtggggctcagctctgcaaagagctcctccccctccaggaaaagcacttctccccaggcagggcggtcagtcccctcagcgcacctgcatgcacacacaccacctcacaaccacacactgcatgcacacacatacaccacagccacacactgtgcatacacgcacaccccacaacccacatactgcatgcacacacacacacctacaagctgcatgctgcatacacaagtcatacaggagataaactcagagtcccagccccaaatagaccccatctcttgctcagttgctgtcatcctagacctgtttctttcgccacatttctataatctgccagtgtctgcaaggagaagacatggggggttttctacctaaggcagaagggcccgggagccaactccagaaacttctgccctcctttctggtcagagaacaagactgggaccagcacctggacaagcttcatatgctgcagcagaagaggtaggcttcctagaacgatccgtggccctaccgccgtgatcctcagaccctctgacccacctgggcctgctttccgaatacagcaccctagaagtgtattgtcagtgccagtcactcagacataccctttccttccagcccacctaattacagaatcccagctggccccttttagtggcggtggaggatgtggctttgggccacacaggaaaatcttgagggtagacctaaggacagaggcagaatgacagccaagggggagtgaaaggaccaaaaaggaccagagggaagaagccaggttgtgtgggatggggagggaaggcagaagcaggctgctgaagaagggatgcactcctgtgggtggtggaagcacgataaggaaacgccattcatttgaatgaaagtggactgtgtgggaaaggggaggagcgctttgtttggtgtaacactgggtgctgaccagtggaggagggcagctcaggtgacactggagggctctgagttcagtccatctgccttttattgagtctactgtgtgcagaggggtgttagatcccaatgacataaagattgaatgagacttgtgcctgctcctggagagctcttag

SEQ ID NO: 11659 - DNA, 6000 bp, Homo sapiens
agaattctgatagcttttagagagttcagttttctgtagcattccattttgcaatcctatacaaatttctaatttataaccagtggtatgtaatgataatttctaatatttattaagtgtttattgggttctaagtgctttacgtctgatatatgtatcacatttaatttatttcatccagtggttcttaactggggacaactttgtacctctctccccaacatatttggcaatctctggagatagtcctggatctccagatctatctgtcacaacctaggatgtatgtggtcctacgagcatccagtgaatagaagctagagatactgctgaacattccacagtacaagggcaacccccacatcaaagaattatccacacccaaatgtcagtagtactgaggtagagagaccctaacttaatctgttcaacaatcctatgaggtgattttttttttttttttgagataaggtcttactctgtcacctaaactggagtgcagtggcatgatcacagctcactgcagcctcgatctcccaggctcaagccatccacctgcctcagcctcccaagtagctgagatcagaagcatgcaccaccacacctggctattttttttatttttttgtagagacaaggtcttactgtgttgcccaggctgatctcaaactcctgagctcaagcaatcctcctgcctcagcttctcaaagttctgggattacaggcatgagccatggcacctgaccaaggtgagtgtatttaacctcattttcaggcaaggaaacaaaagacagaaaagttaagtagcttacttaaggtcacagagctaagtgtggtgccaggattgaaaacctagttctttattgctttagcacaagctatttccactatactctgtcatgttcagagaatgttgatgtccatcagtggattctaaattttgaaggatggagatactgccttattctgtacatctgctttagcacccaagctcttgcttggtgaaaaattaatagtaaacattcatcttttgagcatcttcaaatatcccctttagaatgacattcaattattaggtcagtaaccccaagagaaaacggttgtttgagtgtatatactgtattacaaaataaggggtgaattcaaaggaaaacataagatgcaattcgtgcctccaaggaggttgtagggaagaggggttatgaatgtatgtaaatagaagttggtgtgcgtgtgtgtttataaacagaattgtcagaccaaacattattttggaagcagtaaaagtaaactagaatctggcctagtcatgtcccaggacacctctttcaagtcctgaaacatctttgtaagactgtaatgtgtgtttacatcctaggtaatcactgtggcccactgttgaagagctgtggctgttcttacccttctagcttagataaacttataagcacaaccagactacatatatgaagctgaagagaccttgtctttttttaacgagcttttcttcccgataggagtgactatttcttttcttcttccacattttcaggttttagtgtacttgtgattgctacccacttatcactattaaagtctactcaggagagaatctgagaaacactctcaaattaagttgaacatgatggataagtaaagtattgtgaaagttcactctcatgatttctaatggtgaaacctggcagggtgactaatctttgacgagaaggttatcacttataatctttcatatattgagatcatttgtaagaagcacccagcacattgctgaacacaaagtaggtattaaataaatgttggcttccttttctcctactcatcctcgctcttctttttaatatacctttaaaatgatgccacagaaatggccacccaatcttctatatttaaggtcagttcttgcattaggaaattctataggggaagtatgtgaagtatgtgtagtcagtcattaaatgcttgggctctggccacagattgtttaggtttaaatcccagtttcctcttttattattaattgtgcaacttgcttgggaaaacatgaaacttgtttttcctcaggttcattatctgtaatatatagtgaatgaagaagtttcctgtcccatgaaggtgttgtaaagattaaaaaaggcaaattaggctgtgtatttgtcataataattggcatatatggtaagtgaccaacaaccataaggtattataaaattgttataaaatgatatgagctatcattgagcagcatgaaagaagagcttcactgtttcacctactatcaccctggcccattaatctctttcctgttcctgacatttcagagatacgtttaggatttcaatcatgaccttaagccacatttgaacaattttctggtggataagtcctcattcccacattatgtatgtacctagatgcaaatcctgaatatcatgtcgcaattagtgcatctggacatgcttgctaactgtgttaaagctctgaataatggtaaagttttatttctaccaaaacaaatttgggctgtaatgttttatgataaaaatctgtggtcttcctatgtacatgtgtgtgtacatgcttaaaatgcaatgttatagttaaatgtaattcattaaaagtatgtaactccagtggctacttagtttggctacttggtttgtagatttctgctttcctgtttcattgttaaacaggtctagaagttattatttcatgaaactaatgtgaggaaaaagactatgttgatatataagtgacattatataaatacatgagggatgatttgattagaagcagtattacacagtgataggagtaatggtttagaactagactcaggtttgaatcttagctctatcattataggcatttacttaacttttcttgtttgcttaactgaaaactgaagataataacacctatttacatggttgttataagggttatatgaataatgtctggcaaatagtaagaactcaagtaactgtttcactctttccagaaggagattggctgaaaaatatttggagtctcctccagccatattccttggtcagcttctatgatcctctttggagcttaattcttaatccctttattttcacttgcttgttgataacaaagaagaactaattattaatttatttcaaaatgcatgtattatatttgatgggccacactaacagttataaaccaaacaacagattgggaatggggaagtggatgtggtgagttcaatcacatgtctgggaaaagtcaatagtgaagacagagtctcacaattttttgtcataatggagagatgaaaacacaggtagaggatttcaaacaacagagtggatggtgagttaaaaatgctgaaattctttcctggtgtctaacttaatgcaatgtggtttatctctttgctcttttctctactattcaaatttaggataataaagattaaatgtttctaaatcttactttacaatatcaagaaaaaaaggtatgcttttgcccacggaagggcaaagcagagctatgaaaacctgctgaacacattctttattttcaacacaggttcttgtctttccatcatgaaatgcacattttatttgtactgtatttgggtgaccacaagtcaacaacaagataattcacaagacccttgccttagatgtgtcggcaataaagtaatcaggccaaaatttttactttcctttgaatttttcaattcaaacacaatgtatgcttgcttttacacagtagggttcagggattagagggttggctctttaaaaaccgtcagagacacaggcaatcctacacaaaattctcagaaggaaggcgcctacgcctgggaatgcccagatgcccctcagagagttgaagatggcgtttctctgagtcaggtcaaagttaacacattaccttcgcttcaaagactgcttggcttcctttcggtggattagtcaagatgttttgctgactgagactaggaaatctataggagggcgggttagtttacattgttccttgtcattatcgctaaaacactccaaagccttccttaaaaatgcgcactgggctaaaaaggatagacaaggaacacatcctgggccggtaattacgcaaagcattatctcctcttacctccttgcagatttttttttctctttcagtacgtgtcctaagatttctgtgccacccttggagttcactcacctaaacctgaaactaataaagcttggttcttttctccgacacgcaaaggaagcgctaaggtaaatgcatcagacccacactgccgcggaacttttcggctctctaaggctgtattttgatatacgaaaggcacattttccttcccttttcaaaatgcaccttgcaaacgtaacaggaacccgactaggatcatcgggaaaaggaggaggaggaggaaggcaggctccggggaagctggtggcagcgggtcctgggtctggcggaccctgacgcgaaggagggtctaggaagctctccggggagccggttctcccgccggtggcttcttctgtcctccagcgttgccaactggacctaaagagaggccgcgactgtcgcccacctgcgggatgggcctggtgctgggcggtaaggacacggacctggaaggagcgcgcgcgagggagggaggctgggagtcagaatcgggaaagggaggtgcggggcggcgagggagcgaaggaggagaggaggaaggagcgggaggggtgctggcgggggtgcgtagtgggtggagaaagccgctagagcaaatttggggccggaccaggcagcactcggcttttaacctgggcagtgaaggcgggggaaagagcaaaaggaaggggtggtgtgcggagtaggggtgggtggggggaattggaagcaaatgacatcacagcaggtcagagaaaaagggttgagcggcaggcacccagagtagtaggtctttggcattaggagcttgagcccagacggccctagcagggaccccagcgcccgagagaccatgcagaggtcgcctctggaaaaggccagcgttgtctccaaactttttttcaggtgagaaggtggccaaccgagcttcggaaagacacgtgcccacgaaagaggagggcgtgtgtatgggttgggtttggggtaaaggaataagcagtttttaaaaagatgcgctatcattcattgttttgaaagaaaatgtgggtattgtagaataaaacagaaagcattaagaagagatggaagaatgaactgaagctgattgaatagagagccacatctacttgcaactgaaaagttagaatctcaagactcaagtacgctactatgcacttgttttatttcatttttctaagaaactaaaaatacttgttaataagtacctaagtatggtttattggttttcccccttcatgccttggacacttgattgtcttcttggcacatacaggtgccatgcctgcatatagtaagtgctcagaaaacatttcttgactgaattcagccaacaaaaattttggggtaggtagaaaatatatgcttaaagtatttattgttatgagactggatatatctagtatttgtcacaggtaaatgattcttcaaaaattgaaagcaaatttgttgaaatatttattttgaaaaaagttacttcacaagctataaattttaaaagccataggaatagataccgaagttatatccaactgacatttaataaattgtattcatagcctaatgtgatgagccacagaagcttgcaaactttaatgagattttttaaaatagcatctaagttcggaatcttaggcaaagtgttgttagatgtagcacttcatatttgaagtgttctttggatattgcatctactttgttcctgttattatactggtgtgaatgaatgaataggtactgctctctcttgggacattacttgacacataattacccaatgaataagcatactgaggtatc

SEQ ID NO: 11660 - DNA, 6000 bp, Homo sapiens
ggcgttcaggaaggaccctgtgcccctttgtgggccaccctcaagtgcacagcttcaggctcctgccctgcccctcccttcccaggtgaacggggcactaccctgtctgggggccagaagcagcgcctggccatcgcccgagcccttatcaagcagcccacggtgctgatactggatgaagctaccagcgcgctggatgcagagtccgagcgggttgtacaggaggccctggaccgggccagtgcaggccgcacggtgctggtaattgcccaccggctcagcactgtccgtggggcccactgcattgtcgtcatggccgatggccgtgtctgggaggttagttgtcctgggggcgtggatcagtgggttgaggatggcttcatcacggacagtggcacaatgctgcaatgagttatatgaagttgtggcctggccccagggccttgggggctatattctggaagcagcgtcccatatagagtcaggagttcctgcattcagccaagccctggcctctcaggccctcagtttcttcttctgtcccctgggatagtataattgcaccatcagctcccaggatcaaaaggaaaagtactagccgggtgcctgtaatcccagcactttgggaagccaaggcagaaggatctcttgaggctagcctgggcagcatagcgggaccctgtctctacaaaataccaaaaaaaaaaaattagccggatgtggtggcatgcacctgtactcccagctactctggaggcggaggcgggaggattacttgagccccagaggttgaggctgcagtgaacaatgattgtgccattgcgctccagcctggcatcagaatgagaccctgtctcaaaaaacaaaaaggaaacatactcagagtatggtgctgggagcaaggagcagggctagctgcccagggtatcaggtgcaggagaagcagcgccaaggaacctgtgcagggagtcaggagtaggaccccagaggccgtgtggcgttggctaacagccactcattcaagccaaggctgaggggctcgtgcagggagacggatcctgagttggagccttgggctctgtaagggggacagagggaatcatgttcttccaaaattcagctaagtaaggaagtggcagtaactaatgcagcatgccagtggcggttcctttcagattgggcattggtttcagagtgtccccagaagggacaccggcctaagtgaccatgggcccaatggctgatagagaggctcagctctctgagggttctgaagcctgcatgccttggagcaaccatccgcccttccctcccatcttccaggctgggacacatgaagagctcctgaagaaaggcgggctatacgccgagctcatccggaggcaggccctggatgccccgaggacagcggccccaccgcccaaaaagccagaaggccccaggagccaccagcacaagtcctgagaagggccccctgaggtgtggtcgctgccaagcatcagtgttagggctggggctcagcctgggggagcctactggggactgagcccccaggagggccagcatgtggagagtcgctgcggctgctcctgctcacaataaagccggggccgagcagctggcaggggaggccaatccctccctcccctccccagtcctgccggctgcctccctcccaccagagtctgccagagtcattgggctgcaatgggcagagacagagttccacgagacacctccactctattctccctttgcccagacccctccagacctctcaagagacgttctggccagtctccctgccccacccagcagcttcaaattggccaggcctacagtagctccagggaatttttaaaaatcagggtctggaagtgggcctgggaattcaaacctaggctcttcccacacccttgctaggacctcacttccctagactggcgactgactccctctcctgtgtccccactccctccatgggagaaggagcctatcccctggctcaccccgggacccacagtccccatcttccaaacaacctccctcctttctccctgcacagtgaacacagtcctgatttctagatttcacctcccctccccacccacaagggacacaggcctaacagggcccaacacttgggtcagggtaggagggacggggccacaatggccagttcccacgagaagcgccagcctgcctggctgtcttccaccggccctgccctgtgtgcctggcgtctttcacccactgagattgtgaaccagcctccatctacaccaagaacacccagcactgaaggagatgggaggggctgatgcccacctggagctctctgcttcctgcccacagtgctgacgagtacagagctaaatggagcagctactgcagaatccagtacagaatcggtccaggagggtgcggctgtggacaggccagcatccccagcaggttctgggaggcgcaccttgaaaggggaaggcagacatcctgagtgatgggcgcctgtggccctgagactgtggatgagggggctaggctccagctggcttctgaggggcctggaaaggcacacaagtaggtccttggctgaactggtgccccagcaggacctcgtgtccctgcactgctgcagatgcatcagccctccccatgttggtgccgctgtcacttcctactgggatccttcccctatccagccacatccaggctgtgggactacacggtgccctgttcccctgggcaggagaagaggtggtacctgcaatgcaccttcacagccaggcaagcattctggatttaccctgtgtaaagaagggtggtaccctctttcaggggtgtgatacagtgcattgatggagcagctggtgctgctgggaggccagcctggaagaggcagcagtggctcaagtttgcgtgcaggagccagagtgggacccacgggctcttgtgggtgtggtttagaactagatggtgctttggggacaagccatccaaaaaccccaggcccacatccaccctgatttgatatcccacttcctgacagatcagaggctgtgtctttaagcagtggaggtccaggagcagagcctggggctggttcacagctaaacccctccttagggcagcccagagtagggcctcagctggcaagtccacaagccctgctggggccctgcttgttggcctgacccctccctcaccaggcagccagccaaggtggttcctgcttcacccactcagtcatcagcctcaggctgcccaaaatgcctctgacaccagatttatatcttctgggcggcttctttaaatccagcccttcacccgccccctagagaagcagtgaaaccccttggctagtccagctggaagagctagaccgcaggagccgcgccgtcttcctaacctcgcctcggccttcgctccacagtggagagtgggagcctagctgtgcttgatgctgaatgcctgttttgagagtgtgagtgggatcatctacagtaaatacttgcaaagcatggcactgtggctctggggagctggtacgcctgtgctgtaaccatggtactcagtccttccaaagtgtttattaatcaagcacctgtcatgtgccattgagcccacgatggggaatgaggacagtccctgcccccatgaagcttgtgtcctgttgggaggacagacaggtggcccagcagttgcagcatggtgtgtgcacacgtttggctggtggaaccatgtttctaccactcatggtcaaaaaaagcccaccaaagtcctgggagttcacatctgtgtgatgatacggcaacattgtttgtaatggaaagactggacacccccagtgcccatcagtgggggagtcattaaataaactatggtatgtgcacataatgggtggtatgcagccctttggaaaaatgtaggttttccaggtcctggatatagcagcgtaagatgggaaatcacagaatacccatgttgtgcctgagatggcaggtggggtacccgtggtacccgggagggtggcaggtggggcacccatgttctacctggggtggcaggtgagcccataaccattgtagaggccaacatcctcagaggcctgagtgtggggaggtaggctttgactccctagggagagagggacacttaggaaacagacgggccctggaagtgggacatgaagagtgccctggccatccagtgtaggctgagatgctaggggcacagaaagaagagatctgctgatgccagccttccaaccatttcccagcttggccaagagccagctctggtattcgtgaaggaacagatcctgggtgaagctagagggaaggccgcagaggcaaaaggagagaggagctaggccaggggtcagcgactgaccctcgcggccagtgtacaggggttgcaactgggagcctagggggccccaaggcatctccaggcccaatctacctctgggcttttctcaagctctccctaggattactgcggtttcctcctggcgcctctcgtcttggacagccatgcccccctccatgctgcactaatggctcagcctggggccctagggacctctcctaccccccagactgctctgtcggccccctttcccccctactgctgaaacccaatcctctgcagcagcgccggctcagcaccgccggctcagcaccgctccgcagcccctgcctgccacggtcagctacgtcccacctggtctgctgcggagtccccagcccagtgcctagcccagtggagccaccgcctgttcctcgggaaggaacagtgggacctgaccggccagatcacctcctccaatcctgccaggctagtgcctccctgccttccaaccttggctgtctcccaccctctcttctcctctccttgcctggcctcctgaatcctatcttagcctccttagccccctgactgactctctctcgcttcttccaagcctctgtagctggttccgctcctgggttctggccatgaagcccacctcaggcccagaggaggcccggcggccagcctcggacatccgcgtgttcgccagcaactgctcgatgcacgggctgggccacgtcttcgggccaggcagcctgagcctgcgccgggggatgtgggcagcggccgtggtcctgtcagtggccaccttcctctaccaggtggctgagagggtgcgctactacagggagttccaccaccagactgccctggatgagcgagaaagccaccggctcatcttcccggctgtcaccctgtgcaacatcaacccactgcgccgctcgcgcctaacgcccaacgacctgcactgggctgggtctgcgctgctgggcctggatcccgcagagcacgccgccttcctgcgcgccctgggccggccccctgcaccgcccggcttcatgcccagtcccacctttgacatggcgcaactctatgcccgtgctgggcactccctggatgacatgctgctggactgtcgcttccgtggccaaccttgtgggcctgagaacttcaccacggtgagctgacctccctacctatcctgccagggacccagagagccgaccagtccctgcccagcacccacaattccctagccagcacaggctcccccaaagccaggggacctcttccttcctaccagccatggactccccaccccccagtgccactccgtgcagcccaggaagctgtcctccttggggctttctctgtctcccagcccgaggggagcatgtgaggccacactgaccccggctggccctaggcctgaggtctggcccagggaggccctgctcctggggctgggggtcctccatggtgggaccattctggggcagaagacccctatctctgccaggaggtggggggggcttgctttccctctgccttttcaacatactgccagccccggaggacagccacaggggcccatttccttttcctgcagttcccagagaaacacagaaaaacctgtaggctgtg

SEQ ID NO: 11661 - DNA, 6000 bp, Homo sapiens
ggcccaggactccctgggtaagagctgagatggggaggggagctgggatgctgcagggagtgagggacagggtgaggagaggggctgggaccttcaggaagacctcagggtggggatggggacatcagggactttaggccagtggccacatgataccctgtgtcctccccaggaaacacagtgttacacatcctcatcctccagcccaacaaaacctttgcctgccagatgtacaacctgttgctgtcctacgacagacatggggaccacctgcagcccctggacctcgtgcccaatcaccagggtctcacccctttcaagctggctggagtggagggtaacactgtggtgagagacggtccccatccctgaggtgtctttctaatgaccctcaacctatcccgctggccctgggagaaacagaggtgaacgcgatccctgatgcttagatcccattctcaactcagaaatttttcaacccctcccactgtggttacctgttccctttcttgcccactccttttcccctgaggcattgggggttacagagtctagatcccatgctaggattgtctgtaatgccccagcccaccttccctttcagcccccagagcagggccctccagcctctcgtctctcctttccaaactctggagggagtcatgggagaggatgaggaacctatgaatgtcactgtgaatgtgggttcttctgccctctaaaggctgtcatcaaaatgaaagggcagccaccttctccaggggtgctgtcctcctgcacatgcatcctatccacactctgtgaccgtcccctttgcttactgctcctgagtcatcttcactttcccttagatgtttcagcacctgatgcagaagcggaagcacacccagtggacgtatggaccactgacctcgactctctatgacctcacagagatcgactcctcaggggatgagcagtccctgctggaacttatcatcaccaccaagaagcgggaggtatggctcatgacagcaggctgtggctggggaggggtgtcagggtctctgagccacctgttctctttctgttgcaggctcgccagatcctggaccagacgccggtgaaggagctggtgagcctcaagtggaagcggtacgggcggccgtacttctgcatgctgggtgccatatatctgctgtacatcatctgcttcaccatgtgctgcatctaccgccccctcaagcccaggaccaataaccgcacgagcccccgggacaacaccctcttacagcagaagctacttcaggtgacacccttgtaggagcagatcagcagggcaggacttggctctctgtcctcagagactggtgtccctttcctccctcacaccatttctccccttgctctaatctcaaatatatgggtacaaactccaaatgcacgcccacaaaaacacacatacgctcttactctgagagcagagtttgagaagacccaaacctaacagattaaaaagaatctgctaagactggtgaccctgggcaccatggaaatgcagggcagaggcctgaaagccctgagcattttgactgttcttctcccccattaggaagcctacatgacccctaaggacgatatccggctggtcggggagctggtgactgtcattggggctatcatcatcctgctggtagaggtgaggtgtggatggactctgggtgaggctgtctgcccgaggaatccagcccaagttccggtatctgagtgcctttgtgtctccctgacctcttcaggttccagacatcttcagaatgggggtcactcgcttctttggacagaccatccttgggggcccattccatgtcctcatgtgagtttccttcctctcactcccatcccttccctcaacagggctccagttccactccttggattcctgacctctcaagaaccttagctccagagccccctctctagtgctgtgtgtatgaccctgggcattgagtgtggggaggctgaatctgcatgtgtgggtactttcccagctacattcttgctgtcaggtccccaggatcatcccagccctcccctcatcaccctcctccctgctcccccagcatcacctatgccttcatggtgctggtgaccatggtgatgcggctcatcagtgccagcggggaggtggtacccatgtcctttgcactcgtgctgggctggtgcaacgtcatgtacttcgcccgaggattccagatgctaggccccttcaccatcatgattcagaaggtcagtcctccccccaagctccctagagaaaggccccagagccacagtcagcagacggtcccataaagggcagaacagtagacattgcaggttctgcaagccacacatggcctcactgcatgtttttcttcttttttaacaatccttttaaaaaatgtagaaacccttttcagttcaaaggccacaccaaagcaggtcaggtagatctggtccacaggccatagatagccaatccctgtcccagagggtggagctgtgagacttgtcggggtgagacctgttagaggctggatggggcaattgcttggggaatgtgtgcagatgttctctgcctcctgctccttctagatgatttttggcgacctgatgcgattctgctggctgatggctgtggtcatcctgggctttgcttcaggtaatcatctgtccaggaccaggggccatggcagggaagagatgaggaagtctagggggcactggctctggctaaacttggggaggaggagtaatgcagagatcagaggagacctatggtatcagaggatgggacgtcctccagaggtgagaaaaatcgggagtgttagggagaggtggctcttaggatcaagatgaggctcatacaaaactagggaccgtaaaaacccaaagtttggagcactgcagagctggtgatattgagatgaagggaccaggatggacatgcacgcagagcccggggtgggctggtcgtctgcatggttgccatggtaaccctcacccccttgggtggagcagccttctatatcatcttccagacagaggaccccgaggagctaggccacttctacgactaccccatggccctgttcagcaccttcgagctgttccttaccatcatcgatggcccagccaactacaacgtggacctgcccttcatgtacagcatcacctatgctgcctttgccatcatcgccacactgctcatgctcaacctcctcattgccatgatgggcgacactcactggcgagtggcccatgagcgggatgagctgtggagggcccaggtgagccccctggtggcagggagggttagggcaagtcatccccttcctaccaaggaacctgccaagctgagagacaggatatctccaccccacttatgtttggacagttgtggcaaagctagcaaaatcatgcaaaatgtacagaagcactgattagcaattcaaccaggcaatactggaatcgctgagaagaatgcctcacagttttctcaacagttaaaagctcagtgttttctagaggaatcaacaagaaataaatcaaaagaaaattaacggtggctaaaattgcactcagtacattttgttcccaaataaaaactggagtatcaagtcttcttgataatatttaagtctgcaaaatttgatatggaaagcaggatgtgttaaaaaagtaatgccaccaaaacttcctatagtagcagaagctatcttcagccagatcttcaagatagggagagaagaccatgagatgaatcaaatcctcatttaaaaaacacctagaaaataatttatctaaaaaaatcatttcagcaaaataatggaaatttcccaaactggaaggcatttaactatgctgtgtagaaaacggagtggaaaaactaagctgggaaataaggttcactcagaaaaatattttctccaggaatatatattgatattctaagtgggatgtttatatttataagtggcctttatgtctgtagggtcaaaatatctgggagcccttaaaagccctttctatttgctttctctggtgcctgtgctcctgggaatggggcttctgcttcctgtctttctcctgcctctggcctggctgcgtcatggatgttgggtcattgggtaaagaattgttggtctcaagctctatcaactctctcccactgaagaaggtcaacaaaggctgccctacccctacctctgtctgcgcccagcctcatctctgacttctccttttgttcccatacgcagattgtggccaccacggtgatgctggagcggaagctgcctcgctgcctgtggcctcgctccgggatctgcggacgggagtatggcctgggagaccgctggttcctgcggtgagtgatatgcgggggtaggtgtcccctgagaagcctcatcggcagggtatccccctgctcagacagcttccggctcctgggttccctgtggaggcctgtgtgctccctaggctctatgcttgttgattgagctggtgaggaaggggtcccgtttggagctcagacttcccaaagcatccagggagtctgtggcagagcctgctgctttctgaggcctagctgccaaggggccagtgacccaggcatccaccatggctgcagaaaagggaaaaggccagcaatggcggggatgggaggaccaggggataacagacaagcatccttcttggatctgttcttcaagtcctggctgtgtctcaagtcctcccgcattccacagggtggaagacaggcaagatctcaaccggcagcggatccaacgctacgcacaggccttccacacccggggctctgaggatttggacaaagactcagtggaaaaactagagctgggctgtcccttcagcccccacctgtcccttcctatgccctcagtgtctcgaagtacctcccgcagcagtgccaattgggaaaggcttcggcaagggaccctgaggagagacctgcgtgggataatcaacaggggtctggaggacggggagagctgggaatatcagatctgactgcgtgttctcacttcgcttcctggaacttgctctcattttcctgggtgcatcaaacaaaacaaaaaccaaacacccagaggtctcatctcccaggccccaggggagaaagaggagtagcatgaacgccaaggaatgtacgttgagaatcactgctccaggcctgcattactccttcagctctggggcagaggaagcccagcccaagcacggggctggcagggcgtgaggaactctcctgtggcctgctcatcacccttccgacaggagcactgcatgtcagagcactttaaaaacaggccagcctgcttgggcgctcggtctccaccccagggtcataagtggggagagagcccttcccagggcacccaggcaggtgcagggaagtgcagagcttgtggaaagcgtgtgagtgagggagacaggaacggctctgggggtgggaagtggggctaggtcttgccaactccatcttcaataaagtcgttttcggatccctgcccagctgcccttctgcatctctgcagtgccatctgccggccccacccctctgctcctacgttgaggcctccctcaccctttgttgcagactgaggcctcaccacaccaaacttgcaaattcccttctttccctttaatgaggagggggctggtggagaggcggaggaccagggaatgcagccatcgggagggttgggtttggtgtggggcatctctcacagaggctgttggagcccggctcacgtcccacatgtcccttctcggaccagtgtccagggctgagtcacgggtatcgtcattctcagacctccactgagccctgctgcctcaggtgttgctgaaggagctggatgtggtgcagcagcttcttctggtggccagccagggtgatgcccagggcaggcaggtctctggtggggagggaagggatcaaatctgggccagcttctc

SEQ ID NO: 11662 - DNA, 6000 bp, Homo sapiens
gcctaggcctttcctgggacttaaagcacgacaaaataatgaaggaattcttaacaggactcatttaggattaaacaagttttattgtgggtctgaagaaactccccaggcttccacaaacaagcttattgggggggttggaaggaactccccaaacttccatgctttagcaggagacaagataagggtaatcattccagcacctggacccatttagattaagtaaatttactcaggctccagaggaaggtcttcaggactcagaccttagttacagattaaaagaagttaattacttatgtgttagatgaatgcatacttacatgtagacatataacttaggaagtatataagctctggaaaactttgtaatttggagttggtctggcgatgatctccaggccttctccccgtacccagttgcaaaaataaaaactcttttcctccccagttcatctgcatctcattattgggccacgagaaatagcagcccaacacttagtttggtctgggaacaccaccacggcactccagcctaggcaacagtgagatcttgtctcaaaaaaaaaaaaacaaaaaaagaaaagaaaagaaaggaaactaaaggtgagcaatcttcctctagaatgtcccagaaattgtaaacagctgatgaaaaacaatttagaattagaataatctgtgacttttagttgcactgatcgtattgacttaaactaagcaggaaatatatctgaaccaggaaaactaacaatgttgcaacttcctctacaaggataactttactgtaataaatacatttttgttcaaaagttaaaaacgttaacaaagacatgcaggaaatggctctctgctcctaattcccaaaataatttctctctgctctgaacacatttttggtacctcttaggacatcttccattttttagcttgtgttgtagttatttatgtccacatctgatctgcccaatatagaaaactacaaaagcactgaagggacactcactgattcatttttattcactttaaagtgcttgctaagaatgatcccttacacaaagcaggcaatctatatttaataaaggaattggtgaatttttgaacaatccttgtcaagaattatactaacagttgtaaaagaatgcttacaaggtgttcatatgcaactaaatactttgattcatttttcagataaaagtgaaggaggaagaagatgagtagggctgtacagggtggagagggtggcaactctgctttagacaagtgtttttcccactttccataggcagtagatgtggcaaaaagatggctctttaagaggagacttagcctctgaccattcataggctgtatgattatggtcaagacactagcaactttctgggccttgctccgccaccccttcataaaagaagttgatgaagtgataaacaatagttcctcctcacttgtaatcatatcagaagactgacactattagggatcttaaagttcatctagccccagaatggcaattcagcattatcttacatgctgatcttggcctatcagtggcagcttctcgcagtgttgagaacgattctgaggctctatttggacttagcggataaggcagccttgactgccataatgatgtctgctacaaggcgggaggaaagtggcagcaaataagtcaagatgtgtcatccctaatttagcccaatgccttctcttcacaggaaaaaaaatgagaccagaagcttttgagtcttttgagtttaccatgtgccaggcactatgcaaattgcttttacattcacaattgtatttaatccttagacaactttaagaagttagcattattatcattcctattttacagatgaggcttaagaaaacaaaatttgcctgaggttcacaccttagaaacccatatccataagcatttccctatatcgcctcctgcaggcacgtactatgtgttatgccagtggttctcatcaggggggattttgccctccagaggacttctggcaaaagtctggagattttttgttgttacaactggggaggacagggtgttccttgaatctagtaggtggaggccagagatgctgctaaatgcacaagacagcacccccccaacctttacctccagcaggaaagaattatctccctaaaatgttaatagagctgaggttgagaactctgcactagactatgcggaaattgtttgcaaatggatgatcaaactcttcctgtagtccagcagctacataaatatctccattttacagacaaggaaaggtgattgcagaatcaggtggtcatcacaagacaggaactgaggtagtctgattctagaggccctcagtttcctttactatcaaaacatgcaaactcaagtagcacccgcttacctattaccaatttcagaagctaagaccactgtgtcacatgtgaaaaattcccactgtggtgggcttgtctccaaagagaaaaattatttgttcaacagttcaaagaagagggtctctaggaactcttaatatggaaccactggtctttattagacattcaaatcgttattttaaaataagacgctgaggagaaagctgattttagaacattaacaaactttttcaagaataattagctctgcgtgggtttcaacttttatttttattttttccttttgattttaggagctggagagcctggaagtttatttaggagtagaagaggaaatgaaactatgaaaagccacagtacgattcctcctttacttggagacaaggcacaatgtgaataattctctcatcctgtccaattaactgcctcaagtacacacacacacacacacacacacacacacacacacacacacacagagagagagagagagagagagaatgtacactctattattatttgattaggaagacattaatgaaaaagctcggaacgggatgctaaacaacaaagccctatgcaaatcacttcctttcggattgaaggcttgtctcctacagaaaaaccaatgctaaagaaacaggcggagaggctgaaggtggagagcaaaagaaaaagaaagaaaatagcttgaacgaggaaagggactggcaggaggaggacagagcaagcctctctcagagagaaattacagaaagacggaaggaggtttgggaaaacccagtctaagctgctccgacggcggggctgggcgtgggcaaggtgcctccttggacggtccgcgcgcctgccagacgcgtccttccactacccgtccagccacctggcgctggtcgggctttgcgaggtggtttaggaaccgcggagtcattcgatttgaaatcttctccaataagcttctccgtgtgccgacgtgggcagcatgacagtggatttgctcggcagcatctctggcgcctcccgccctcgcccgccgcctgccagatccgaaacagacagtcccagacatttcgcgagggggatggttccagaaagcgaagatctgagcgtggtgaatgaaatgtgaacagaatagctccggaaagagtctcagaaaccttgaattggggtcagtttggagactgaaaatgcgtcgagcgctgcaggtggtggttggcagggggatttaacactgtggagcccttactccgtcccaggcgctgagcccagcgagccacgcgcggtgcccagctcggtgaggtcggttagttgggtcttcagggaggctaaataccctgtatttgctattcccttcgcctggaacgctctgtgcgagactgggtgtggcagctcctttcccaggctcaggaatctgggtaaaagccaccctcgcctagaggccctcagggtgagcgccccatcacgcgctaaaccactttcgaaagtggacttggccctcctctcagtactaacagtctgtcagccttttattttttgcatagatatgtattttctcttctttattgtctgtctttccacaaaaaatgcaagccccgtgagtactggagcctggtgcgcctttctcacagttgcaagctcgcaactgctcctggcatatactaggtgctcactaaatgctcatgcccttcccacccgccacctgcggcactcgacacatttgcagtctgcaaactgaccccaaaccatcagctgcttgcattcgtcctaggatcaaagaaggccattgggctagtgggaagtcaagtcgggtggacttttccgtctttcagggagatttaatagtaacgacggtgctctccccacctcctacccccttgcacataaactgcacagaacaaaatcaccccggcacgaatctgcacgactgcctctggaggtagggtcacggtctccgagccccgggtctcacactgatgctgtcctttgtcatctcgtgcctagagtgctgcctccctatgtatttcctctgttctcgactcctctgccacagtctgactttctcgggaggtcgagttctcctagcctgtgcgaccgcaagggtcccctggagccttctccgtaaacctgcccctcccgcgctgccctcactttttcctccttccctggcccggaaaagccactagaggaacatttaccgaacgcctaccgcgcgcaggcaccgagctgggccaccgggagccccacccagtgcctcgccgcaggactcgcctccctccgccctcccaacccatccggaatccggggtccctagttcccccgccgcgtcatggaatccgctggcttcttccgaggacatcgccccacctccttcccgaaaggcgacttctgattggtgagattgtgcatcactctgccgccctcccgccccctcggggccccgcccctgggcctctcaggcccctcccctgcgctcccgcccttgcgcggctcctcgggctaatcgccgggcggcgcgcgccgagaagttctgggcaaagtactcagaactggccgcgtgctggtggcgcccgccagccggcccgggagaggggacttgagcgcttcgcggccggtgcgcagcgcggctccggccccgcagtctgtctgcaagtggccatccccgcccccgactcctgcggccggtgcgggagctgtcagctgcacgttgcgggggtaccggagaagccggggttgccttctcccggttctgtgcgctaaccccggagcccggccccggggaactagggagcgtctccggctgcacagcgctcaggtgagtggcggggcgcccgcctaaatggggcctgggtgtcggggggcctggcggcggcgcgggctcggaagggctgctgtttgcggggcgccgcggttctctgccggaccggggtctgtccgagtcgcccggggaggctccggccctggggcagacccaagcctgggagcttgggtgccggctgcagctcccggggaaggaggacccgggtctcacccaccccaggacaccttccctcgagggacggctcagaggattgaccgccaggaggagccgagcgcaggggccgcggcgcaggtgcgggaggacgcggcgcgcggagctgtcctgggcagcggggaggcgctacgccggggctagaggctcaggaagcctggtaaattggggcgagcgcgaagctttaccacatccgcgggatggggcgcgccggagagactgagacaacgctcgcggggcaggcgctccgctcgcccgccttcccaaccccggcttgctcagctccccggtgctgggctggaggcccagggcacattcctttcttgtctgaatttacatattcatcagctttctggccccttctggaattttttttttttgttagtttccaattactactgttcagatcaccttcaggctcaccctaactctcgtctcagtgtctctcacattggtcctttcctggaggccctgcagcgtcttagttcagggtcttagggacttatgcactctgtctgaacgttgtctacagttgggttttcctacctctgtctctgtttattccgtggtcaggtaaattc

SEQ ID NO: 11663 - DNA, 6000 bp, Homo sapiens; identical to SEQ ID NO: 1438

SEQ ID NO: 11664 - DNA, 6000 bp, Homo sapiens
cactctcacccaggcctagagtgcagtggcacaatctcggttcactgcaacctctgcctcccaggctgaagtgatcctcccacctcagcctccagagaagctgggactacaggtgcttgccacatgcctggctaattttttgtatttttggtagagacggggttttgccatgttgtccaggctagtcttgaacttctgagttcagatgatccacccaaagtgctgggattacatgcgtgagccactgcgcctggcctagacaaggatttttgttttggtcacctgtgttttcccattagaacagtggctggcacaaatggctgcacagcacatactggttgaacaaatgaaggacggggtggctggtctagacaaagagcctagacaaacatcggcagaaattgcttcatggcttctgagcagaaaaatctctcatctggggaattagactccctaagttaaattttctttcttttttggagatggggtctcactctgttgcccaggctggagtgcagcagcaccatcacagctcactgcagcctcaacctcctgggggtcaagcaatcctcccacctcagcctcccgagtagttgggactacaggcccatgccaccatgcccagctaattttttttttggtagagacagggtgtcaccatgtagcccagactggtcttgaacttctggactcaagcgatcttcctgcctcggcctcccaaatgctgggattacaggcatgagccacagtgcctcacctcctaagttaaattttctgcagtggagaatacaatctctttaatattatctctcagttaagacaaatttcaggatcctccttaaaaaaaaaaaaaaaaagaaagaaaataagtttgccaatacaaataccatttctcactaaagtgaattagggttccttggagaaatggttggttttgtttctgggcagtaaatgtataaaacggaaagcaaggaagtccagggtgtccaatcttttggctttcctgggccacactggaagaagaagaattgtcttgggccacacataaaatacactaacaatagctgatgagctaaaaaaaaaaaaatctcataatgtttttagaaagtttatgaatttgtgttgggctgcatgggccacaggttggacaagcttgacctaaagactactaggattgtggattactaggattgtgccagaaggacacagcagcaactaaatatttgatgagacaatctgaacatttaaaaaaggacaatgactgtaatggattaaagcacatcaaatatctaaacatccatcaattcatgatagcactgccccttctccccaaagaacccaaagtggtcacagttagaggttgctggggcatccatccatccatctttattattattactattatttgagacaaggtctcactcagtcacccatgctagagtgctgtcgtcccatcacggctcactgtatcctcaacctcctgggctccagccatttccctgcctcagcctcctaagtagcgggaattacaggcatgcatcaccatgcctgtctaatttttacatattttgtaaagatcttgccatttcctgggctcaagcagtcctcctgtcttggccccccaaagtgctgggattataggcagagccactgtgcgtgggaaagcatcaagcatacatcctggctatcccgaatggattgtatttcaaagtaaccagagagatgagggaatgctcacctttgtagaagaatctcatcttataaatgcaggagaaatgagagcatttgaaattaccactttgcacacctaaggaacatcataaaactacactagggtttctcaacctgggtactactgacattttgagctggataattcttcgctgtgggggggaggtgtgctctgtgaattatacaatgtttagcagtattccttgcattcattttctagataacagcagtaccacccgccaccccccacccagttgcaacaatccaaaatatctccagacattgccaaatttccccttggtaggacagggcagaatcaaccctcgttgagaaccaatggtctaatgatcatcaacgtttgctagactattagaagaaaggctgatggtaaacttcatggataatcaggatgacaacccccaaattgagagatgaattacaatattactaagagacaaacccgccttgtgcctcagtagaagtacatagtgccagccacgaagcgttattgcaaacaaaacaaaacaaaaaaacccaaacctcaacattacacctaaacctaatgaagcttctagccaggggcaaatccaagctttgtggggccttaaactatacaaatttcacagtcctctttaagaaaaagacacaaaattataaatgcgaaattaggtacgggggtctatgcaagggagggcctgaagattaagcttcattagtttcactgtaaacctcccctgactctagaattaactgtgattacaggacataccagggacaaaaaacgttaaatgacacctgaagatacaatcagcaaaacccagaaagtggaaaattctgttggtcaaatgacccagtttcttcaataagtaaatgccatgaataacaaacaacaaaaagagaggggaaatttatatatataatatatatataatatgtataatatatatatatgttgttatatggtttgtttttttttttttggacacgagtctctctctcacccaggctggagtgcagtggcatgatctcggctcactgcaacctctgcctcctgggttcaagcgattcttctgcctcagtctcccaagtagctgggactacaggtgagcaccaccacacccagctaatttttgtatttttggtagaggtagggtttcaccatattggccaggctggtctcgaactcctgacctcgtgatctgcccaccttggcctcccaaagtgctgggattacaggtgtgagccactgcgcccggccctgtttttgtttgttttgagatagaatctcactctgttgcctaggctggagtacagtggcatcatctcagcccactgcaacctccacctccctgattctagcaattctcctgcctcagcctcccaagtagctgagattacaggtgtgcaccaccacacctggctaatttttgtatttttagtagaaacagggtttcaccatgttggccaggctggtctcaaactcctgacctcaagtgatccttccacctcagcctcccaaagtgctgggattacaggcatgagccactgtgcccagccaaaattgttatatattaagagacatatatttgtatgaaatgcagtaagtaaaccttgtttggaccctaaatatctaatgtacaaaattttttaaggcaatggggaaaattaaacacatactaggtattaagtgatgttaaataatttttaaaattttggtgggtgtgataatagtataaagtccttatctgttagagacacacactgacgtatttataggtgaaatgacatgatgtccaggatttgctttaatatacagcacttcaaaaaaaaatgcagaaagggatacatgaaatgagaaaggcagcaaactgttgttgaagttggatgatgagtacagccctccgttattatccaagggggataattcctggacccctacggataccaaaatccaggtatgctcaagttctttatgaaagttcattgtaattattctattatataaaagtttcgaaattctgttgataaaatgtatttttagtagagacgggggtttcaccttgttggcccaactggtctcgaatttctaacctcagatgatccaccagccttggccgcccaaagtgttagcattacaggcgtgagccaccgcgcccgcctggccttgataaaaacagttttaaccttccgttgcttcgattccatgcccactaagtaacattccagtttgtttttcactttcaaaaggatgtgctgtaactaggggatgtaaacaagctccatgaccctacttattccaagttttcgttccactctcccaccttttttttaagacaaggtatcaccctcggtcgcccaggctggagcgcgatcactgcttaatgcatcctcgacctcctgggttcaagcgattctcctgcctcagcctcccaagtagctgggactacatgcgcacaccaccacaccggttaattttttgtagagacgggggtttcaccatgttgcccaggctggtcccgaactcctgggctcaagggatccgcccgcctcagcctcccagagtgctgggattacaggtgccagccaccgcgcccggccccagcttcttaaaagaatgatccgaaactatggcagcactgggcttttggtccccacccaagaaatgcccgctcgcagaggctcgccgcggcaggctctcccgacgtgacagagtgtgggtctggattcagcctcggttcttacgagtcagataggtggacacgcaaagcaaaacatcacagggctttttgtatttagcacagaaaacacttgtgagcccgagctgagaacccaaaaggcacgcttcaggccatcgtagccaccaagcctggtcagattccgtccaccgtctccttggtgctccgagacccaaatcgctgactggggccgagggcgggcgtgactgcgcaggcgtgcctcccctgcgagatgccggaggtaagctgcggggtaaggggcgagaaattaagggcgaacgtcattgcgcatgcgccctctactctcgttgcgggggtaggcgggcgccgggctgtgtgagggggcggggcgcggcagtgttcggtacggatggagttgcaggagacggcgagtacatatcactgcgcaggcgtcctcttcccctaactctcagggtcgctagggtggcgcgcaggcgcagagcgatgcgcaaatgtgcgcaggcgcttaggggctgaggcgcgatggcaggtgtcggggctgggcctctgcgggcgatggggcggcaggccctgctgcttctcgcgctgtgcgccacaggcgcccaggggctctacttccacatcggcgagaccgagaagcgctgtttcatcgaggaaatccccgacgagaccatggtcatcggtcaggcgggctgagggtggggaggccctttgtacccagctcagccctcggcggcgctccctcctcccgagcccagccgggtcgctggctcccccagtacctagcctgagggtgccccgaggacgccaggccccctgcctagagctccgggccgcacgtcggagggggccgggcggagaggcggcccactagggccggtcgtgactatgtgtctgccccgcaggcaactatcgtacccagatgtgggataagcagaaggaggtcttcctgccctcgacccctggcctgggcatgcacgtggaagtgaaggaccccgacggcaaggtaaggctggcgttggcccacgcagccgttcttcagtggagctcccgtggggtgtaaagcactgcctggaggaggcctcaagggacaggaacttgcacttggagagcctgcggtataaaggtggggccttcactcacatatgttgcaggtggtgctgtcccggcagtacggctcggagggccgcttcacgttcacctcccacacgcccggtgaccatcaaatctgtctgcactccaattctaccaggatggctctcttcgctggtggcaaactggtaagaggattttctctttggcttcagcttagaatctctcacttgtttccaaattttgatttatcaagattgtgaaactttgtagcacagtcagaattggggagacagatgttgccttctgctccacagccagggacaatagtgggttccataccctggaacagacaactggaggccccaccactcatacattccatgtttccttgtagcgggtgcatctcgacatccaggttggggagcatgccaacaactaccctgagattgctgcaaaa

SEQ ID NO: 11665 - DNA, 6000 bp, Homo sapiens; identical to SEQ ID NO: 3765

SEQ ID NO: 11666 - DNA, 6000 bp, Homo sapiens
actgtgtcagacaatgtgccagacactaagaatgcaaataaaacatagaacctgaaaagttgtgtttcttcaaaggatacatggagacataaataaaagctgtgttgataacagaaataagagtcataaaatgcttccaagaaagaaagtgggctcagaggtatttctttcagggtgagcaggtgtagaccagggagggaaagagttgtatttcaggcaaacacaagccatgaaatggcctagtgagagaaggaaagtaagccgttcaactctggaagaagtaaagggttgaaaggagaagtgaagacacaggcctgacccttaggtaggacccctggctcagctgtcccagtccccagacatggtgggagattgactcaagtcaatgtaccttactgcccttacctgaacatcattacatttcaatgttgaaattcctgtttttaattatattccaagggacctagaatagatggcataaaggggcctcctttcagttgtgttaatcttggagaacccacattagctttgttgccctgggttccaatctcagaagtacatggagaaatatggctgaacagttaaaaagggtggaaaggaggatccaagcaagataaggagtttggactttgctgtgtatttcatgggcggcactggggggttttaaacacagaaaaaaggagaggtttcagaaaggtctctctggcatcacaatagagatttttgaggtaaaagacagggagaaagaaaaacaaacaacaataatcgtggagtagtgatattgacagactgaactaagaaacagtgtggataagaaactttatgctctacagtactgcagtcagcagaataatggtccctctaaaaaaggtaccacaactctatctcttattagtagtgtgatttggggcaatttaaaagccctgatcctcagtttcctcatctgtaaaagaaaaaaaaaaaagaatagcaatgtcttaagtcaggatccccaggatcaaaccctgagatgaagattgtctgcaagtgatttattatagaaatgctaccaagaaaaactcatcaggtaccacagtaagcaagatagggaagaaggtggtttcaggcaaaatattaacatcaatataattctataggggagcctcagggtgtaaattacacctcaggttttcttgctactagaggcaagacggctggtcttttatactctataggaaagtccttggcaaagggtatcctgggaaagaagtaaacttgcaggtggttctgtctggctctctatgccagtacacaaagtgagtctagtagtgtttgggccttcctccaaagagattctcggggcaggctgtgagaagtaaaagaacacagaagctagaggaaggatactcagattcaaccaaagggatcctaggagatctgggtggagactatgtctgccacaagcatctatctcatagaactcttctaagaactgaatgcattcatatctttctttctttggcttttaggattcctaaactatttttcttctggaatagcatgcaatatttagcactctgctctacactcagagtgctcagtgatgaaataattttttcttgacatagcatcaaatccaaaaagggtaaaggcagtggagaaattaagcgaatatgaggaataccataagagaaagaaaaaaaatctgatcccaatttctgactccaaggatagtgctttcctcagggttccacttttatcagttaagatccagtcaaagggtattgactattaggacaggaaaaaatcccactaaagaatacagtaatagtggttattgggaacagccactatctctcaggctctaggagagtacccaaggagggaataactgagtagaacttccccctacccaccctccaccctactaagcctgaaagtaggcgctcattggaaataatatggctgtggtccacttaatgatccagaaatttaaggtgtcacacactgggctgctgaggaaaccatcagctgtgttttcagtaaaacttgctaggaagccattccactgacatgccagtggtactccatagaaagacacatactagggaactggccaaatttactgaagattatgtaacatggccttcttgcacaccactggtcagaaagtcactcactggccaccacaccgtaggagcaagcaggaaagcactggaaccaagaaaaggagcccctttctttctgcagtgttcccctagcaccttctattgacaaagctaaacactgtgccaactgaccataaagacgtttacagatttcagctctaatgtcacaatttagggcaaagaagggtagctgtgaagttgaagagcactaagttaactggcactgacctcagtgacactcctgggatttgggggatgggaggagcatgctgttatgcccaaatcctgctccgtttgtttacttttttcctaattgtctctgaaagaaagagcaggcccaatcttttgggacactatgtagtgagaactggtatgacacatcgtaagtgcacagagagttcaattcagtaactgagacaaagtctagagccgaaccacttgggtctgaacgttagcttcactattaacaagatttgtagccttgcaaaagttcatccttgtatacctcagtttccttacctgtaaaaggagataacagtacctattttatcaaaatgtcaggagaaattaagtattatgtgtaaagcctataaaacaacatcttgcatgtagttagaacctaataaatattagtatattccatgaatggtagcttgtcatttggttttacaatatgtatatattcggttctcatgatgagtttccatttagaactatgcctcataatgctaacactcaacttctctgggtgagattaggctttgctatcaagtcttgcctactcctgggcattgcctgcagctctggcttcagatcctggcactgcccctggctcactgaataagcttcaactagtgcagccaacttacggaggatctgttttctcaagtgaaaaaaagacacaaggttaaacaaatcatctttttttaagatctcttccagttctgactacatttgatccccctcatccccaagtagtaagttatacctaagagggaaagaggagggaattatcatttcgaactcctactcacctgtgccaggagagcactgctgtgactgatttccctgatttcatcctcaccacagtcctaacagattagtattgttaaagtccatttaacaactaagaaagctgaggctcaggaaggtcaagcagtttactcaagatcatattctcagtaagccgcagagtctggattgaaacctggtctttctgtttgggtcgactcaacatttttaaccgtattgtttgcctcctacatcgccttcatctcagacattaagaatcctacctattcaatgcttttcatcctccgctttaaagagataagtgggtgcacaactttttttttgcctgaaacatatcatctaaaagttaagcaaatgaaattcatttaccagttacaggaatctttttcttaaatcactgttaatgtctcacaggaaattagctcttcagtggaaatcagcagcctccctgcatccttttgcccctgtcctcccctctcttggatgcaaacctggcgaaaagaagggaacactgcttggggtcagcgagctgagttccagctccgaatgtaccattttcaccctcgggagtcttctcccctttctctgtgagcaaaggagtgttgggccagaccgtcttaaggattcttccccaggtacaagccggactctggcggctttcctgggcaagggagtgtctccgccttgtctctgccgcaggtccctggttaaattgtcaatttctctgcggaggctgctcactgcatccgctccctccacccctagccctgtagaccccttctctttcccctacttgggaaaagtgaagccccttatccttggatagcctttcaccagacaaccgcagccgtccgctaaattcccctactggcgggacgcgcgggcgggggcctgccccggggaatgcgaggctgcttcccttctgcgtaatcagggtacgcagcctccagttctctaactttctccttctctaagagggaatttcgagaactttaagacaaataagtgactatatagatgaagacatgaaacctctctacacagtgaactcccccacgctacaaggctcccagggatcccaggccttctcccgcaatgccccgccgggtcccccgccccaactccttctcacggcaggatcccgcgccaggacgctcgcagagcccgagatgtggcaccaggcgcgccacaagtccaggtcccgctatttctgctccatcggagcccaggtcggagggagtcagcgcgtcctcctcgcacaggagcctggcgcgcggctcggtcgcacagaggctgaagaaaggtccgcactgggctcgaggcccttcctgccggcctccccacgccgggcctaggctcccctccttcccggctcccgcctcctcccgtaggctgccaggcggacccagcctgcctctctctctgccttcactaccgggtcaagctgcggagggagggagggaggcagcggcgaagccctccgtggctccccacccggcgcgcgcgcccctcctcccctgcctcctcccgtctgccagtacagtagaactagtacacacacacacacacacacacacgcacacgcaccctgccactgcagctgccatggatatcagctaacaacacacacccaggcgcgcgcgcgcgttcccactcgcaccacgcaggagtggcccccggcatccctaccctccttccccacccccaccacacccgctcaccagctcggctactgctcgctccggctgccgccgccgccgccgccgacgccaccaccactgcttcctctgctgcggggccacagccttgagtgtcattcaagggacagcacaacctcatccaagctctcctacctctgcccagccgtccctctcatcctccccattcctcgtccacactccatccaaagaagagggaaagcaccgaatagaggggggcgaaggcaaagtctgctgttcttccccctgggcccccttgctcctccatcctcattctctcaccaccagcccccctaaccccaaggagcccaggaactgaggcgactcgccccactgccatgtccaaaagcttgaaaaagaaaagccactggactagcaaagtccatgagagtgtcattggcaggaacccggagggccagctgggctttgaactgaaggggggcgccgagaatggacagttcccctacctgggggaggtgaagcccggcaaggtggcctatgagagcggcagcaaattggtgtcggaggagctgctgctggaggtgaacgagacccccgtggcggggctcaccatcagggacgtgctggccgtgatcaaacactgcaaggaccccctccggctcaagtgtgtcaagcaaggtgagagcagcggcttgctcagtgttttgccgggcggtgggaccgctcggggcgcagggcaatgaaagggtggccgcgcatgttgaagggggtgtgttgcgcgatgatggggtgggggccagagagcacccgcagtgcaagtgagtttcgccggggattcgacttgggggctaaagggaggggaggggcaggttgtggtgtggcgtgcaactttgtttgctcagttagaccctcccctttggaaggtgctcggcctggtctgacctcctcagagctgctggggcaaattgaatgtgcgtcagtggcatcacccgaagcggatgaagagcttttggggaagggaggaaggaagaaaagaaagaaagaatgggaggaagggagggaaagaaggaaggagcaacttcagggtgcagcggcatcaccagcgggtctgggaagagaaggtggtggggtgagcggagaac

SEQ ID NO: 11667 - DNA, 6000 bp, Homo sapiens
tgagaacacatggacacatagaggggaacaacacacactggggcctatcagagaggggaggacgtggggagggagaggatcaggaaaaacaactaatggatactaagcttagtacttgggtgatgaaataacctgtacaacaaacacctctaacattaatttacctatataacaaacctgcacatgtacccctgaacttaaaagtgaaaaaaatttcaaagcctcatgactaaaaataaatcaaataaactgaataagtggttgattctttgcaaatttcctacacagccccctctacctcctggaaatcactgttagagaagacagcaggatttctcatgtgactttcattatgagaatgcatctgctaggatgtgaaagttctttgcacaatttaatactccactttctagtcaaccatttaaagtccaagaagaggataacaatagtaaaatctgaagattacatggaaaggcccttgcccatttcgaagggctgtagatgggagtcaattagccgtaactaacagtcctgcattcattgctccagctggttattatttttgagcctcattacatgcgtctgacaatcagaggcacttatgcaggcctcttatggctctcctgtgagaacagatatgggaagtggttttggtcttccaggtgtagagacagagagcttcagatccaatatgattcataaaagctgctggctttcctcaagacgtgactgtggatgggtgtgcatatactccactagcaaacattaactgtgggattctctgcaactgcagttgtatataatctcaaatacatatactctgtcctcactgaggcttcacatgaaatattccaagaaggcaaaacaaatagaaagtttacattttgtccttgtgatgaaaatgtgaatgatcataataactctattacaacctttgtcatgcacacatgacatttttgtactaaggaagtaaattcactaagggattcttactactgaaattctttactattctacttttacatgaaatattgtaatatataaacattagaggcaatatgcttttattttggttgagttgcgaaatattgcgcttaacatacttgatatgtttaaaggtgtttaaggaaatactgaggacttaaactttgaactttgtaatagcttatacactcacctcgtttaaaattataaatgtaaaacagagtgaaccatgaaacctttctagccaattttcctctccagagcaaaccactgttgccagtttattttgtttaatgtcaagaaccctacaatttgagaagcatagagtggtacatatcaacagagaaaaaacagtcagcaatacagattagcaatagattaagaatgaaaatagagatacactcatcttattgaaaaattagaaatgatttgatagaggaaatattaaagcctatttgctgtgcaggtagcagtttcacacacagatttctagaccagacctgtttgaccggcttggtctcagagctgctaatgtaacccaaggagacgtaaggctgatgtaaataaagtaagtaaccattggaagttgagactttccaaagatacagttcaggaaacttaaaaggatggcatatggaagttgagtgaaggagaaagagagggaagtagaaaagaggagaaaaatgttaagcaaaaaaggtaagaggaagtattgaaacttattgaaaaacctgagacattacggcaatcacgcttgagtttctcttcctattctgatatttactacccatttgactttgggcaaaccttcaacgttctctcattgaaaattgtaacttcattaaagaatgctatgcagataataagcaaagtacctcgcaaatacacaatctattttctattacaaatatcagtttttatgactaaataataagacaatttttaacctctgaatgattaatattctctggttagggtaaagtttatttacatgactcatctgtataatagggaaaaatctgttttctttaaatttgaaataagataatgtatagctgcagaaactcctggagaaaagtatgtaactcaacatcggtgctagagttttaagttaaatagcattcctcaggaccatcaaaaacataaaatattaaaaatatgcccactacaccttggcaggcagagacacttcagtgtgtaagatactgcaccatttctaaaacgtcttaataaaagttatcctaagtattttagtttggccgctcgtctgaaacgttttgctgggtgcaaacattgtaattagtgctctctaaatttagttgtgccactactcctgtagatccatttagtgtcccccttaccgaaaacagcgttctcaattagctgttgttttccacttgtaaggacagtcaaagctgaagtcttaaaaaagtggtagtgcccagaaatgtttcttaggcaagtcttgttttgtcaaggtgttttaagcagtgtggggaaatgtgggcagagattaatcttaggggcttctagtgccactgttaaaattccactctgtggcctaagtctctggcaagcatgagcactgtgtccttgcgcttgaatctatcttggctaaagcctatcagtatttttatgattcattttgaggtgtggccaactgtaaacgtctcagagctaagcaaataccattaaatcccaggagcacattgaaaagaggtttatttgagcaatattgagggaatttcggcacaaatttcatgggctgtgattaaatctaagctatttgtcaaggcctccaaacccctgaatgtgtaacagattgagctaattcattggtgtttgtaaattgagtttggaattaagctcctttgtaaatacaccgtttgagatgcatttcatcttgcaactctttatcgtggttttctcaaacttaaaatgtataaacgaattccatcttacgtgaatttgctgatcaatttctaacagctccacatttctaaattaatttaatccacacactcatctttctaatgatttattcttctccctgcttaatatataaatgccgaatgagatatcagaaggaggataatagtggagagtatataacctggatcttactcagtttcagaagtatttcagagaagcacgcacagtgcttattcacattgacatctggattttaatattgtcagtttttggggggttaaattccttattacaaatttatgtcaaggatcttctcacgcatcatcacaaaaaataattttaactgttgttactatattaattttttgacgtttggagataatattagccctggaatagtatttttgaactcataaatttgcattatttgacttgatccttcgttccttgactatgcagcgtgagtctgagacacgtgtatgtttactgaacacaagaggtgggccccagacacatgaaagatgtgtctcactcacctcttcctcctacctgagatttcattcaactttcccactgaacaatgattttgcacccccagaggggttttctatgatacagtttataagaatttaatgattgtttcattatgtgaattgtcaggtataaggtggagatattacactccacgttccttctgtagagtgacatctgctgggctgtgccccacagtgattttaagcaagtgcctgcttgttttatggggatcaaagctcatttctcccgatgtttaaacatctagtttattgtggtccggagaagtaattttcacttaaacatcaaagtcagttccagagtttaacgagtgtacctgaaagtaatgctggaaaaatacctctgatgtatttctgtagatgtgtggttatggcaatctgttggcataactcagaacagcctctccacatagaattgtcaaataatttcttcgtgtaattatgtttgggagtatggttggggacaacgtactggatatgagtcaacgtggaggggtcaacagaattactgctttcagggcattaaggaaactcaataggaaacaatacccattaaaaggatacacttgtgcaacaagattgtcgtttatcttgacctgttttagaaaacacgcaacagaggcccggcgcggtggctctcggcactttgggcggctgaggcgggcggaccattaggtcaagagatccagaccatcctggccctgtctctactaaaaatacaaaaattagctgggcgtggtggtgggagcctgtagtcccagctattcaggaggctgaggcaggagaatcgcttgaacccgggaggcggaggttgcagtgagccatgatcacaccactgcactgcactccagcctggcgacagagtgagattccctctccaaaaacaaaacaaaaaacaaaaaacaaaaaacaaaaaaaaaacgcagcagaataaggacaaaactcacgtccttttaaaaacgcatctctttgccttaaaaggctgcagtgatccttccctggcaaaaataaaaaaccacaactgctttgcactttgatatttacggccaggcaaagcctgtgtaagtcttcgagagccgccggcaacaaaaaccgtggagcgcacccagcaagttgctcactccgccgcggactgcgaaaggagcagggttgcggagctagggctccagcctgcggccgcgcattcttgcgtctggccagccgcgagctctaagggtcggccccgcccggtccgcccccgcggctccctgccaggctctcgcgggcgcgctcggggtggggcctcgcggctggcggagatgcggccggggctgcgcggtggtgatgcgagcctgcagggcggcgcgccggggcagccggagccgcgcgccgcggcgctgtaatcggacaccaagagcgctcgcccccggcctccggccactttccattcactccgaggtgcttgattgagcgacgcggagaagagctccgggtgccgcggcactgcagcgctgagattcctttacaaagaaactcagaggaccgggaagaaagaatttcacctttgcgacgtgctagaaaataaggtcgtctgggaaaaggactggagacacaagcgcatccaaccccggtagcaaactgatgacttttccgtgctgatttctttcaacctcggtaagctaaattggtcattttccgcattacagatttagcaaagtataacttttttggcctgtatattgatttttcatacattggtatgctcaagcctggacattttcttaagaacacacgcggtttgtcagggaagctttccccttgctgagagccctgctcgagttgtttctttaggcggtgacacctgcggagagtttcaagttgagtattacagtgccttcaaaggcaaaattgctccagaggagataagagaattcttttcttaatgtgttgttagtttgcgatcagcagaagtgaaaacaccaagaggaacgtctgtgtctgagttaaagggaagaagttgtaagatactgttggggaggcgggggtgtatttaagacacttggctttcagtctttcactcctcatcactaggtgggatgtaaatcaaattgccctgtagactatcttcgtttcacctgccattgtatcaccagtattctttgcaattggttgtatatgtacttttgggagaaacatataaggtaagataccaatatgtaaaaaaaatgtgtaaataatatcaacttgctcagtaaacataacaaaggttaggcatattaatagtttttttcttttggctttaactatgaagtcaacagaaccaaggggtaaattactgagggaaagtcacccataaaatcagtttctttctaagttaatttagggatgacagggtgaagaggttgtggaagcaggaagaaactgtttcttttgaaaattaccaacacaaacatctctagagtttcctccatctgtgtggtaaaagaagcgtacaatttcatttctaactctcataacatatgcaccacctaggaaatctacttacaatttttgt

SEQ ID NO: 11668 - DNA, 6000 bp, Homo sapiens
gtggcacgatcttggctcactgcaacctatgcccctcaggttgaagagattcctgtacctcagcctccagagtagctgggattacagcacctgccactggggttccccgtgttggccaggctggtctcaaactcttggcctcctctgcctcggcctcccacagtgttgagattataggcgtgagccactgctcccgggttattgatcatttttacgttgattatgtgttgagatgatattttgaatatgttgagttttgtaacagcattaaaattgatttcacttatttctttttcttttttgaattgtggctacttgaaaatttaaaattacatacatggctccaattctgtttctagccaagaacattaatttaggaaagccaagctgcacttggtggtgcacacctgtaatccttgctactctggaggccgaggtgggaggattgcttgtggtcaggagtctgagactaacctgggcaacatataaagagacccctctctgaaagaaaagaaaagaaaaaataaaagaaaagctagctctatggactgggcacagtggctcacgcctgtaatcctagcactttgggaggcagaggcggcagatcacttgaggccaggagttcgaggccagcctggccaacatggtgaaaccccatctctactaagaaataccaaaattagctgggcatggtggtgcatgcctgtaatcccagctactcaggaggctgaggcaggagagtcgcttgaatccaggaggcagaggttgcagtgagccaagatcgtgccactgcactccagcctaggcaacatttttgagactccatctcaaaaaataaaaggaaaagaaaaaaatgaaaaggaaacctagccttctgagaggatttcctgcccctcccttatcagatactccctggaagagtgaagcttcccagtctgctatgggatggagcagagatgggtactgtgagggtggtggtggtggtgatgggataagagtaacgcctatggaaaatcctggccgggcgcggtggcttatgcctgtaatcccagcactttgagaggccaaagcgggtgggtcacctgaggtctagcgttcgagaccagcttggccaacgtggcgaaaccccatctctactaaaaaaaaaaaaaaaaaaaaaaaaaaaaatacaaaaaattagccaggcgtggtggcgggtgtgtgtaatcccagctgcttgggagtctgaggcagaagaattgcttgaacctgggagccagaggttgcagtgagccgagatcacaccactgcgctgtagcctgggtgacagagcaagactccgtcaaaaaaaaaaaaaaaaaggaaagaaaatcctgggtggcaaacaggaattagccaaagggctggccgggtgcggtggctcacgcctgtaatcccagcactttgggaggcagaggcgggcggatcacgaggtcagcggatcgagaccatcctggctaacacggtgaaaccccgtttctactaaaaatacaaaaaaattagccaggcgtggtggcaggcgcctgtagtcccagctacttgggaggctgaggcaggagaatgtcgtgaacccaggaggcggagcttgcagtgagccgagatcgcaccactgcactccagcctgggtgacagagagagactccatctcaaaaaaaaaaaaaaaggaattagccaaagggtggcatcagcatcaatttcagggtggccttgaaggtggcttctgtaacactgtggctactgtaaaattattactcagtgaaataaagttacacattttagaaacaatacatcttatgctatttgatacatttttaaaaagcaggaacgacctggccttccaattatgttaaaccgtcttaaagatttgcaactctgcaagcttgactgttttcttctcaagtgcttcaaagtcctgctgaacaagccaattcctcccaagtccttcagcaattcccatttgacacccaacactgattgaaccctttactatgtcctaagctgtgttctacgtgttaattccttttatccttataatagtctcatggtgttgggactattattatgcccattttaaagaaaaagggggactgacatggtggctcatgcctgtagtcccagctactctggaggctgaagcaggaggatcgcttgagctcaggagtttgagaccagtctgagcaacctagcaagatcccatctctgtaaaaaataatttttaaaacattagcagggaggaaagtgacttctccaaggtcctgtaactctcagggagaacccaaagtccccttgttcctaggcctggtatttatcaccaccgtgacagttgatgccactagggggtgacatccgtctagcacttttttttttttttttttgagatggagtctcattctgtttcccaggctggagtgcagtggtgcaatctcagctcactcaagctctgcctcctgggttcacaccatactcctgcctcagcctcccgagtagctgggactacacgcccggctaattttttgtattttttttaagtagagacggggtttcactgtgttagccaggatggtctcgatctcctgacctcatgatctgcccgctttggcctcccaaagtgctgggattacaggcgtgagccaccgcaaccgacccccccaacttttttttttttttgagacggagtcttgctctgttgcccaggctggagtacagtggtgcaatcttggctcactgcaaactccgcctccaggttcaagcaattctccttcctcaggctcccaagtagctgggattacaggcgcctgccaccgagtctggctaatttgtgtatttttagtagagacggggtttcaccatcttggttaggctggtctcgaactcctgacctcgtgatccacccgcctcggcctcccaaagcgctgggattacaggtgtgagtcaccatgccctgccctgtctagcccttttaacttttcataggggctcactcaaatctattctccctccattccctgaacatagcagtggggccagtggggcccattcttagggaagctcacagctgtcccagagccaggggccctttagaccagtagtccccaacctttttggcaccaaagacaatgtttccacgaatgaggggttggagggatggtttcgggatgattcaagcgcattacttttattgtatactttatttctattatgattacatactcaccatcatgtagaatcagtgggagccctgagcttgctttcttgcaactagatggtcccatctggggatgatgggaaacagtgacagaacatcaggcattagattctcataaggagcacgcaaccttgatccctcacgtgagcagttcacagtagggtttgcgctcctatgagaatctaatgccctgctgatctgccaggaggtggagctcagcgtggctcacaggccctgctcacctcctgctgtgcagccagttcctaacaggctatggactggtactggcggccaggggcttggagacccctgctttagacgccttgatgtcaatgcactgggtggtgcagtgatggtccatccgtgctccacgggccagagaggaggtcaaaggccctcactgtgtgggaggatccctcgcccaggtagccgtagcaaagcggaagcatagctgggaccagaacccaccgggcttccagcgtttaaggccagccaggcccctccagcttctaggagagcccagccctgctcctctaaggcaaatggcagtaactgtgtaggctggtcacccctcaccgcagtagcctgactcccacaaggccctcagtgacaaagaagttgccctgggcccagatacgagcaggagccccatcttaacagcagctgtgagagggtaaaccgggggatgacatcaagcccacggcaggggccgggtgctcaggcccctctatcaagaaggggcaagaggctgggcacagtggcttacacctgtaatcccaacattttgggaggctgaggcgagaggatcacttgaggccaggagtttgagaccaacctggccaacatggtgaaaccccgtctctactaaaaatacaaaaattagccaggcctggtggcgggcacctgtaatcccatcttactagggaggctgaggcaggagaatcgcttgaacccgggaggcggaggttgcagtgagccgagatcgcgccattctgggacagagcgagactctgtctcaagattaaaaaaaaaaaaaaaagaaaagaggaagcagcagcagcagcagcagcaagaggaatttcgaggcctttcgcccaacgcctggcgcaccttaagctctcaacagttcttgaatgaggagtagcatctcggagccacgagcgtgcagagagaaggcacctggaggagagccccaagggacctgcaggcggcttgcagcgcagcgcacgcccctggggacgctgagtcagagccggcggcatcggatccagggcggggaggggctcgggggaagggaaaaatgcgggtgcggggggcgtggtttcgggtagtggaggggaaggatgcggccgggggtggatttggggtggggagggatgcggggaggagccagggcgcaggaagggagctctggaacccctagaggggaagcaagctgggaggggcgatcgtggactccaggagggcagggggcgcggccgtgggaagagacccggagagggaggacgcggccgtggagagggacgcgggagcaaggggcggcgggaggaggaggagggcgcgcggcgcggctgacgtgggccggggtcgcgcagcgggctgtgggcggcggcggcggcgcgcagcgacagagcgtcccccggcgaggacgagcgagcacggcgcccgcacctccccgcaccgcccgcgctgcgcgcccggaggagcgaccgccgcagttctcgagctccagctgcattccctccgcgtccgccccacgcttctcccgctccgggccccgcaatggcccaggcagtgtggtcgcgcctcggccgcatcctctggcttgcctgcctcctgccctgggccccggcaggggtggccgcaggtaaggcgctgggcaatccggcctccctgcagccgcagcccgcccggggcctggaaccgtctcagcgggcgagtgggcccgggagcagggattgcggaggtggcaccgtgcgccctgcgcgcatctccctcctcggctgaggccactgcagcgccctttcccctctcctttcatccttgttccccaaagtcgcctgggcactggagggggctccccgcaccccctggattcctgcttccacccccccaggctggccctgccctggaaaccgcgcgggggtggccggcgcatccgtcgatgcctggggaccatgcacccgctaagggaggggaggacgaggcagggaggcggggatgcgccagggtccgtcatcgcgccacaattccccagtcccccagggagcacgggatgggcaacgtttttgccttaaaatgtcgcctcatctagaggggtttcccaccgtgttggtgctggctttggggagatgcgaatttagagcccaggaggccaggctgccatttcctctctggtggtgatttccaaaatggacccggagctgacaggttcctggggtgtgtgtgtgggtgggggagtgggggaagcagggttgtgtgtctactgcccccacttccccaccgccagaaagccagcacccacctctctgccacattttgggaaccataaaaggacccagatttaagactattcgagggacagatgggacgtgggcagctaagaaggttgaatactatccaccacttttcaccccctcccccctcataaaagagcggtggagagagagagcaagggatctaatgaaaatttgtgaaagaaaaaccatgaggtcaaagaaaacctgcaactcagggatgaattagacgaattttatgggaattgcacttggacaaga

SEQ ID NO: 11669 - DNA, 6000 bp, Homo sapiens
ttcacccagaaaatcaccttatatataactggtttatttcccactggtttagttcctctaagatgtcccagcaggaagctggataaactggtctcaagcctgatagagaggcctgaactgcaggtataaataggcaaattctttaaggcagtttttaaggtggagaaagaatgatttttttattaaaaggttaaataggaaaacagtaaatatgacaacaacaggactcctcatcttcttcaaatcttgccctctcatggtaccaaaaaaatgtacttaaaacttaaattccaccatgttattcttttgtcttagaatctgacagtggttctgatcacccagaagatcaggtccaagttcttcagctctcacccaatccttatattacatttccagtacaaacatggaacacatagttcccttcatgcactatgttttttcctgccttattgccttttattacaaacatcacttctctctgtaaagctctctcctttctcttcccacttttaccactccactactgccatctgtcttgctagcaacatcttttaagacttggttcagaagttccttcccaacaccacaggctggggtaggtattcctgctctagactcataatatccagttcatgtctccattagtgctctttctacattaatagtattattacctaaggttatattttgagttccgtgacagtgcttcaattttttacctccagcaaatagcttggtgccaggcacatagtaagcactcagtagataatggctgaatgaataaattcaattctttcaatatgcactcaccaaatagttactgaacaattaacttttttttttttctttttcaaacggagcctcaccctgttacccaggctggagtgcattggcgcgatctcggctcactgcaacctcctcctcccgggttcaaaccattctcctgcctcagcctcctgagtagctgggattataggtgcccgccaccacgcccagctaatttttgtatttttagcagagatggggtttcaccatgttggccagactggtctccaacgcctgacctcaggtgatccacccgcctctgcctcccacagtgctgggattacaggcatgagccaacgctccgggccacactttattaataattgctgtgccttggtgctaaggatcaaaacagaaaatccttgctttcatgttttcaaactatataaagataattatattaatttcctattgctgctgaaacaaaacacttcaaatttagtggcttaaaacaactcaagtttattatgtcacagttctgtaggtcagaagtccagcaagagttgactggttcctctgttccaggtctcataagggtgaaatcaaggtgtcagcttacctgagcttttgtctggtacctctggggaagagtgtgctttcagttttatttaggttgttgacagaattcaactccttgcggctgtgtggctgaggtctccatttccttgctggctgtcagtcaggagccgctcttggttccctatggcaacctgcattccttgtcaaattgttcctctcattatcttgatctctctgactttcgctttgccacatctgtactgattttaaggatttatgtgattagattgggcccacagagataatccaggattattttcctttcttaaaatctgtacccttaattacatctgcaaaaagtcccctttgccatgtaaagtagcatattcacaggttctaaggatttgggcatgggcattttttagaaggccattcttcagcctaccatggtgattattcttctagaattattttctggcatatccctcccttaggtgatctggagagatatcttgcaccaatatggcttaatttattttggttataatgttaagttttatttgaacaataaagatattagcagctcttttaaaaagctatgaaccagaccagaaaggagtgactatggatgtagaagagctaaaatagataaatcaataataaaccttataaatagaatgagcatagcaagtaactgatacagggcaatgtgatgtctcttttacccagcttccaaagaatatagcgttgaacaattactgtatttagcattatttcaagtatagatgatttcctgaaggcattagtctgctattatacacaagataatctccaattttgcatactactgaatttgtttgaaattaaatataattctcttttgtctcaaaactgcccaacatcaaaagaatcataaatgggttttattttccatttttaacttatcaaactagtaatctaaatgaaactaaaaatcaattcaataatacagaattttagagagtctactatttgttggatgttacgctagatccagacaatacagtttaccttacgctccttgactgcaggaaactggcaggcatataaacaaataaattataatactgtgcagcaagggcaataagagaagtgagcacaggtggaaggaatgattcattctatgagtagtgaggtaagattttcctggctgaaggacaaacaaatctttaggaggacaaggtggaaggggagctaagccaacagcatgaccaaggcactaagtatgaaaaggaacaagagtatctggggaagtacaggtgtggctggaggatagagagtgagaggcaagtggtgaaagtaaaggctggaaggtcagcagggtcagaacctataatttcattcggtatattctgtgaagatgtacagccagcaaaagctttttaattcgggaaaacacgattggacttgcactttcaaaagattaccgtggttgcacagaagagactgactgggtcagaggttagttacaggctggaaaaccagtttagatgaaactgaagagcaaggatgaaagcctgaactagagcagtggaaatgcgaatgtggagcagaggaacgattcaagaaattctgcggtaaaactcatcagacttcatgactgattaaaggtatggtggtagacaagggagggagaggaaggataagaatggagaagcaggaattgggcgttatttgaaaatttctgacatgggaggaaaatctggatatttaataacatctgactaaattaggggatgaaagagcataagcggagagggaatggtggtgctctctccttgaccatactttagttaggctcctctgagccctcttcccaactaggcctcatccttgggcccctgtcttaggcctgctgagtccagttttagcaagaatcttgcaaagtcagtttagagagtatctcctagccttgataattgatcatctccgcctgtcttcagcaagaatcttgtaagtcactttaacaagaatatccccgacccttgatatcacttcttagtaattttccatgaactgacccctcagtctgcttgctggttataaatcctagctgtttttgttgtattaaaacttgaggccaatctctctcccccatggtgatagtcatggcacctattgcaatagttctaaatgtcttccttgacattttaacaagtgtcagaataatttttctttagcaacaaggaggaatctgtctcaaaaactaaagctccttccacacgcctgtaaggcttaattggtgcatacatcttttaactctcctgtagctaaataacatgtctggcttatccactgctggggtttaccaggcattatgatgtacataatccagacactgtgtcccaagaacatagcaagctggctttccctccttgatttaaaaaaatcaaaacaacacaactatcagggtaacatccactacatttgacaggtcaaagaatccccttccttaaggactttacaataaccttacagggggctaaagcatacatacccatgggtagtgggtaagccttgagagtacagtataagtcttgataacattttgaggttgataactagttgaaactgatctgttttcccgacctcaacgtaattgcaaggtcacttcaagagggtaaggggctattgcaactacccaaattcgctattgtagtataaaagctttaattaacagcatgtataggaatgcaaagctatgttctaatgaaactttaaaaagcagacacaaatatgaatgtcatataattgtcatctgtcgcaaaactttttttttaacctttgaaaaatgtgaaacccatttttagctcctagtacagcagaacctgcggtgggctggatttgccctgagggctgtagtttgcccctgtggtacgtatgaaatgccacaattttaaaaagatgtgttacgtgtgggaccatttgtggggcggtttatgctaacttccaatacagtaatatatgtcaactcgcttttgagtgacatttagtctgggtggccatgcccaggaatggatatagagaaaggggcgcggccgcgccgggcaccaccctccaagagactggtatcgcagcccccagctccaaggaactcagcgcaggcaggggcttcagggacgcggagagggaggcttatctctgctgaaagggaatagcggcccgcaaacaagcaaaccaggacactgctccgaggtcccgcccaggaaggcaaaacgaagtcccaccgctctcacacccggcaaccaaccaaggcacagcacgccccaccagcaagccacgcctcgcgcatcacgcacgcacgcacgcacgcacacacgtctgtcgcggcttcccgccttgcgctccgtcatgctctattgcgcatatctcggggcgggggaggaacggagattgacaaggaggcagaggcctgagcgaggcggaaaatcctcaccccggcccgcgggtagacccaaacttctagcgcgtcacttccgctgggggcggagcggggcggggctgagtgggtggcgacctagctgctgcgccagtgtttgtgttggaagctcagctgatgcaggccggttggagtggacgtcattgccgggaacgagcgagtcgccgctgcagccctagtgactgcggcctgcatcccggtaagtagccgcgaggggacaggggcgggacgataggaggctggttgatcgttctggacccttgtccggcgctccgggtcgtcctttctttctttggagggcacttcccgagcgagagggtggggacacgccaggctttggggaggagctggcgctggaaggagcccgcaggtcctggagctcattggtactcggcgccctccgcccccgtgggctttgctgccccagaagcgcaaaccgtatttggtttcgcaggtcccgccctgctccccctgtcccatccccacgactccctcctcaattttccagagtctgtctgccttcccctggactgtagtgttctccagtagttaactggtcactctcaggagggtttccctagtctacatcattctcgactgtcagtgtgcacctggtgattctactgcctgatattttttgtcagtaatctctttctgaccccatccacatttgattctatccttgaccgctgttgcttaagtggataaggtgtatgaatcactgtgttgcagtgcttcctatccctgtgtcatttctatcattgtgctggaaggaacctgctttccacgcctaatacaatgataactttaaaatggtgactcataggaaaaactcaggagagttgtgacataagggactatcatataatcctgcttaaaatactgttttcaattccaaaacagttgtatcctggttctgcagtcctaatttctgagagttcaaaaatgacaaatgtttcagtgtattaagaaaatgctgttaaacagtgaaacattaagagcttatgccttgtgaggcagttgtatcaagcccattttagctattttgttaaattgcttatgcaaattagttgtcctttcaatataagaacatgtttttatttcgtaattataatcaactttttcttaatgttgatctctttttttatttctatatcaggactaaattaaaatcttgt

SEQ ID NO: 11670 - DNA, 6000 bp, Homo sapiens
ggattcactgaatttcttgaatatatggatttacatattcagtcagttttggagatttctaagtttttatcttttcaatatttcttctatcccctttctgctccttggattccaagtacatatgtgctaaatgatttgatattatcctaaagatatcagatgctcccttccatttgtccttgattttgctctttatattcagtttatataatttctactgaccgtctcaagtttacaggtttttttccctctgttatgtccaatttggtgataatgctaaaaagtgaactttttacttctaatatttatttctaatatttcaacttgctttttataaatagttcccatctttttgctaaaattccctgtctgttcatgcatgttttccattttttatacagatgctttaacatatctatcaaagtgattttaaagtctctgccagataataccaaatctgggccatttctgtattttcccctattaatcattttctctcttgaccatggctcacattttcttgctccttcatgtctcataatctttattatatgctagatattgtataaaagaaaacagtaaataacatgtacctcaaaaaacatcttgccattttttctatcaagattattgtttggaaggctgaatcaaatctttcaacagtgagtcaaaaacccacattctgggttttgttgaagttttgattcagtttatttactattgctttcaaatatgcttgagttcttggcactggcaaaatctcaagattaatgtgcacctactagctcattccaccaaactattcaatactttcttagctcaaacacctagcttccaatatctccacaggttgttctgtttactctccagtcttgccggtcatttctgtgcctcaggagaatcctgggcagcctgccaccctgcctccagccttcacagagctgctgcagtacactggttaaaggcctagaatctgcaaagaaatttcttcagcattcatgccctaccccatgcctttaacatatgacatttgagcacttaatgaagacctttaggagagaattggagagtgagtgcacactcgttctatcactggaacgacatgagattgtaatctatcatcctggtccacacacaggggtgtcattcggcaggtctcccttcggccctgtttatggtgcattcctccttctcccactgttttgtaggtgattaaagcaactctaattctattctctcttaggaagctctccttatcttttggatttaagtgtacttaaatttgcgtcctcatttctttgataagttttttaaaaatgtttaaaaaaaaaaaaaccttctctagcttgtgtttgttgtgaagaaacagtcttttataacataaatcctaattggactctgtgttttccttattttatattcggaacacctcctcaaggatttctggacccaattctcctcttttcagcagcagtgatgatcacttagcaaaagagtgaaaataccctcttttccccccctaaccagttaactttactcaccgtcatcacttatctttgtgtagtaaaagttgaggacagaattcactcttccaaatttaatacagatattcatgccacagtggttaatagctgtagctttgcagtcaaaatatccgagttctagttgctagctgtgtggtcatgtgcaagtcataatacctaggatcctctatttccactgtttgaaataagatatgggataataacagaacctaatccatagcatttctataaaaattagatgatataaactactttacacaatgcctggcacaacaaattcattcattggccaagtgttattgaactcctaaaattattcttactagaaattatgattatgacaaaaaccctacaaaagatgacttgaatatttgggaaagaaagttttaacacatgggaaagattagctccatgcaggtgtgaagcaagatgaatgagacagaggaaatatagaagatcctgcctaagaaggagtacagagacataaccaagagtttcagataggtaagttatttgcagaaattaataaagacctctgcttttaaaataattggaatgacaaagatgtgtcaatagagtcaggagtttactgcctgtgaatgtaagtcaggtggcacagcgggaaatggtagttttgctaatggtagttttgctatgtatctggggcactatctctgaaaatcagccagacaaacttcaatcttttcaatccctggtttccaatgtaacctatccaggtttctaacataatctgaccagcatatcagtggaagggggtgagctgagagagacttatatattaacatttgacaaattatatgtttcaaaataattatgttccttttctgcttataatttttaacagctaatttctagaaaagtaatttttgcaaaatttttagttatggctgactgctattaggatttgggtgatttaccattaaaagagataaaagagaattgaaatgagagataaggctgttttcaagatttagtacaacctagagaaatcccttagcttcagcatcatactaaatataaccagaaatcattaagaaagaatgttcttctattcaaacttatcccagactgttaaaattactggcctttatatctgatagcacctagaccactactgaactcggaactcaagaaatcactgttaatcaaataattggaagcttttcagaaaattttcctttcaaaatgtgcttcaatgaaaaataaggcataggaacaaatgtaccaaacattcaatatctgtctttaaagtacttccttgttatatggatgataaatttgtaatcataatatctaatatttactgattgctctgcaggtatcagctcccatccataaccctttgagacagacattattactatcttcattttgcagataataaaaattaggtataaagaaggctaagtattttgcccactcttacagagattttgtatatctctgtcaggctgggctcattttcaggccatatggctcccaaggctgtgttcccaaccctgctactgaactgcttcttacagcaacattctcccaggaagacttattcctatgtgaattccaggaatttggataaggaactgtgctatatggccagcacgttttaagttaaatgatgaggttgagaaaatactaaatactcccttaagaattaaagaaaaaagtaactttttcacttaagaataatatatattacattatagaaccatttgcctatttaacaataataaagaaaaaacatccatgctctcaaactacaggcaactgtttatattttgtatatttctttccatttcaaggcagatatgtaatatatttatatctatatgttatctatatgtgaatatagtttacatcctattacaatacctcatatcctatactttgcatcctgattttaattttatatcactccgcgtataacagccttataagatggtttttactggctttataaaaactcaatagatggctattccataattttaaaaactcagtaattccaaggggaacatcatatctccacaggtggactgtcaataattttgagaaaaattttcccccatgattctgatttgttttaaccaacctattaattttgaaatttcaaacagtgttaatggaagacaccctgacccttccctttggaaaatatgggctaaataaaagcggttgaaaaataatgattttatcaatgtcccttgttggacattcagtttatttaaatggatacacctcatacccaaatctttttagagttctcattaggtttaggatacttctgaaagggtggaattgctggaccaaacgatgtgaacattttaatagtcttgatacatactgactgtctgccagaaaacttaggagttttaaatctccgacaacattgtatgagaaagctcattatctcacatatggatctacagtaatcctcttaaattgtatatcgttctgacttgtatttcctacttttacatagcttcatttcccaattcctgttagaattccctgattctaacaggatcacactgatcctgttagaagagagaaatatatgactctcacttccttgctcctgtgactgtaagaatgcctaccattcattaaacgttaaactctccgcaggaatgagactagagtgcccttaatattattaccggcatctcattgatccctcaaaacgactccttgtcgttgttcttatcttctaagtgaaatgacctagacgttgggggagggcagccccaacccacagcgaagagcttaagtactgggatccgagacgggatttcacacacctgtaactagcaccagagttaaggggtggggaggggcagcgtgggcaaagcgaaacgaaaccgagcaaaaacaaaaactacggccttgccgcttgctgtctccttctagttggccagtttctaaattaaaatagaggtagctttgctgctgtcagcggcgtgtgtacggaccagtttattccattcctaaggaccagactgtcagcgacaactcgcattgcgtgagcgaggaggctgctcagctgaaagctgaggcagatggtgcacatttataccctttgcaaaaggaaatggtctgatatgggaaataggaggagcgactgttcctaggtaattcgtggctacagtggacactttgaagtctgggggacgcgaaggtaatgaaacctgaagagcgcacaatctcacacgatcgacgcctctgggctcaaacaggaggaagaaggacgcatgcgtcacgcgcacgccaggggtgtccctccgggagcgctctgcgcaggcgcggacgcaggttacagcagcgcttggcctctgctgatgccgtcgttatcctacccctcccccgtcccagctctacggcggccgcgcgctccaggccggtcgctccaccccccggctcccgggactgtggactccacgaccctgtcctcggccctgtccgcgccgaagcagcccgggactgcgcagcgccccgcgtgccggtgagcgaccccggacgtgcagtccccaggtccccttccggagcgaggctgagcggctgcgccgcggcttgagccgggcctgacaaggaggggaggccgctggggtgctgggccagccgcaggtacggcggcggtcagggctggtgatcgagttgctgtgtcgcctctaatgaggcccagccagggaacactcggcttcggcccaagccctacctctgggttgcctctaggccctcacaccttgagcgccaggtggccctcttccttttgctgttgatgaatgttcttgccgtggtgccgggatcttattttgcagctttacagagtaggctttgtgctaggtgttgtttatggagcttttcaaaggcgcttgtttccttagttctcaagcccttttagaactaaaaccagtgtctacacagaagatcaggagccatttaaattggagtgctgtgatatattttttctctccaaactgagtctgatatccatgttgactttcagtaaactaaggaaccgctataataaataacactgagcccacagaggttgcagaagagggtctagcaccccttttttaaaccattgagtctcccaagaataaaagtggttacacttgtcagttctctaaggaaaatctagtagagaaggcaagggattcccagtttctcacagagtctggcacttgtccaaacacctaccctaaagcagaatcgatcatggcagctattagattaggacagaaaacaggctcaaacggagagccacttgagtctgcctttctgtgtcttttttctcaacgcgctccagttaagatgcagcttacagcctggctgtgttgactgagatcccagaaagagtgcccttaaggccttgctgataaggcccaatgatcccaattcatctagtgttccgcatagaccccaaggttacagt

SEQ ID NO: 11671 - DNA, 6000 bp, Homo sapiens
cttaaaaccagcctgggcaacatagcaagaccctgtttctacaaaaataaataaaaagaaaattctaaaaacggacttactatagaggtacaataatcaatacagtatgttattggcaaaataacagacagatcaatgaacagaatagagagacaagaaaaagatccacataaatatagtcaactcatctttaacaaaggagcaaaggcaatacaatgaaacaaagatagtcctttcaacaaatggtgctggaacaactggacatccacatactgcaaaaacaaacaaacaaatccagatgcagaccttattgccttcacaaaaattaactgaaaatggatcacagacctaaatgtaaaatgcaatactataaatctggaagataacacaggaaaaaaaactagacggctgagggtatgtgtaggaattacatgagatatctctgtaccttcctctcaattttcctgtgaacctaaaaccaatctaagaaatgaagtgtttaatattgaatttaaaaaaaaaatgggcagagatccagctctaaaacagcaccctgagaagcttctcacccactccccagtggtgggcagggaggggaacctggtagaaatattttttagaaaaacccatttaaagttttaaaaaccattaggaaaattgtcctaaggacatacatcaaataaagacatatttattcagaaaatttactaaattcctgtaagaaaagtgagggtctctggtacttagccatggcccactccttcccttcccccatgttcagcagaagggaaactccactgtgggaggatatggccaagaacactgggatcacagtcactccagctcccagtcaagggctatggtatctcccctaggaggagaaggctgccagcgtttctcatctccctaccgctgtgaagcagaaacaacatttgaggctaatgaggccaagaggtcagggactcccttcctccactcaaccataaggcaaaggttcagtgggctgggaatactggattcctggtcaccttttctccagctacttcatagtgtggagtttccatgccaggagagtcaagctgaagttgaaaagaccagaggctactacgccactcaggaccatgctcaaaaagtagatgggtcactctagaagatgcaagccactgtcaccaaccccaggtccagagcagtggctcagatatgttgcccagaggagaggcatgccttaagaacagagagctctgaagctgtcctcaagtaaactgacttgtttggaacagagtgtggggaagttcaaggttaagagtactgccaaaaacaatggagattttgacagtaagcaattaagaggaaatgagtagcttgataaaagcaacaagctcaaccataggccagctaggttgccagagaaccagtgaaagagacagtaagaaataaccctcttggagtaaaaacaaaaaaaagaaaaagggaagataaagaataagaaagaggccaggcacagtggctcatgcctgtaatcccagcattctgggaggccaaggcaggtgaatcccttgagcccaggagtgttagaccagcctgggcaacatggcaaaaccctatctgtaccaaaaaattaataataataataatataaaaattagccaggcatagtggcacgcacctgtagtcctagctacttaggaggctgaggtgggaggatcacctgagcacaagaggtcaaggctgcaataagctgtgatcgtgccactgcactccagcctaggtgacagagagaccctgtctcaaaagagtaaaaaaaaaaaaaaaaaaaaaaaaaaaaaaagaagaggaacaaagaaatattttagacctccagttaaaaatggcaaactggatacacattcaattttgctccctctcaaaaccaccaaaataatttattttttaaggcataaagctgaaaggatgacaagaggagaccattttggaagccaggaagcagaacaaatttaaacttctcaacaaaacaagaaagccagacataatgggacaaagccttcaaaattataaatgaaaattatttttaacctaaaattttatattcagtctaaatttgatcacatttgaatagatcaagttagaatgaagatattttcagttttgtaagttctcaaaaaattctcttcagtgtacccatttctcaggaagttactggagatttactctcccagaactgaataaatggagaaagagaaatgcctttgatgcaggaagcaggagatccaacctaggacagaagtaaagggaatccccagcatggtggtgatgtgagaagccaggacaacagctgtgtgtggtgtcaagccccagactggggcaggttggaagggtctgaaaagcctttctcaggaagatatagaatacttgatgcatagaaatttattcatagaagatttgataaagatttgagggttggattagtgttaagcaatagaaaaccaagcaagcaaacaaactttttaaaaaaagcaattatcttcagagaagatcaaaagttatgcaggataggaaaagtaatcttaattttctacatggctcagctgctgtaaatggtatttacaggcacacctcggagatatgttgcaggttctgttcctgaccactgcaataaagcaagtattacagtaaagcaaatcacacgaatttctggtttcccagtgcatataaaagtcatgtttatactataaggtagcctatttagtgtgtgatactgttatgtctaaaaaaacctaacggacataccttaatttagaaatactttgttgctaaataatgctaacaatcatctgaacctttgccttcacaacataaggcctaacatttggcttatctttgctttcacaatgccttcctcactaagcttaatcatttctagtttccaattttaaatgaaagacatgtgacacttcctttcacttaaacacttacaggccattgtagggacattaattggcctaatttcagtattattgtgtctcaggaatagggagacctaacgtgagagagaaatggaggaacgtccagttggtggagtggtcagaacacacggtcagaacaccaacacagagttggtggagcggtcagaactgaattatcaattaagttcaccgtcatatgggtgcggttcatggcaccccaaaacaatcacaatagtaacatcaaagatcaccataaccaacataataataatgaaaaagcttgaaatgttgcaaaagttaccaaaatgtgacacagagacatgaagtgagcaaaggctattgaaaaaatggtgccaatagacttgctcgatgcaaaaatgccacaaatcctcaatttgtaaaagatgcaggatccacaaagagagatgcacaataaaataaagtatacctgtgcatattccaatattgtaaacactgaatattgatttaaacaaaactataaccaatttggatagaggaggaagagaggaagcatacttctggaacatgcagtggggaagaagaaagctaaatcttcaccttttatggttgggagtcagtagattatgcctgaaactgaaaaatcaagaagtaccaatccaagcatgttatttagagaactgaggtaaatgcctaaagaatgagcacaggtgaaagtgcttgcctctgaagaggaagaaagggagagtgtgggactgccgattttcgtaagttttgaaaaactgactctttgaaaactaggtacatgataaccttgaataaatttcataaatataaatatgtttctatctcttctatatcacttcactcaccagtattgagttttcagagtaactactgtatattagtatctaaaagttaattttctgtcttaaaggcattaatatggatgctagactaaatatacagaaattccacttttcataataatagctaccattactatggtcccagtattgtactaagcacttatattatctccagtccccagagcaaccatgcaaagtaggtactgtttccattttacagataagaaattgatgctcaaagagattaaataatttgctagtatgtagcagaactctctgatctcaaagcctctgttcttccttcctcctggatcccatcacctctttctagagtttgcgtttaaaagaactaggggcagggggagggcaatgtagcagttcaaataactcctcctttggaggaagggcaaggaagcagaagagaaccgctgaaggattcagcaatagcactaggtagcagtctcatgtaaccaagtttaacccacagttgaaatttccagttggtcatgtgagcaacggaagcaatttttaaactctggccaggagccccaatgcttacaaaaataaaagctttgttcggctcttattttgaaataaaatagatgttccagctgctccaacatgggcctaaacactgcagtgagaatgctcaggacacaaagttttgtgtccagagaagcccagtcatcattacaaaattgatctctaaaaggggttgggggacagacggcatagctgcttcccaaggaaatgagtaggaggtgacctgggtcctgactgccacactggctgggagcttggaccagatgatcctgatgggtttcttctgaataaaattccgggttgtgtttatcttgcagtttaaatcactgggagcttcgagagttctttggctccttccctttctggaattattgtgtgatataatcaagacatttacctggctctttaaatcagttggtttgccggctacagtgtaggtaaagagtatgtcataatggacaataaaaagttgtttacatacctcatttctgaaaagtcatgggccactggcaagttaggaaacgaaagtgaaatcagctgatagtgacatcagtcagaacaaatgtaccaaagttcagagagctgtttactaggcacgactgcgaaggcaagggggcaccagctcaggactgcatctgcctgccatttcccttccactcctcctttctggagtctgacattagaaagccagcgagaaggaagattcaaacaaccaaccctgatttcctgcttctccttttcatgagtgttcctgtggtctctgcacctcctttctgtaagtaccgatcctgcaagcatcacagcttacccagacgtctactaccttgtaagacaattttgttttcttctcagatatttcatgttctggcaatccacataggggaactcactggttgttcagtatctgtgaccctccctcgctcatgtctgtataatctacataatctaccccctttactctctgctctccttccttccactcttcggcatcaacatgtgtagctctggcctcaaagatgatgaaagtaaggccagtataactggttagaaacgatgcagggctgactgcacacagcagagtcttgcacgcagtgtgtacaaggacatggctgtggcttgtgcaatacactgttcatcagaaataggtaaacaaaagcaggtcaccgaccaacactaactaaaccactattcaatggtagttacgaacacatcataaaactttaaaatacacactgaagattaatatcaacagaaaaacttgtgttcttgcctcaaagaatgggacctaagagatgtttagatcttatgttagtcattagaccagattgctcctcatgccccagtggaaatccatggtggtattttagttctcttgatgcatattttaagagattttttttaatgtgggcttagtttcactaataacttccactatgcttcttcgcctataaaatcaaaggctcctttgaaagagggaaaagacacatatttccttcttccctcatgataactgaagagcatttttcagtatccacttaccataccccattccccaaaatctcaggtctgagactcagtccatgagatattttttcaatcttgcacatattcccctttctcaactttctttccagcttagtccctgc

SEQ ID NO: 11672 - DNA, 6000 bp, Homo sapiens
caggcagcccaaatgattgttaataaggatcaaatgagatcgtgtatgtgggtccaatcaattgattctacacaaaggtatgtatctattgtcactgatatctttttagaagtcaccagcagtgtgttgtatgcttattcagtttaaactgatctattttttagttgtcttaatcagatgataaaaggtaagccttccaatacagagcttgcaatcttcatttccttatcctgccttatatgtcaataaccttaatttaccttctgatcatctccttggctgcccgtgctgtctgaaaatcagccttttcttaaaatggcaaatagtggggaaaagtagcatctaaccactcctccagagaagggcagaataatgattcagaatgcctctagtgttttgttaaattatcatttgagagcagcccaagagagcatttagagtgggatggtgtagtgcttaagagccaggattctgggttcagaccatgggttcaaatcctgaccccacccttaattagctacccacatacctcaagtttcttacctcatctataaaatggacataatcacagtaactacctcttagtatagcatacgtattttaaatcacttaatttgtgtaaagtatttaacacagtgaggagtatgcacaaaacattctacacatgttgatactataaagcactcccagattcagaaacacaaaaatcacagaaatacaaagccacagagacaagcacacagtgggaggcaataagcttgacttctcccttgttctccttgcccttccacttcccttcaccgtcaaccacccaaatgagctgggaagagtgggcaaggagaagtcattccatctccagtagggtttgtcaaaggcaggcaagtagaaagtggatgacaattgaattaagtgatgcattcctgttttgctaaggatattaagttgacgaagaaataaaggaaagcaaaacctttgggaagcaatttggccatatgcattcgggacaataaaaactttcctattgcttgtctcttgataatgacatttcttaaaattcatcctgaggaaataatccaaaacaaaaggaaaactatacataagatgtttattgcattagtttttaaacagttttcttaaggtgtgaaaggaaaataaatcttgggatcccaaacttactaagccagagggaaaagtcaagctgggaactgggtcatgcaaacctgcctcccattttggtttctttggttttttgttgtgttttgtttttgtttttgtttttgtgttttgagaccaagtctcactctgtcacccaggctggagtgcagtggcacaatctcggctcactgcaacctctgtctcccgggttcaagcaattctcctgcctcagcctcccgagtagctgggattacaggcacgcgccactacaccggctaatttttataattttagtagagatggggtttcatcacattagccaggctggtctcaaactcctgacctcgtgatcctgatctgcccacctcggcctcccaaagtgctgggattacaggcatgagccactgcacccagccccattttggtttccgaataagatggctacaaagatgaaaagctacacacctccctcacactttgcctacaaggaaattctttatggtaaccaagatctttaccctaaagcatttcagctaaggttcaccatggcaatgtaaattgatagcttatcttcacaggtgggggaacacaggacagaaatgaaagtcatccctctgcccactgagacaaatgcatatctgattgtttcctctgccctattatctacattatcttatgtaaaaatgcagattcactgagccagacaaaggcattaaatattgaagccaccaaaatcatctttaaaaaaaggcatagacttgtctcccgggtgcccttccttaactttggcaaatctcctaaaataattgagacttgcctcagtcattttccttgattgacaaaggtataattcatccttttaaagtgtacaatgcagtggggttttttaaagaattattcagagttgtgcaagcatcaccattatataattttagaaattttcaccaccccaatatgaaactcatttgcagttactctccatttcttcctctgcctccccacccctagcaaattctaatctactttctgtctcttgtattattattattattattattattattattatattaatttttgagacagggtctggaatgcagacaggctggaatgcaatggcatgatcacggctcactgaagcctcgacctccatgactcaagcaatccacccacctcagcctcctgtgtacctggaactataggcgtgtgccgccacctccagctaatttttgtatttttttgtggcatgatcacagctcactgcagcctcaacctccagggctcaagcggtcctcccacttcagcctcctgagtagctggaactataggcgtgcgccaccatacccagctaatttttgtatttttttttttttggagagacatggtttcgtcatgttgcccaggctggtctcaaactcctgtgctcaagcaatccgcccacctcagcctcccaaagtgttgggattacaggcatgagccactgcgcccagcctgcattattattattattattttttaattattttattttttgagacagagtttcactcttgttgcccaggctggagtgcaatggcgcaacctcggttcaccacaaccttcgcctcccgggtcccagttcaagcaattctcctgcctcagccgcccgagtagctgggattacaggcacacacctccatgcccagctcctttttgtatttttagtagagatggggtttcatcatgttggccaggctggtctcgaactcctgacctcgcgatagtccgcctcggcctcccaaagtactgggattacaggcgtgagccaccgcgcccggcaacctgcattattttaatggccaaaaatattgagtgaaataggctcagtgttattgagcaacgtatcatgagggtatattaatcaaattatggcatatcgattcaatgaaatattacatggctgtttgaaattactacaataaggtctttatcagggtgaaatatatacaatataaagtataaaactttttaaagatacaaagtggttagtatattctggtttgcatgtggacagtctggaagaaatatataaacgttttaaatggccgtgttaggataatgagaagatagacaatttttttttctttagcttttaaatattgtcatgttttttcttttaacaaatgcaatttttaaaaattgattttacattactggaattgagaatgtatgaacgggcacagccagccaccagtctagcctctccagttgggatccagttcttgtctatcgtactctccttccggcaaccaagagacttaagctacaaaggtccgcctctcccagactctccccttacacctcaggcccataccttttggccccgtgcctcttagcctacaccttcccattcccacaactcactccttaacaaaccccctttcctatcacacacaccaatgacccttggccaatttccttctattcatatgttaactgtagactgcagtcctgattccagctgtactttccccttatgagcagaacagtgaggaaattggctgaaacagaacaacaatcagcccccctcactcctgtgcctactttgcatagagacacacctcatttagactcccacagccttcctgttaatgtctccttcctctctctgctatcgatctggggctctgggacagagaatcttcaatatcccaccagtgcccacacttattaccactacagacacagttattctcattcccatactctctctctctctctctcacacacacacacacacacacaccctctcctatgcttccccaccccagctgtccctggggagcctggattggatttgtgcccacggtctgcagcttccctcggtctgtctgctggtcaccctctgaaggaacggggcccagttttgttcaccctctggctcaaggaccaagtatgcttctactcactctctacctccaagcacctaccctactccgacttaactgcctgacccacaactaaaaagaacagctctttgatcttcacaggtgtggtgaggcctggtgagaggggagccttctagttagtgacctaccacgtttcaggaaccatgttagtttccaggattcagagatgattaaaactaatcacgcaccttgagaaactcacagtggaaggaaaatcagtaagcagaaaaatgctacataaccaggtaaatgctgggacaaatttaggaaggaacgatgtggatacactggagcaggctccaaagcagcatcacctcggaggaggatcttgaagactcaagagttaactgggtcaagaaatatacacactaacacttctgacaggtctgcagaatacagggagtccataaaaatagcacttgggtaatggaagcaggacacaccattccatgcccacagcattactttctgtgtgcagtgcactgtgtgatgatctacagagattaaataagccgaggtctccgcttccagtcacttgggagagacgcacaaggtaaattacccaaatagaaggcaaactgcccagggctgtaattaacatacaatatgcgccgagagggaaaggttaatgctaactccggtcctaagtacaaagatcattgggagtcaggggtgcactctcattagggtacagcatgggtgggtggagagagtaaaaaccagaacaaatcaaggttcagcagttggaagtcagccttagggagaaaaggggcggagactgactgggccagaacagggattgggacagaaaaagagggtggggccagtgggctccacctacccgctccggcccttcccaccaccccccaccccatctactttctacagtctgtggagacaggtgagcgacgaacttctgagacaggtgtgggtgcgagggtcgggagggtcatgggattgggaccgaggtgtgaggagggaatctgcaattccttgctacacagagcgctggcaacttctgacaggctgtttctggggtatgggctgcctcgggttgttgctgttacaaggaaagaaaagagttcccctgcccaccgcctcccagccactgggctacctcctggcaggaaatttgcaaactgagtttaacaagttaggatcagcagagggtagaggagggccctggcagatgtggggtctagaagaggacaggagttatcagggcctccggccattgtgctgggcctttgcctgtacaattgtttctcaagcagttgtgtccctgtggctttggtgcgcctgtgtgcactttctccctccacctggagcatgggctaacaccggaggaaaggaaaagacagagtcagacagggtaagtggggctccctcccctcttctctctaacggggctggattgagggcctctggctggggaggtgggggtggagatccagtaggagcaataacagaggaagggcagggcctgccccatcacctgaattccagagatgccagtgtgcactgaagccccaggcagggcgtgcccaggaccggatcctggatggtggtaagggacaaagctggaagggagactacagggaaggagaaaggaaagaaggcagagccatgacacagtcaacttacagaatggctgggagtcaaagctcctgggctggtttcctggctattccacacactccaagacatagagagaatttcggaactggaggggactctacagatgatttatttgagattgaagaacctagaaaccaaacaaagaaatatcatatggttactttggtatctgacacagccatgacaccaattgctagtgtagacacaatagctgtgtgtctttttgcaggagcctggggaggggccatggtgccaatgc

SEQ ID NO: 11673 - DNA, 6000 bp, Homo sapiens
tcccaaagcgctgggattacaggtgtgagtcaccatgccctgccctgtctagcccttttaacttttcataggggctcactcaaatctattctccctccattccctgaacatagcagtggggccagtggggcccattcttagggaagctcacagctgtcccagagccaggggccctttagaccagtagtccccaacctttttggcaccaaagacaatgtttccacgaatgaggggttggagggatggtttcgggatgattcaagcgcattacttttattgtatactttatttctattatgattacatactcaccatcatgtagaatcagtgggagccctgagcttgctttcttgcaactagatggtcccatctggggatgatgggaaacagtgacagaacatcaggcattagattctcataaggagcacgcaaccttgatccctcacgtgagcagttcacagtagggtttgcgctcctatgagaatctaatgccctgctgatctgccaggaggtggagctcagcgtggctcacaggccctgctcacctcctgctgtgcagccagttcctaacaggctatggactggtactggcggccaggggcttggagacccctgctttagacgccttgatgtcaatgcactgggtggtgcagtgatggtccatccgtgctccacgggccagagaggaggtcaaaggccctcactgtgtgggaggatccctcgcccaggtagccgtagcaaagcggaagcatagctgggaccagaacccaccgggcttccagcgtttaaggccagccaggcccctccagcttctaggagagcccagccctgctcctctaaggcaaatggcagtaactgtgtaggctggtcacccctcaccgcagtagcctgactcccacaaggccctcagtgacaaagaagttgccctgggcccagatacgagcaggagccccatcttaacagcagctgtgagagggtaaaccgggggatgacatcaagcccacggcaggggccgggtgctcaggcccctctatcaagaaggggcaagaggctgggcacagtggcttacacctgtaatcccaacattttgggaggctgaggcgagaggatcacttgaggccaggagtttgagaccaacctggccaacatggtgaaaccccgtctctactaaaaatacaaaaattagccaggcctggtggcgggcacctgtaatcccatcttactagggaggctgaggcaggagaatcgcttgaacccgggaggcggaggttgcagtgagccgagatcgcgccattctgggacagagcgagactctgtctcaagattaaaaaaaaaaaaaaaagaaaagaggaagcagcagcagcagcagcagcaagaggaatttcgaggcctttcgcccaacgcctggcgcaccttaagctctcaacagttcttgaatgaggagtagcatctcggagccacgagcgtgcagagagaaggcacctggaggagagccccaagggacctgcaggcggcttgcagcgcagcgcacgcccctggggacgctgagtcagagccggcggcatcggatccagggcggggaggggctcgggggaagggaaaaatgcgggtgcggggggcgtggtttcgggtagtggaggggaaggatgcggccgggggtggatttggggtggggagggatgcggggaggagccagggcgcaggaagggagctctggaacccctagaggggaagcaagctgggaggggcgatcgtggactccaggagggcagggggcgcggccgtgggaagagacccggagagggaggacgcggccgtggagagggacgcgggagcaaggggcggcgggaggaggaggagggcgcgcggcgcggctgacgtgggccggggtcgcgcagcgggctgtgggcggcggcggcggcgcgcagcgacagagcgtcccccggcgaggacgagcgagcacggcgcccgcacctccccgcaccgcccgcgctgcgcgcccggaggagcgaccgccgcagttctcgagctccagctgcattccctccgcgtccgccccacgcttctcccgctccgggccccgcaatggcccaggcagtgtggtcgcgcctcggccgcatcctctggcttgcctgcctcctgccctgggccccggcaggggtggccgcaggtaaggcgctgggcaatccggcctccctgcagccgcagcccgcccggggcctggaaccgtctcagcgggcgagtgggcccgggagcagggattgcggaggtggcaccgtgcgccctgcgcgcatctccctcctcggctgaggccactgcagcgccctttcccctctcctttcatccttgttccccaaagtcgcctgggcactggagggggctccccgcaccccctggattcctgcttccacccccccaggctggccctgccctggaaaccgcgcgggggtggccggcgcatccgtcgatgcctggggaccatgcacccgctaagggaggggaggacgaggcagggaggcggggatgcgccagggtccgtcatcgcgccacaattccccagtcccccagggagcacgggatgggcaacgtttttgccttaaaatgtcgcctcatctagaggggtttcccaccgtgttggtgctggctttggggagatgcgaatttagagcccaggaggccaggctgccatttcctctctggtggtgatttccaaaatggacccggagctgacaggttcctggggtgtgtgtgtgggtgggggagtgggggaagcagggttgtgtgtctactgcccccacttccccaccgccagaaagccagcacccacctctctgccacattttgggaaccataaaaggacccagatttaagactattcgagggacagatgggacgtgggcagctaagaaggttgaatactatccaccacttttcaccccctcccccctcataaaagagcggtggagagagagagcaagggatctaatgaaaatttgtgaaagaaaaaccatgaggtcaaagaaaacctgcaactcagggatgaattagacgaattttatgggaattgcacttggacaagattacctatttcctcctggaaatacaggaaaggggtctcttgtccatcaggttgatttgtgtcagagattttcaatgtgtcctaaattgcaaaagaaaaagaaaataataacaaaagtgaattaattatttggaaatcatgtgtggttcccattctagccaattgcacccttgatgtggtcaaaatcacagtggctaagagtggagttgggaaacatcttctccctcacccgtcggggagacttttctacccttcccctttctggagtccatgaatcagggatttgtaagtcagaagtccatgtactggactattaattaattctgggttgtgttatccagactttagaggtactctttggaagtgttttgggtagtctgcatattctgtgtgaaaggactggtgtagccattttctagaatgttcagggctgcacatgctgtgttgctggaaaaggtaggtgtttcttccatgggccaagctttggggtgagtgccccatctctttttgcttttgccccttgagctctgggtgacttggggggcccttggagtcccctaaacctctgccttggctgctccataccccaactccatgtcacatggactcccaaacatggaaagatgaatttgtttgtttgagatgcagtcttgctctgtcacccaggctggagtgcagtggcacaatcttggctcactgcaacctccaccttctgggttcaagaaattctcctgcctcagcctcccaagtagctgggattacaggcgcctgccaccacacctggctaatttttgtatttttagtagagatagggcttcgccatgttggccaggctggtctcgaacctctggcctcaggtgatccacctgtctcagcctcccaaagtgctgggattacaggtgtgagccaccacgccggcctggaaagatgaatttggtgggtagagcaccaggccctgtgattggttccttcagccacatttggcaaaggcttcctggtccatttccaccctggatgtcctggccatccctgagacccctgaggaacaggggcagcatcacccaggggctgtgacacacctgattttgaaaaaacagactgagaaaaagtgtccttggagctggcaggtggtggtgggggagtcggcgggctcccatgagctgggccagtgtctgcagcaatgtctgcagcagacacagcccctccctgccccccatcccccctcccagtcccagctggctgccctcctgatccattcccctggcaaccgatctgcgtgataacatgcgtctgtctcactgcagatgctgtttggccattagcatgcagccgaatgtccctgctacctgccagcctcgctcaggcccacgcttctcagctggggtggcagggaggggatggggaggagaggggtgccaggagttagggggataagggaggaggtggtctctcatccatgcacctctctgtccacagcctggccaaatgctgcctcccagccaaagtggggagggagagcaaagcccaaccagggtagtacagactggttgggtggcctcaggcagcagcagtgacccatgcgggcttcaggtccctcaatatcatatacccactctgtttgcgtggaaaagctcccatcacagcttctggatttccctctttggggttaagacactgcaggtccccttttcaatgccagcattcccttggaagtgaccagctctcggcatcttgactcaaatgacttgatttttatttatttatttttgtagaaagggtctctcactttgttgcccaggctgaagggcaggggcgccatcatagctcactgcaacttcaaacccctgggctcaagagatcctcctgcctcagccttccaagtagctggggcaacaggtgcacgctaccatgcctggctaatttttaaatttttttttttgtagagaatgggtgtcgctgtgttgttcaggctgatctaaaactcctgggctcaagtgaccctctggcttcaaagcgctgtgattacaggtgtgagctgactgggcccggcctcaaatgcctttataatttaagaaatggctctgaaaaaaaaggaaatacgtgatgtgggccaaagcagcgaacgtgtgaggtgggcctgaggaaaggtcggagctggagtcccccacagggacaggtgatgttgctttgaagtgaatgagatgcgtctgaaaaaaataatctcagagttgcctgggcactagaaggggcttcccttgccccctcgattcctgcttctactccccgggctggccctgccctggaaaccacacgagggtggcccacgcatccgtcagatgtctggggaccatgtacctgctaagggaggggaggacgaggcagggacatggggatgtatcagggtcagtcatcgtgccacaacccccagcccccagggaacacgggatgggcagcatttttactttaaaatgttgcctcatctagaggggttttccaccctgttggtgctggctttggggagatatgattttatttgatttatgtatttatttatttgagatggaatttcgctctttttgcccaggctggagtgcagtggcgcaatctcggctcacggcaaccaccatctcccaggttcaagtaattctccggcctcagcctcccgagtagctgagattacaggcgttcgccaccacacccggctaattttgtattgttagtagagacggggtttcgccatgttggccaggccggtctcaaacgcctgacctcaggtgatccacccacctcggcctcccaaagtgctggaattacaggcatgagccaccgtgcctgaccgagatgcaattttagagcccaggaggccaggctgctatttcttccaggagtgatttcccaaaatggacctggagctgacaggt

SEQ ID NO: 11674 - DNA, 6000 bp, Homo sapiens
ggaactatatctagctcactgttttgcatatagttggtgctcacaaatgccatttcttttgaattgaatttagcatcctactacattgactcaagctagcctcttacttcaaataatataactggaaacactgtcaacttcttttcagccccatttagtattggtatgccaataatattagccaaatttactgtttatcctctgtgtgcattctacaaaattgtgtaggtcacgagggctaggactatctgttttattgactagggcatattcaaagactaacacaataatcaggtcattaaatgtgtacaagaaatatgttttataaatactaggcattttacatgtattatttcatttaatcctccacaaaccttatgagtattagtgtgcccatttattggatgagaaaagtaagagtcagagaggttatgaatcttgctcactattgttttgggagtgataaaataataactctgattcataggctgtaacgtctatacttgaatgattttatgatacaatataagcaagtattgctgccttttaaaaaatagacattctgtctcaaactgagtccaaatgtccttgaaaaggtcctcataaatgatatctttttcagcttttggaactgagacttaaaagttgggtaatttgttcaaataagtggcaaagcttagaactggaatctaagtattgcctacagtaaagcacatgttcatccctggcactgtcctttccaaacattgttggtccccaacaaacctctaagttctttgaaactatagattggcattaaaggaaaagtgctacttgctccatcgcatttaggcactggttcattcatacattccaaccagtgtttatctgcttgctgtgttgcctggcctttttgtttttctgccctgtatttctctccttccgtgaacaacttttccccaaaacaaattctgtggttctatgagagatgctgttttcacactaggaccctgttgaggggtttggagtagtctgaccatgctgtttgatcacagtacctcattctctgaccatagatcataatgcacttacattactgaattgggatactgaaaattttactaatgaaaaaagggaggcttgtgggaattatttgcccacagtatcacaaccagtaaatggtgagggaggacaggactccaaccttgccttaagtctgaagttaagcaatgcaaacattgatacttgcctataagaaactaacatgcgccagggcacagtggctcatgcctgtaatcccagcactttgggaggctgaggcaggcggatcacaaggtcaggaggtcaagaccaccctggccaacgtggtgaaaccctgtctctactaaaaatataaaaattagtcgggagtggtggcacatgcctgtaaccccagctacttgggaggctgaggcaggagaatcacttgaacctgggaggcagaggttgcagtgagccaagatcacaccacagcacttcagcctgggcaacagagcgaaactccatctcaaataaaaaagtaaaagaggccgggtgtggtagcccacacctgtaatcctagcactttgggaggcagaggcgggcagatcacctgaggtcaggagttcaagaccagcctggccaacatggtgaaaccccgtctctactaaaaatacaaaaattagctgggcgtggtggcaagcacctgtaatcccagctacttgggaggctgaggcaggagaattgcttgaacctgggaggtggaggttgcagtgagccgagatcgcgccactgcactccagcctgggcggcagagtgagactctgactcaaaaaaaaaaaaaaagtaaaagaaagaaagaaaagaaattaacatgcaattgaatatgggggcatttttagacttattccaacttttcaactggatgagttgtcatagaaataagcaaggcatggaataacctacaaaagtattaggtaaaaggtaaaatctaactcagattcaaaagtaagttggagaaaatacaattatgtgtccttaatatcttaattttatgttgctactcttgtgccaaaaccttagctataacctgtctattaataaaactattctttcttcacccagaaaatcaccttatatataactggtttatttcccactggtttagttcctctaagatgtcccagcaggaagctggataaactggtctcaagcctgatagagaggcctgaactgcaggtataaataggcaaattctttaaggcagtttttaaggtggagaaagaatgatttttttattaaaaggttaaataggaaaacagtaaatatgacaacaacaggactcctcatcttcttcaaatcttgccctctcatggtaccaaaaaaatgtacttaaaacttaaattccaccatgttattcttttgtcttagaatctgacagtggttctgatcacccagaagatcaggtccaagttcttcagctctcacccaatccttatattacatttccagtacaaacatggaacacatagttcccttcatgcactatgttttttcctgccttattgccttttattacaaacatcacttctctctgtaaagctctctcctttctcttcccacttttaccactccactactgccatctgtcttgctagcaacatcttttaagacttggttcagaagttccttcccaacaccacaggctggggtaggtattcctgctctagactcataatatccagttcatgtctccattagtgctctttctacattaatagtattattacctaaggttatattttgagttccgtgacagtgcttcaattttttacctccagcaaatagcttggtgccaggcacatagtaagcactcagtagataatggctgaatgaataaattcaattctttcaatatgcactcaccaaatagttactgaacaattaacttttttttttttctttttcaaacggagcctcaccctgttacccaggctggagtgcattggcgcgatctcggctcactgcaacctcctcctcccgggttcaaaccattctcctgcctcagcctcctgagtagctgggattataggtgcccgccaccacgcccagctaatttttgtatttttagcagagatggggtttcaccatgttggccagactggtctccaacgcctgacctcaggtgatccacccgcctctgcctcccacagtgctgggattacaggcatgagccaacgctccgggccacactttattaataattgctgtgccttggtgctaaggatcaaaacagaaaatccttgctttcatgttttcaaactatataaagataattatattaatttcctattgctgctgaaacaaaacacttcaaatttagtggcttaaaacaactcaagtttattatgtcacagttctgtaggtcagaagtccagcaagagttgactggttcctctgttccaggtctcataagggtgaaatcaaggtgtcagcttacctgagcttttgtctggtacctctggggaagagtgtgctttcagttttatttaggttgttgacagaattcaactccttgcggctgtgtggctgaggtctccatttccttgctggctgtcagtcaggagccgctcttggttccctatggcaacctgcattccttgtcaaattgttcctctcattatcttgatctctctgactttcgctttgccacatctgtactgattttaaggatttatgtgattagattgggcccacagagataatccaggattattttcctttcttaaaatctgtacccttaattacatctgcaaaaagtcccctttgccatgtaaagtagcatattcacaggttctaaggatttgggcatgggcattttttagaaggccattcttcagcctaccatggtgattattcttctagaattattttctggcatatccctcccttaggtgatctggagagatatcttgcaccaatatggcttaatttattttggttataatgttaagttttatttgaacaataaagatattagcagctcttttaaaaagctatgaaccagaccagaaaggagtgactatggatgtagaagagctaaaatagataaatcaataataaaccttataaatagaatgagcatagcaagtaactgatacagggcaatgtgatgtctcttttacccagcttccaaagaatatagcgttgaacaattactgtatttagcattatttcaagtatagatgatttcctgaaggcattagtctgctattatacacaagataatctccaattttgcatactactgaatttgtttgaaattaaatataattctcttttgtctcaaaactgcccaacatcaaaagaatcataaatgggttttattttccatttttaacttatcaaactagtaatctaaatgaaactaaaaatcaattcaataatacagaattttagagagtctactatttgttggatgttacgctagatccagacaatacagtttaccttacgctccttgactgcaggaaactggcaggcatataaacaaataaattataatactgtgcagcaagggcaataagagaagtgagcacaggtggaaggaatgattcattctatgagtagtgaggtaagattttcctggctgaaggacaaacaaatctttaggaggacaaggtggaaggggagctaagccaacagcatgaccaaggcactaagtatgaaaaggaacaagagtatctggggaagtacaggtgtggctggaggatagagagtgagaggcaagtggtgaaagtaaaggctggaaggtcagcagggtcagaacctataatttcattcggtatattctgtgaagatgtacagccagcaaaagctttttaattcgggaaaacacgattggacttgcactttcaaaagattaccgtggttgcacagaagagactgactgggtcagaggttagttacaggctggaaaaccagtttagatgaaactgaagagcaaggatgaaagcctgaactagagcagtggaaatgcgaatgtggagcagaggaacgattcaagaaattctgcggtaaaactcatcagacttcatgactgattaaaggtatggtggtagacaagggagggagaggaaggataagaatggagaagcaggaattgggcgttatttgaaaatttctgacatgggaggaaaatctggatatttaataacatctgactaaattaggggatgaaagagcataagcggagagggaatggtggtgctctctccttgaccatactttagttaggctcctctgagccctcttcccaactaggcctcatccttgggcccctgtcttaggcctgctgagtccagttttagcaagaatcttgcaaagtcagtttagagagtatctcctagccttgataattgatcatctccgcctgtcttcagcaagaatcttgtaagtcactttaacaagaatatccccgacccttgatatcacttcttagtaattttccatgaactgacccctcagtctgcttgctggttataaatcctagctgtttttgttgtattaaaacttgaggccaatctctctcccccatggtgatagtcatggcacctattgcaatagttctaaatgtcttccttgacattttaacaagtgtcagaataatttttctttagcaacaaggaggaatctgtctcaaaaactaaagctccttccacacgcctgtaaggcttaattggtgcatacatcttttaactctcctgtagctaaataacatgtctggcttatccactgctggggtttaccaggcattatgatgtacataatccagacactgtgtcccaagaacatagcaagctggctttccctccttgatttaaaaaaatcaaaacaacacaactatcagggtaacatccactacatttgacaggtcaaagaatccccttccttaaggactttacaataaccttacagggggctaaagcatacatacccatgggt

SEQ ID NO: 11675 - DNA, 6000 bp, Homo sapiens
cacaggcatgcacaaccacacccaactaatttttgtattttttgtggaaagagggtctcaccatgttgctcaggttgatcccgaattcttgggctcaagcaatctgcctgccttgcctcccaaagtactgagattataggtgtaagccacctcacccagcctgtttctttttttttttttttttttttttttgagacagagtcttactctgtcaccaggctggagtgcagtggtgtgatctcagctcactgcaacctccacctccggggttcaagggattctcctgcctcagcctcccgagtagctgggactacaggcgcccgccaccacgcccagctaatttttgtatctttagtagcgatggggtttcaccatgttggccaggatggtctcgatctcctgacctcaggtaatccacctgcctcggccgcccaaagtgctgggattacaggcgtgagccaccgctcccagcctcaccgagcctgtttctatgatctattttctccccttctcttttttaaaatgctgaatttgtcacaaggattcatacatcctttgggtttattaaaaaactttttataaaaatattatatatagagaacaacacaaatcgtaagtttacagttccatgatttttcacacatgaaatacatctatataaccaccaccctgaatgagaaacaatcttatgaacactccaaatactgttcccaaaaaggttgatcagtttttcagaattctagcagcataatttagttgtgcctctttttgcatgttctatgaattatacagcatgtgttcttatatgtctggttttttttttcactcaatattatgtttgtgagaaccttctatattgttgggtatacttttcatttttccctctattgctagacatttggatggtttgcagtttgggaatatttagtagtagtacttctgggttatatcttttggaaaacataggtcttcgtttctttggagtatatacctaagagtactattgctgctcacagagtgagcatatttgtaacgttagtagatactgccaaatggttttgcatagtgcttgtgccaatttattctttcaccagaattctatgaggcctctgtgttctactttctctccaacactttattttgtaattttttttttgagactgagtgtcgctctgttgtccaggctggagtgcagtggtgcgatctcggcttgctgcaacctccgcctcctgggttcaagcagttctcctgcctcagcctcccgagtagctgggattacaggtgcgcaccaccacaccctgctaatttttggttttttagtagagacggggtttcaccctgttggtcaggctggtctccaactcctgacctcaagtaatctgcccacttcggcctcccaaagtattgggattacagccgtgagccactgtgcccaacctttttaaatctttttaatttgagcagttttgttgggtgttaagtgatactaaattatggttttaattttttatttcattgatagctatgatattcagcatcttttccagggtttattggccatgtttatacttccttgtgaagtacctattccagatcttgcctatttttccattgggttcaccaactttttcttcattatttgtagaattttaaaaatatattacggttgtaactcacttgtcatatgtgcggtatgtatgtgtatgtcttacaaatcgttctcctattccgtggctgaccttctcactcttgtgttttttgatgaacagatattcttaattttgtccaatttataaatacttttctttatagttagtattttgtgtcctgtttaagaaatctttgcctatcctaaagtcataaaagtatttttggccaggcgccgtggctcaggcctctaatcctagcacttcgggaggctgaggtgggcagatcacgagatcaagcgatcaagaccatcctggccaacgtggtgaaacctcgtctctactaaaaatacaaaaattagctgggcttggtggcgtgcgcctgtagttccagctacttgggaggctgaggcaggagaatggcttgaacctgggaggcggaggttgcggtgagctgagatcacgccgctgcactccagcctggcaacagagtgagactccgtctcaaaaaaaaaaaaaaaaaaaaaaaaaaaaatatatatatatatatatatatatatatatatatatatatatatatatatataaattttcttgtgttttcttctgaaaccttgctttgccttttactcttctatctagtattcatctagaatagatttggttgtgtggtgtgtgtcagaagtcctgacttttaaaaaatacacttatccagttgactcagcaccatttattgaaaagacctttatcataaatgagatgtatatatggatctgtttctagacacagtatttttcatttatgtattttttgagatggagtttcgctcttgttgcccaggctggagtgcaatgtgcaatcttggctcaccacaacctctgcctcccaggttaaaatgattctcctgcctcagcctccctagtagctgggattacaggcatgcaccaccatgcccagctagttttgtatttttagtagagatggggtttccccatgttggtcaggctggtctcgaactcccaacctcaggtgatccacccacctcggcttcccaaagtgctgggattacaggcgtgagtcaccatgcccagccagacacagtattttgttccactggtatatttgtgtgtggttgtgctgatagtgcactggctcaatttttgcagctgtataaacctaggtagtataaatcctccaaccttgttcttctcaatgttgttggcatggctattcttgacatgttatatttctatatgaattttagaatcaccttatctacaaaaaaatttttaaaagagaaaaacatggtgggattgcagtgaatatgtggaacaatttagggtgaattgggtctttgttgagtttccaagccatgacatatggcatattttttcaattattcgggtcatctttattttcctcctgtgttttaaaaattttcagtgttgggtgtcttttacatcttccattggaatgattttatttaactaattcataggtatctgatatattttgataattttattttgttatttttatttcaacatgtttttgtggtaattctaatatgaacatcaattcttggtttttgtaattcggtactggattcacatacgttatagtttttctggatgctggacattgtaagtttaaaaaattgcataagctctagattatatcaaattatatctttttctggggtttatttgttcttctgtttggcatttgagtggagccctgatagccttaattcagttagggtcaaatctggatcaaggctgtattacagtttgggtaagacctctagtttgccctgatttttgggcatattcttccagggtgtgttcacttaaccaccatctcattgggtcctaaaatctcaagaatacaaagccttccactctgattttcagaggtcttcggcttaccttttgccttccacacctcatgattttagaattcagcaaatgtcttgaggtaaagccaaccatgtgtttgaagcccttcaggtcttccatttttttcactccaaaccccttagatgctaaacgatcagctggtttctctgtcctttatttggggccctctgtctgagtcagactcacttttttggtcctttactttttcctggaatcagcaaatgcctcaagggaagaaaagctatagtttaccagctcacttcctagcaattactccttctccagattcttggctccatctgttcttgttgcttcagcagctctctgtctgatgcctttaaacagatggtacttttcttgtatttcatcaagattttcttgttgttgatgtgagcgttgatctgtaacagagtatttcatcttaaccggaaatggaaatttgcattattctccaccattgctcaagttcctctagtggggcctcacagctcaatattaggggaaaaaatattgagaaagaatttagagtatttcaggttgattgatcataaaaaagaaacaaaatgagtgatacctaggaaaattgtttgatttacagaaggttgcacagcagaattatagctgccactcagccattccattaaacctgcggtactgactatgtaagatgcttctgtgtacagaagctagagaatctttggtaagcaacatagaactctaggatttaagctcttgtctgtgatcaacaatatgatgttgagtgcttagaatcttgaagtctcaggtttatttaaactgattatttaattgtagtggcctgcttttaccttctcacctcagttacctttgttaacatttgtttgtattcttttatgaggcaaccttgaatcccatatgcaatgtatacaagatggttcattatttctttttaataacagtttaacttctagtagttactgtgaatcagttttagcctcttaatctcaggatttggactaaatattatacaaaatttataatgttaaccttttgttataataatttgtaaatttctataaattatattttctctagttaagtattacatcttttaatgaaaacttttgaatattggttaatttttgtcctcaatattagaacaaatgtaatctagaaaattgacattaatatatcaaaaactaatctgtcttataagattactgagaaagtaatgaacactgtcaccttggttgtcatgtggtgaactgcatgtattggttaataataatcatacattttcagtcttgatttgacaaaagcaacaaagtatcttttctctcaatataggaaagaattattccatatttattacgactgagacaaattaaggatgaaactcttcaggctgcagttagagaaattttggccctaattggctatgtggatccagtgaaagggagaggaatccgaattctctcaattgatggtggaggaacaaggtaaggctaggaacatgattctttttttttttttttttttttttttttgagatggagtttccctctgttgcccaggctggagtgcagtggcacaatctcagctcactgcaacctctgcctcccaggttcaagcgattctcctgcctcaccctctcaagtagctggatttacaggctcccgccaccatacccggctaatttttgtagttttagtggagacagggtttcaccatattggccaggttggtctcaaactcctgacgccaggtgatctgcctgccttggcctcccaaagtgctaggattacaggcgcgagccactgcgcccagctggaacatgattcttaaaaactacagattcaattcagctttaggaattaaaaaaaaaaagatttgatataaataaaatcaaatttttaaaataaaacatgaaattgttttaattaatactttattaatctaagtgctactctgacatatacttcagttctttggtttgatttggtatttatatttttgtatttgatttgatttgattttagtatttatatttttatatttggcctttttagacctttttggtagttcagaagcttatcaaccattattctcataaaaccttgacagtgttttataattttagctttcatttattattttatttttttggagacagagtcttgctctgtcgcccaggctggagtgcagtggtgcgatctcagatcactgcaacctctgcctcccaagttcaagcgattctcctgtctcagtctccgaagcagctgggattataggtgtccaccaccatgcctggctaattttttgtgttgtaagtagagacgggatttcaccatgttgtctaggctggtcttgaactcctgacctcaggtaaaccacctgccttggcctcccaaagtgctgtgattacaggcgtgagccaccgcgcccagccagctttc

SEQ ID NO: 11676 - DNA, 6000 bp, Homo sapiens
aaaacctcccaaacaccatagccctaggcaaccactaatctactttctgtctctagatttgattattctgaacatttttagtagggttttcaattttgcactctattgaaaaatgtggctagtttaattttttgagagtgaaatatccatttattatattacaatatagctatataatttgacaatctcctatgtagaatatacagtacctgtctaagatattttaagtacaccagcatttccttttaggctatgtcaattgactagaacacactatagtaaatacatacacaggtttgatgtggattataatgaagtggtttttttccttagtaatctgtatcataattcccaattagtgtctttttctgccttggaaatttctacagaattgtcaatatcaggatagtgcgtaaaagtacactcaccatactgacaagcacattttctattttgttgcccaaaactccctgtcctgtaaagtgctctgcttgctttttagtagacatttgataagttaatgttatatcctttgcaatgatattattttgatgacaaagtaagtttatgctttcaaaaatcacaattcggtcagaaaagtttagcatcttaaaaaaattgttgctatttgaaaaaaacaaaacaaaacatatacttgtgactttgtggtccagctggcaaaaacttgacatatcatcccatgaaaattttaagtcatgaattattttgacatgacaatattgctaacaaaatcaaaatcagccgtttaataaacaattattccaccaagcagtctatattccttttgccatatatactgttaacagcaaaaattttggatttgctacatatgcatgggtaaaggaggtatttagacgaaattttgctttctaaggttataccaaagacttgagaaaatccaatttactcccacatggcaccaaaccagctctcactgagagtcattatttggacccttaagtccaaataatctgttcttttaatgaaaggacattttacaggtggcatcattcagcgtttgataaatccttcctttaaatagcctcctccctctttacagttgcctcaaaagacttcaaaaagcttgaatccacttttatctttctcaccttcctccttcccaagatgattcacactactttagaaaaaataaaaattttatttaaaaaagtctgtgctgggaaattgtttgaaatgttgcccttattaactagaaatctttttactctccagagctttacgccctctctcataacagatttaaaatggggttcaagatctagtttgaatcttatagaaattccctcagactttatcttctaaccttctttaatttgttcccactatctacgttttccaagagtactttatttctataattgttcttttatatagtatgccattcttgtttcatgttatcctctctgatgatattttagtttctttaaattttaaaaatattttagtgtttttgtttcctctaacttctttttctgtttctttgctttgctctttcctgttggcatctgccttcaaatgtctagtccctgactgtgcatttggatttaaatgagacatctgaaaattgataattcaggggtacaagggtgagcttaatcaatgaacttcattatatgatgaggagatggccaactatttttgttgctagtccataagagatccataggtatttttctgggatgtttgactcaccattcaataagcataagccctctctgtacctgatgtcctagaatctgaagtgtctctcattcctttttattggggaggaatcctatctcctatcaagtcgagacagttgcctcatccaattggaaggggaggcagcagtatttttcctctgccatcttgaagaaatcagaagtttccttcctgtaaccccactctcctgatttccacctatatatacccatcaccaaaccgatcactaccaagtcctgcaagccctaggctctcattgtctcacacacactccacctagacagtctcaaccggcattctggccttgcccctctctaccttcaccaagcactgggcttaccctcacttaagtttcagtcaccactggtattattttaggtatttgatcccagcaaagtccttacacatgctgacatgtgcaggaatgagaagtcagtggctacaaagcaatactggttaacacaaggtggtaataaaataaatatactaaggttaatgaaagccaagtttcttgttatcaatggagttaaaaatagaggaaaataaaatgaatcatgtgattttggattgaaattggagattatcagtgtgaactcaagtttttttctttttttcatagtctttgacatagaaggcataatagttttaatatataaaatatagaaatgtttgatgtaaatgttcgtgtttgtttatacatatgtatttcccagcaatgttcatgacagcaaagacatcccagtagcaataagcacattaaagctcagatcttggtttctaagcagcaccaaaaggacccctggagaaataactgatttcaggactggagtagagaatgtaaaaatgagcctggaacatctctgcaccagaaagtaaaaaagtgctcaagtaatcatggggaatttttttttctcctttttcgaatgtgtaaaggagcttaaagggggtcccattggccaaattggagatgatctgagcatcaaaataaataatgatagtaatggattataacccattgaataacattggaaatcatgagtccatactgatataaataaataagtgaatgagctaaaagttggatgaacaatcagatttttatatactttcaaagtacctccccacaaaattcttattaataacaaaaaggaaaagaataactttatggtagagcagcttggcagacaccaccttaagcaagtaatccattgagcattacaggtaacaggacaaattgaaattgtgcacaacctgcaatgtgaaaaccgcagcatcacttctgtgataatcctgacaaagatgcataatctgaatctaatcaagagaaaacatcaaacagacctgcactaaggaacctctacagtataagcagcctgtagtctttaatagtgtcaaggtcatgaaaaggaaaaacaaaaaatcttccaaattgaaggagacacaagaaatatgactaagcaacaatgattccgaactgaacccttttcctctaaaggacaatattgggacatttggcaaaacataaatggagtctaaggattagagagtagtagtgcatcagtatcaatgtcctaattttgttggctgtgttgtggttatgtagaatgccctggtttgtttgtagaaaatatacaataagtatttggatcatggggcattaggtctgcaacatagtctcaaatggttcaggaaaaaagttctttgtactgttatttgtaacttttccataaatttgtttcaaaataaatgaattgcattgattaaagaaaataaaaaactagtttggacaagtagttcccgtcctgtagattctgctgtcttcaaaatccaaacaaattacatgagcaagaatgatggctcactcccagctcaataatcctaaaaccaccagcacaaacctgtaatccaacaaagtcagatctattgacttattgcaatcaagaagactgcacaccagaggagctgtggtgtgtctcaccgtacaaaataaaaggtagttattgtatgttttggcggggagagtgaagtttaggtgaaatttaaatgaaatctcaaagcatagctgtgtgtaaaggcattaacatcaggtctggacgagaattgaatgtagggcatgtttccttggaaactgcaaagttaagaaaatacagaatgttttcagaaccgtttatctgaagctctacacctggatagaaattgaggctgcttctctgcgtcaaagagacttagatcctccaggcaaggatgggacttttcactcgttctgatataatttcaaatagcaacgtttatgtggacttgaaagaacaaggtttcggccagacgcggtggctcacacctgtaatcgcagcactttgggaggcggacgcgggcggatcacgaggtcagaaaatagagaccatcctggctaacacggtgaaaccgtgtctactaaaaatacaaaaaaattagccgggcgtggtggcgggcacctgtagtcccagctactcgggaggctgaggcacgagaacggcatgaaccttggaggcagagcttgcctccaagctctgccactgtactccagcctgggcgacagagcgagactccgtctcaaaaaaaaaaaaaaaaaagaagaaataacaaggtttctcagtgtgtagtaagaatgtacttaagtggtaatacttttccgttgcagcatgtcctaaaagaaacattgtttcctcttaacgtcgtctggctttatttgactctgttatccatccagatgaaaggctaggcagtttgttactttctcagcccaagctaagttttaccgtctcagcaagaacgactcagtctctcaaatcatagctaattctcctctgagggccttgctgaagttctgcgtttgcttgctccgctttcctctcattttggacctccagccttcctgtagtccgaggccctgcaccggggtcaaacgcgcctccggtcttcacgtaaccgttcaagcatccctccttcccaggacacactcaaagcgtcagagcggtccgctcttctcaagtcctattggctcaagtccatgcgtctcatggcactgccgggtgagaggcggaaaaaggccttcccaggcgcgagaagatgacgtcacagtagcccggccgggcgccgaggttgccttagggctctctgcccagtaacaggcatcgaacggtgcagactgaagacgccctccgtcagcgacgccgtcgcaatggccatttgtcaattcttccttcaaggccggtgccgctttggagatcggtgctggaacgaacatcccggtgctaggggtgcaggaggaggacggcagcaaccgcagcagcagccttcaggtgactctcctctgaatcctccgcggtaaccgagccgggaagggtccgccggcggggaccgggcgtcccgcgtgtttcccgctgctggtgaccccaacgtgcccgcgtcgcggccttgccggccctactgggccctgcacaacgtttttaaaccgagggttttatctacatattattcatgtggtccgtttttattgagcttctgaggacctgggtttgggcctggatgcttgtgcgaaactgagtttttaaatcggaagtacctatcgaaactaccttgtaggtaaatgccggaattgaatataatttttactaagttgttttttcgagggtgaggctagcagcttgggtcagaatcaggacttcattttggagaagtcgtggacttctttgaaaaaatctaataaaaccggccgggcggtggctcacgcctgtaatcccagcactttgggaggccgaggcgggcggatcacgaggtcaggagtttgagaccagcctgaccaacatagtgaaacaccgtctttactaaaaataccaaaaaaaaaaaaaaaaaaaaaaatagccgggcgtggtggcgcgcgcctgtaatcccagctactcatgaggctgagacaggagaatcgcttgaacccgggaggtggaggttgcagtgggccgagatcgtgccactgcactccagcctgggcgacagagcgagactatcaaaaaaaaaaaaagaaagaaagaaaagaaaaaaagaaaatctaataaaacctatagagccataccgcaaaaatgcacctgctcataaatttggggtgaaattgggaatgtgggacgcccagttaagggctatccgggaggtgaggaaaggagatgcgggggccacgttgatctagtccctgggcctagatcattgtcaaagctttttatcttcaag

SEQ ID NO: 11677 - DNA, 6000 bp, Homo sapiens
ccaccctatttagacaggaaaaaaccaaggtactcaggagggtttcatagctaataagtaactgaaacacaatttgaattcaggaagccttgctctaagtcctgtgcacttcatcacaattgtatgtggtctctcccagtaggcagtggaagcaccaagctctgcaaattatttttctgaattgtaactgcaagccagagatgtggtaggagcatggaatataaatataaaaacacacagctgttgctttctaggagtatatcagttatttcttgggcataacaaatcacaaaacggtgacttaaaacaatagccatttacttgctcacaattctacaatctggtctggactcacacatttacagtcagttggtggatcaactagtactgaggatccaaaatagcctcactaatgttcaacatttcagctagggtctggaatggctaagggttggctaggcctctctcctcatggtctttcgtcctcaaaaagacaagctcgagtttccttacatgggcaaaagagcaaaaaggaagtaacaaggtctcttaaatcctgggcttggaagtgcccaacatcacttcctctgcattctcctggtccaagcaagtcagaaggccaacccagattcaatgtggcagatgattacacaatggcttcaattcagggacctgtgattcactgagggccttttaataacaatctaccacaagaagctaacagttttagtgaggagacaattgtcatagcacattgggacgtaataaagatgggaaaaagtgcaataggtctgcaggcaaagaaacacccgaatttgatggggcaggggatcaaggacagcatcatgaaggcagcattaacacaggccctgagacttggagagcagatcatgtttggaggttaacttggtgggtggtcacaggtgaataaggaagggaaggaagggcagtccaggaggacagaatagcaggtgcaaagacattgatacatggcaaaagaaagcatgttgtatttggggataacaaatagttcagaatgattagagtaaagggctcttgaggaagagtgtggaaggctgaagaacgaggctgaaccatatcaggaagtgtcatgagtgccttgctaagaagattttaaatgatactcttagtaataactcttagtaatagaagatcattgagaaattttgatcagaacaaccacatcatgtgtttttttttttttttttttttttttttttgagacagaatctcactctgtcacccaggctggagtgcagtggtgcggtctcggctcactgctatctccgcctccctggttgacaccattctcctgcctcagcctcctgagtagctgggactacaggtgccctctaccatacctggctaattttttgtatttttagtagagatggggtttcaccgtgttagccaggatggtctcaatctcctgacctcgtgatctgcccgcctcggcctcccaaagtgctgggattacaggtgtgaggcactgcgcctggccatatttttttttccttttttttgagacagagtttcactcttcttgcccagggtggagtgcaatggcgtgatcttggctcaccgcaacctctgcctcccgggttcaagcaattctcctgcctcagcctcctgagtagctggcattataggcatgtgccaccacgcccagctaattttgtatttttagtagagacggggtttctccatgttggtcaggctggtctcgaactcctgacctcaggtgatctgcctgtcttggcctcccaaagtgctaggattacaggcgtgagccaccgtgtccggtcatgtttttttgtatttaaaaatcactttcaggctgggcacagtgactcatgcctgtaatttcagtgttttgggaagccgaggttaagagttcgagaccagcctggctaacatggcaaacccccgccccccgccatgtactaaaaatacaaaaattagccgggtgtggtgaaatgcccctgtaatcccagctactcaggaggctgaggcacaagaatcgcttgaacccgggaggtggaggctgcagtgagccaagattgcaccactgcactccagcgacagagtgaaactgtgtcttgaaataaattaataaaataaaataaaaaataaaaatcaccttaggagtccatgaaaggaagatcagatggaaataagaaagacaaatgagaaggctattgcaaaataccaagtttaagaagatgagacttgaacaatggcatagaaagcagagaagaggaaaagggttccagaaatatttgtgaggtagaatgaacaggatttgacaattgaaggaagaatacagaaagaatcccaggtttccgattttggcaactgggtggggatacaggtggcagagttttaggggaaaagtgatcatttacgtttcagacatgttggttttgaaacgcctgtgtggcaatcaatacagatatgaagtagagagttggttctacaaatatgaagctcaagagagaggactggactagagatacaaacacagaattcatcagcaagcaggtggtagtaagaaaccataagatgtcccacagaaagcatgtagaatgaaaaggacagaaactagagatgactataggggaagagctagatttagtgggtagaagaggaagagaagtccacgtaaaacactaaaaaagaactggaaagaggaggaaaaccagtatcattggtgccccagtagccacaggataatataattttgtttctttctttttcttttctttttctttttttttttttgaggcagagtttttactctgttacccaggctggagtgcaatggtgcgatctcggctcactgcaacctctgcctctggggttcaagcgattctcctgccttagtctcccaagtagctgggattacaggagtcctgtcaccacgcccagctaattttgtatttttagtagagacaaggtttcaccatgttggccaggctggtctcgaactcttgacctcaggtgattctcccacctcagcgtcccatagtgctaggattaccggcgtgcgccactgcacccggcctataactatcataattcagaaaagtgcccatggaatttgatgactgataactggtaaacataccaagcgcagttttagaggggcttatgatggcaatatcccaattgctacgaattgaagaagcctgtgagagaatgcttgtaaagtgtaatgacaggtgaagaggagttgctggaatttaaagagttactttatagaaagcaaagttatctactgagagggaagcgtgtgggcttaaaaagtgcatgtggagagggaaaggcttgtaatagctgtgctgagagagaaatctttgaatgccgcttcctgtcaagttcctgctcagtattcttctcagtttcatgataaacttcttgaaaaattcctttgcgtttactttctctcttccccacttcactccttaaaaccactttaatcgtagtttggcatttgtctctatatatcaatgacttttagaaaaaatcaccagtgatttttgtgtttcaaacctaatgtacattgtgtcacttgatattatttgttcaaaagaataaatgttctgttctggatattctttttttttttaaatggagtctcactcactctgttgcctaggctggagtgcagtggtatgatctcagctcactgcaacctccacctcccgggttcaagggattctcctgcctcagccttccgaacagctggggttacaggtgcgtgccgccatgcctggctaatttttgtatttttagtagagacggggtttcaccttcctggccaggctggtctcaaacacttgaccttaagtgatcgcctgccttggcctcccaaagtgctgggattacaggcataagccactgcgccctgccagttctggatattcttaacatactctatgcttttgtctaaattatttgattctgatttccaacagtgaaatgggaatgatggagagttaatacaatgagattgtaaggcacatggagcgtctctgacataaatagttataatcatatcattttcccaatagaatggtttgcagggattaaatgagataatggctataaaatttttcttaatacatagctgtaaatagcaatgattatttacattttagtttgaaaatcagcaaactaaaatttaacagctgaagaaagagttcagctactttgggtgctcaggtagaaaaatacttggtgattatgaaacgatatgtctggaatctgtttcaaactaatcgggggcggggggtggggaggggagggtgttggggtggtaagggtgggttggggctgccgtggtgggaaattggccacgttattgatgctgagtgtttgctattctaattttgtatccgtttgaaaattttataattaaaaattatgatttgtttcgctctacgcaactatgttgacagaatatatttggtaaactgaaatgtcacggaaacttagtttgtaaccggtcagtggctttttgaggtgtagacacttcataccttacttcactccccactgtaaggaagatttaacttgaagcggagataatgatttgaatttacggcttttataatgtcataaatgggcgtcattttaataactactctcagaatatctttttctattccactttactttttcctctccacttaaccaactcatcattagaaactacaagtcccaggatgcactacacgatgaacgtcggatcgaggacctcgtgtctctgaagtggttgccctcgccttatttgaatgggaataatcccaatgaaaattgatgtttgtgacccagagcagattctggagccttttgtacgcctgggacggcccagcgtggaggggacagtgtggtgcctttttgttcaggcttcgctcaggtcagcctcaccctttcccggggcctccatgcggcagaagggctctgttagtgcgcctctaagatggcgacgcctttggcggtaaattcgggtaagtgtggccagacagaaagacgattgagctgagcgataaccaggtcttcatggagagacgagaccgtgaggtttctcggagtctaggaccccacttatgtgcggtgcctgcttttccctaattctgggcctagagtcccacccctccccagtttgaatggcgcgcgtcggtgctgcggctccagccctcgagttggggtttgagattccaggcagtgaggcttgggccgctggacccaggtgtgtaatctctcacagcccagggctgagtctggtccccctcacccccaagtttcactgtgcgtctgtggtcccgatttcgctggaatacgcatcaggtcttccacagtgaagccagaggacccgagatattttccagccatgagcagaggctgaaagtaggcgtcggagttccttatagggtgggagatcttgcaggcagcgaatactccctattatgaagtcggccatctgaaaggtggtcaggaagagggtggcggggcttcagcagacgtcttctaaccctgcggatgtggttaggccctggatgttcttgtacctttggagctgtagattttcggggtggaattgaatctagaaggtagtaaaggaactctggaagatttggggtggatcctctttcggtgattctcaattcgggccgtaccgccctccagtggtgtttgaatgagtgagtgcattttgattgtcatatttcctggggtacactgctgtcgcatagtaggcggggcaaggatgcagaaagtccttcatggtcagagcagtccggaaaaataatttggtgcctagaatgttaatgcctcgattgagatgctctgaagttcgcgggcaagattaagagtatatctgtgtggtaaatgcttgtgagaatctcacttaaaaggactcttttttaaagtattggttctattttccacaggactgatattcttgaaaagttgtct

SEQ ID NO: 11678 - DNA, 6000 bp, Homo sapiens; identical to SEQ ID NO: 2468

SEQ ID NO: 11679 - DNA, 6000 bp, Homo sapiens; identical to SEQ ID NO: 2470

SEQ ID NO: 11680 - DNA, 6000 bp, Homo sapiens; identical to SEQ ID NO: 2469

SEQ ID NO: 11681 - DNA, 6000 bp, Homo sapiens
ctagctacattgtttggattcaaaacacaagtgacttctgctttaccaataatgtccagaatgtaaatttgaaaagaatcatgataattccagaaacaacataccaacacctttttaaatagaaaaaaaattacttcaaactattgtacaattaggacatattcatcataaaaatatataaacaataaaaaaggaagaaaatgaaaatcactgccactgccttccagagttttctctgggcacatgcatacacatatacaaacacgtatttttcacaaaaaataagcctgacatttaatgtttccagagacctaaacaacatcacgaacaatgtctgaagtttttattttttattttatttatttatattttttgagacagtcttgctcttgtcacccaggctggagtgcatggcgcgatctcagctcactgcagcctccacctcctgagttcaagcgattcttttgtctcagcctcctgagtagctgggattacaggtgcccgccacgacacttggctaatttttgtatgtttaatagaaatgggggtttcaccatgttggccaggctggtcttgaactcctgacctcaggtgatctgccggcctcagccacccaaagtgctgggattacaggcatgagccactgggcccagccaatctctggagtttttaaagaacagggaaagaattctgtgattgctatttgaacaattctctgataatcctgctaattttatttacgtagctattttgaggttaattcgtagtgagcattaaagttgtaagcgtccactttgatgctgaatttgatgtgttcatcagggtatgttttgcctgatggtttgagagaaggcaagcctgaaaaccaaaggaaaaggaagaataaagtgatcttaaaacaatcttgaatagatattaagaagcagcaaagataagtcattcacaaaaacttggttaaactaaaaagtggtcaaatcagcctggtttgtctgatagtgctaaagctggggcagtctgggataaactgggatgactggccatcctagacagagcctggggtgttgcggaatacatgctatatgcaccttattactgcctaaacctgaaacgttcttcattctgaaacccatgtctccaagggacctggatgtacacaggctatctctggaaggagacaaaggccccagccacagcctctggggaaggaaactggtggctggaaagcagggataggagagagagttttcactgcatatccttttgcctcttttgactgtaaaccatgtgaatgaccagctactcaaacaacaaatacaggccaggcgcagtggcccatgcctgtaatcccagcactttgggaggctgaagcaggtggatcacctgagttcaggagtttgagaccagcctggccaaactggtgaaaccctgtctctactaaaaatacaaaaattagctgggcatggtgccaggcacctgtaatcccagctacttgggcggctgaggcaggagaatcacttgaacctgggaggcggaggttgcagtgagcccagatcgcaccattgcactccagcctggatgacagagtgagactccgtctcaacaacaacaacaacaacaacaacacaaaaaacaaaaaacaatacagaaattattggggaaaataagtggtaagcattcatttggtgtctttatgcatctagtaccattaagtttcctggctatttatcatataagatctttggtttccagtatcactttaagttgctcccctacctttttgggcaggtatataatattactatgagattaattgctcctcccaccaaatacgtaaccccagtgtgatggtatttggagatgggcctttgggagaaaattgggtttagatgaggtcatgaggatagggcccttatgatagaattagtgtctttataagaagaggccagtgcaatggctcatgcctgtaatcccagcaatttgggaggctgagacaggaggatcatttgaggccaggaatttgagaccagcctgggtaacatggcaagaccctgtctcagcaaaaagtaaaataaaaaattacttgggtgtggtggcacgtgcctatagtcctggttactcaggaggctgaggtgggggaatcacttgagcccaggattcgaggctgcagtgagctatgatagttctgctgcactccagcttgggcaacagtgagaccctacagtagcctgagctgagacaaacattatttctatacatatcacttcacctcccatgacagtgaggaatagtgttagccgacgcagctctttggagacatgctactttaagagtttccaaagtgggatacgttagactggacaatggtccaggcagaggaggggaccctcctcataaagtgaagggacaatgagtcataggaaaatgacatttgcaacaatgcttactaagtgccagtcaccgtgctaagcacatggtatctgaaaagttgggaaaaaggataaacagacttttaaattgcatgtcatttaacttttcaaatagtatgttcaattgaaaaaaatttttttttgagatggagtttcgctcttgtcacccaggctggagtgcaatggcgagatcgcagctcactgcaacctctgtctccaggtttcaggcaattctcccgcctcagcctcccaagtagctgggattacaggcatgcaccaccaagtccggctaatttttgcatttttagtagagacggggtttcaccatattggccaggctggtcttgaactcctgacctcaagtgatccactcccgctcggcctcccaaagtgctgggattataggtgtcagccaccgcacccagccaatatgttcaacttttttaaccccaggacatcttttcaggtgaaatatctctaaatttgaagtaattaatccatttgttaatgtgaaaaaaagcttacttcagattaaatatatatatttttcctatatttccagaatttttggacactttttagtgtatttattatactttttaaagattaaaatcggattcattgctttattttattttattttatttttaagacagggttttgctctgtcacccaggttggagtgcagtggcatgatcactgctcactgcagcctcagcttccagggctcatgtgattctccctgctcagcctcccaagtagctgggaccacaggtgtgggctgccatacctggctaattgtttgtatttttatctttttggtagagacaagattttgctatgttgcctggggtggtctccaactcctgggctcaagcagttggccttccttggcctcccaaagtgctgggattacaggtgtgagccaccgtgcctggcctggactcattgtcttaaatagggggttgtccaagggttgaagaaaaagatactgaccatattatttgaaaagctgactaatacactgtttaaaaataagtttacccagtgtttcccaacttttcaaacttctttttttttttttggtttttctctccctgttttgttttgtaacctaaggaagcagaggctctgagaccacacacagcagcgtcgcccgtccctagaggcacgccggcagggaccagcaggagaggagacccccgttcctgcgtgcgcagttgtcgccccgccacggtgctctccgcaggggtgaggcaggagggtgggtggaggcgccagcctgtcctcagctggaagggcggggcgtggacagggacggtgggcaggtcaccagcgggacgcggggagcctggccactgttacacggcggtgcgcgtgggtgtgccgggctggttcagccccagggttttacacaactagcaggcaaaatccgcttctttcacctcggaccgcttgatgaaggcgtggtttgtgagcatctttaggtccgcccgctccgttgggtttttgatgaggcatttattgacaaactcctggaagtcgggggtgaacacaccgttgggcagcttaggaggcggctctttcacaatatagtccagcagttcgaagatggccatggcgggcaggctgtccatcccgtaaccgctgttggggcgcccgggggaccctggccaagaggagatgctgtgaggctctccttcttccctgtcgaccacgggctggccaaagatggcctccagctccttggcgtcgggcggggggatggggtacctttcgatggccagctccaccagggacaggtccatgctccagatgaccgactgcaccgagtaatgtgtgccctgcaaccgctccggagccatgtaggagcgcgtgcccacgaaggagttggccatggagtcgatgagctggccgctcaccccgaagtcacacagcttgatctcccctctagagttcacgaggatgttggagggcttcacatttcggtgcatgatctggtgcttctctcggaggtacgccaagccccggagaaccgcaatgctgactttccccaggatgtcctcgggaatcctcttggcctctttcagcccctggtccagggagccgccatccatgtgctccatgcagatgctgatctccctgtcacagtagaaggccccgtagaagcccacgatgtacggtgagttgcactcgtgcaggacctggtgctcgcggatgatctggttccggatggccggcttgatctcaaggtggatcagcttcctggccatgatgaggcccgagggtctgtgctggactttggtgaccaccccgccgttgcccgcgtccagctctgaggtcctttcgaagtcatcgtctttgagttcgccgaccttggctttctgggtgagaaaggcttccagccgcttctgctgctcgtcaagttccagctcctccagcttcttctgcaggtccaccaggtttgcctcggaggcgccctcgctggttggggacgggccctcggcgatggtagggttgatggtgagcgccggcagcatcggcttcctccgggccagcatccgggctccgcgggccggtggcggcggcgcctctagcctgggcccgtagtgggcgggccgggagcgttcggcgcctacgcgagcccggggctgcgaccgcggcccaggccggcgtcggggcggccgagggcgggcggcgctgcgggcctggtccgagggtagccgaggggcgctggggctgaggcgagcgagccgccgccgctgccgaggcccgagggaggctgacgctgcagccggagtccaagagcttttcaaacttcttatattttaaatgtgttaattcatttaatccttaaaacgatgacatgaggtaggtactattattatccgcacttcacaaatgaggaaactgaggcaaacagaggtcacctagcttgcccaaggttaaacagacagccacatccagaaagctatagagtctggctttaaacccagatagaccagctctaggtctgtgatcataaccactgaactttactgcttcttacagcaagagtgtatctgacgaagtcgtgacttggaactggccaagtctaggaaggatccagagtttaattctgaagaagggaaaggaggctgatattaaacatgcaatatttccaggctgtgctcagatcttcatgtagctcatttatgattacagaatacattgctaaagaaaaatggtaaagaaacgatactcgtattttgagcaaatccccctcctcagactccatttctaattactgccattttctgaaagagttgtaagcaataaattctaactctgttagaagagaagaaaatgtactgctcaggaagagtcctgcaaaacagaaaaacttcaagacaagcttaagcagtggttgcagatttattgcacattacattatttggatggacaggtgaattttctttgtcccataatgtcttaaaatttttgaatttgagctgggcacggtggctcatgtctgtaatcccagcattttgggaggccaagatgggagaatcacttgagcccaggagttcaagac

SEQ ID NO: 11682 - DNA, 6000 bp, Homo sapiens
ggaacgtatgccctggagataaatggtactgttgtattcagacgcatcccctgttaaaaattaaaaacaattgattagactaatttttttaagcctaatgacatttatccattatctcttactttgttgggctaaacaaatctcccttctcttaactttttgttctttaccttaaatagggtaatcatattttcgttcagacttctctagtctttccaaactcatgtttattatttgaaggctataatataaaaccatgctcctagattcatattaaatggctattttttccacatttcttctgtgccaggttttgtgttagacattttcatatatttttgttcctctgtgaggtaggtaagcgtggtcatgttttgtagatgaagaaactgactaggagagtttcagaaagtataactgacttgaacaacacagaagttagggagctgacccctgtacagttgaaaattcacatataacttctcactcccctaaaacttaactactaatagcctactgtcaactggaagccttatcaataacataaacagttgattaacacatattttgtaggttttatatatatatatatatatatatatatatatatatatatatatatataatatactctattcttaagtaagctagagaaaagaagatgttattaagaaaattgtaaggaagagaaaatatatttattcttcattgagtggaaatggatcatcataagacatgtcttcatctccattgtcttcatagtgagtaggctgagaaggaggaataagaggaagggttggtcttgctgtctcaggggtggcagatgtggaagaaaatccaagtataagtgcaccctcacagttcaaacctgtgttgttcaagggtcaactgtatatccaagttcatacatatcgtaaatggtagaactaagatgcaatttcagatccaaattcagattttcaaattcagtttccaagtcatatgatgacactatttagaaaatcaaaattagtttccagcttttacaaatcaagctgctagtagtaattctaataccattatatgattattaataatgccaccacattgatggctcagctgaggactagaaaataagtctttaacaaaatttcctatttgtattttatttttcttgcaatgatgcacagctgagaacagaaaataagtcttaacactctcccaaagatggcaagatgcacagtcaccatgtctaatgattccacatctgatgctctcaaggccctagcattattcacaaaatgacttaattacaaataacattgtactgattatctgttatataacaaattatcccaaaacttagttaaaacaacaaacatttattatctcatagttcttgtgggtgcctctggtttgatgtctctcctaaagtttgcattcaggttgtaggacagggctgcagcctcatctgcctgtgagaggatttgcttctaagctcacccatgtcattgttgatggaattctcatctgtttggctgaggccctcattcagttgcttgttggttatgagcatcagttccttgttacatggaccttcctatggagaagtacacattatggtagctggcttccaccaaagcaaacaagagagtgagagcagccagaaagacagaagtcatagttttttgaaaacctaatcatagaagtcacatctcatcatgttagtatgttatactaattagaagttaatcactaagttcttcccacactgaagaaaaggggattgctacaaggatgtgaatatcatgagaaggggatcattaggagccatcttagcgactgcctaccacaaatattagccaatctctttttaatgaaagaatattttttctacatttcctaaatacttaatttaaccacttattccacaatacccataagatagaaatggttcttctttcataagtcttgccaagtcatcaggcaagttgctgctctggcacatgtatgctggattgagacgagcagatagagggaagagaggacaaggcaagttttctcagtgctattgccatctaaactgagactggaaggaaaagtaggtgattagccaaggaagaggatgagggaagagtgttataagcaaagggaataacaggtacatactaatgcctgaagatgagaaagaatcaatttcaatattaaacatctatatccattcttcttgggttattacagtttgtggttatccttcacttgatctgagccaaaaggccgagaagcaatagtttgtggttatttttaatggagctgttttaaactgatcagaataactgttaagtattaaatttatgattatttctattttagcaaagtagttttctttctttttatttattcatttattttgagacagggtcgcactcttgcccaggctagagtgttgcggtggtatcatggctcactgcagcctcaacaccccaggctcaagcgttcttcctgcctcagcctcccgagtagctgggactacaggcatgaatcaccatgctcagctagtttttattttacttttgcagagacaaggtcttactatgttgtccaggctgatctcgaattcctgcgctcaagtgatcctcctgtcttggcctcttagagtgcacgattacaggcagaagccactgcacccagcctcaaaatagttctctaggggtctgtcgggtaaattgggcctaagaactctgagtttgtcctgtccacatgcacaacgacattgccttctcttctaattttgcttctgcctgaggtgatatcctaaggctgagccttcagaatactaggtgcagcagatttaataactgtgcgtgaatttggtcaacctcattagcccaacccgataattaaattccaattaaaatatctcctgcttctgacacagaaaaagaaaaagtagtgaggaacagattagattattttgaccttttaatttcctttaggcattgggtctgtaggtcaatgattaatattaacatgctttgtgtaattaacatcaagtcccctgataagtagggcaggaaattcttcatagttagtattttagaaggatgcctgtaatctccatttgcacaaaataaactgacatatgattttccaggaaggatgttagaataaatgactatccaatcgtaggatagagatatattgttagtaggaagtatacgtccattaaactgattgtctgactctggtttttaaactttttattatgtagaatttggaacatacacaagaataaacagaatataatactttaccatcctactgtaacaaccatcaacttataattaatcttttgccactcacacctctaacctcctcatattatttttgaagcttattctagcttattccatataatgtaaaagatgatataaaatcatttcatctaaggatattccagtatatacttctaatagagaagcagtcattgttttaaaacaaaactacggtaccatttctgtcctaaaaaagaacaataatttcttggtattataatatttttcctttatacttatttttactttcttttatagtgagatagatgaatagataattagtggttaaattgggggtgattttaccctgtaggggtcatttggcaatgtttggagttatttttgttaccaactaggggggtgctactggcgtctagtcgttagaagccagggatgctgataaacacacaggatggtcccccaataataaagaactgtctcttccaaaatgccagtagcgctgctatggagaaattcaggtaggcagacatataggcaaatggcagttacaagggacaaaagcttatacagaaaagagatacaaaattaggtgatttaggtaaccacacaaaggacaaaaatggatttataattgaaaagatgattcagaatagttattccaattgagatgtcccatgatgaaatagaattttatgattgttttaaagggatcatcagtggcctataattaattaatggaacacgtgttctgggtgccggtaaagtaattcagaaaaataggtttcttacttgggcagcagagtcaaaggaagtaatgagcaaaatatttagtaaatacgagtagaatctgtgttctgaaaaaatctagaaaaaattattttgaatccgctaaaaagtctgtcacaaatggctttatgtaaaacaatgctatggatattaatgcttgtgacacatttttaagacaaaaatgagtattacttactttaatgtagacagaactatgctcattattctccacacaaaacccctggcaataatttacctagcagcacagtagttcttgtagatcaaagctgcattatttaagcatgtccagggggcaggttttagctctgtgccttttactttaaggaaaaaaaaatattggtttgcttcttgagagaaagcaatgtttagctaactaggtgcttcatgcaagtcctgcaatatttaaactcacatgaattcctcctgttatctgggaagaactccctttctgacccaaatactctaaaatctgaggaaagtacagaacaactgtgggaaagccagtctcttcaaatgaacagcgatgtattttcgtttaaattaaacccgaatgttaactagattcaggaaaggaaatggcagaggagagtctgtcgttgatatagaatacgcctgcctgcgtcggctcacagacaagtgatgaagtccaactctgaaatttcaggcaatttgtataccaagctcctccttttctgcagtcttcttttccattggtaaaattcttttgcagggtcatgtagggatcccaccccttctctgtgttttcactctgaagctctacacaactttacacctgaatgaacgccaaacctctatggatatataaagggaagcttgaggaggaatttcacagttacagtgcagaagcagaagcaaaagaattaaccagctcttcagtcaagcaaatcctctactcaccatgcttcctcctgccattcatttctatctccttccccttgcatgcatcctaatgaaaagctgtttggcttttaaaaatgatgccacagaaatcctttattcacatgtggttaaacctgttccagcacaccccagcagcaacagcacgttgaatcaagccagaaatggaggcaggcatttcagtaacactggactggatcggaacagtaagtgtgttttacttgtacagtttttttttttcttttctggtagcattagctcacattcctgtagaattgttttattggtaactaacctgaaccgtatatatgttgtgaaacaatttgggagtaatctgctgcatgtgcaggttggcattcttccctaggtagtgattttaaagttaacctaactaaaacagtggtttaatagtgcaagcacagactgaagttttatcaaacatccacaaagaaaacatttccaggaattaaactattgttttgtcaaaatcatgcaaaatgaccattttaaaaagtattgttttagatagctcaagttccggttgttttgtcaatttatttcagggcatatgcaattttggtaaagtgtataaacgtaactaatatatattattagttaccatccacaaataaatatagggaatcacaagggaaaaaaggaagcttccaggagaaaaaatttgtttacattggatttctaaaatatgtctagtgagatagtcaaaagttttgatgatgctcaatgtaaaagagggataaactaaaaatgttggagaatcacatttttctaaaataattccttgttgtcccattcaaaatttagataattgtgtatttctgtgacagactggggacatttttgtaacttaagagatgtaaaacaacagcttagttgacacactaattgaccactggttagggggattcaaattacccctaacttttgtttctatcttttcctttagaagaggccatatgctaataatcaggttttaagagag

SEQ ID NO: 11683 - DNA, 6000 bp, Homo sapiens
tattcttttaaaatacaaaaagtatttcttagaaaatacatattctgcgtgcctctctagcagatgtctctagaaagaaatgagatagcgcagaagacacgccctagactgcagggggctccatgagcccagagcctgactcagcagcgtgagaacaggggcgaacctgggcatggggcactctgcagcttgatcccgccctggatgggtcccttctttacctgccaccgcctcgctgggtgttactgagtcccccgccagcaggccgccctcggtgggcgcagcgcccctcccagtcccggaccatgctatccccaagagaccctcctcgcgaaagatctctctgggagaagggaggagctgcaaggggccggaaagagttacagggcgcaggcctctgcgacctcgccctccccatgcccgcgcggctccctactcccgccccgcgggccgatgacctgtacctcttgcaggggatcagcgccttcctctcgtccagcacccgcacgcgctggttgagcccgtcgtaggagagcagggcgcggctgttgcgcccgctactttgctggtacataacctggcgcccctcccactgctgcggcgcctggcacgggcgcggggctcccaccgcccccaggctgcacaggccgcacagggtccaggcccagaggccgcccagcagccaggcacccagggcgcccgggacggtgcggaggggagcgcgtcctggcatcgcggtcagccttccccggcccgagggcaagcccaagcccaagggggcgctgaggcgtccgggatcagagtggctcccgccggctctttccgcactgtgccgggagtgtggtctggaccaaagtgcttcctgtcccttcggtggcctctgccgcttttgagatccggacgcgcgagtcccggtagccgggaccagggcccggggaaggctccagtgaatcgcgcgggagctatttctgcctgggccactgcctgctgccactgcctgctgccactgccttctgccgcttcggttttcactgctcactgctgccaacaggaaatgcagtggcagtggtgccactagcatcctgggaggcatcgtgttttaagaggggggatggggggagactgtgctgagaagtgtgtttctccactaacttcagtgttcaacaggtaatcacacagggaggggcaagttcaaggtcaagataggaaaagcagagctgctgcgtttgctgtgcaaacgtttgccccgcctacattgcccctcgacaaaattgcaaacttcttcctccaaattaaaagtggaaagacgagtcttttcctgaagaaatgatactagctattcatcatggccgctcctcagctcccattcccagtgaagagtctaggagactagtagacagccccttgcattgggcctaggactcatggacatagcctcaaggtcacattgcagtgagactgctcctcccatcgcctggcaataccaccagccgagtggtttgggtgtctggggggtttcgcttcttcaagaataaggttaattgggtttatagttatgtaatgttaggatctataatatggaatgagcgaggctcacacacctgtagtcccagctactcctgaggctgaagtgggaggatcgcttgagcccaggagttagaggttgcagtgagctatgatcatgccactgcactccatccagcctgggtgacatggcgagaccctgtctctaaaaatatagtgataaagtatgaaatcaagaaaaaagaaaggaactaaaaaaatgtatagcgtctttccatttgaactgcatttcaaggatgattaagattgagccaggtgaaagtgggagataacattcctgaatgaagggcataaggacaagaaaagaataatgctggggttcaaggacaaggtagaggagtactctgaagccatagcactcattttaaggaatttgtcattgatattgaggactgtgggaactatcaatcaatgtaaagctagggaggagcatcatcaggcatatgctttagaaagcccacttagacaacagaaagggtagggccagagggaaggcagggagaggaggaagctactgttatcatcctggaaagagatgatcctgactcagctaaggcagcgggagtggtcatggaaagggtggaagacaggtgggagctgtagagaagcatttcaactcagagagagaggtttctggtttgggccactgggaatccagtcctgagtgaggagagatgatcaattcattttaggattggttgatcttgagctgactgtggagtattaaggtggaaatatccaagggacagctggataaatacttctggaaaccagcagagcttttggattaggaagccataggtacataggtggtaaatgaagccgaagagtagaacagtggttcctggggaaatttcacatccccctccccagcaaagaaacatttggcaatatctggagacatttttgatgatcacaatgtagatggggaggaggctaccgctgacattttgtgggtagaggccaaggatgctactaaacttcctacaatgtgcagtacagccacctcccctctcccaaatgaagagaaaattatctggccccaaatgtcctaagtgttgggggtgagaaaacctggagttcaggggagtgttgagtgtgagaagaaggattaggatggagccccagagagctccagacatttaaaggatgggcaaagaacaggcacttgaggagaccaaaaggagtcaccagagagaagccactgaatgaggcaacttcccgagccttgttaaataaatgtaaggcatggaaagaatggactgaatgctgaagtagggtgttctagaatcacagcctccctggaagtcccgaagaggagggacagttgacaggttttcctgatgcatccttctctgctgccccctgtctgtcgaaccaccagagacactaccaatgggccgaatggggcaggcacaaagctttaggaagaagggctcttcatttcctcttaccttttcttaaagggcatgcctcagagaacatcagggaagcccataagactttgtgacttggtacttacatagttaaacagatgcagcaggttcaaactggctgcagaaatttgagccctctccgagtttgccctgctcagattcataggaaaagtgtagggtagttcagctctttctcttgctccccaggtaggaactccagctgaaaatctttttcacccagtgaagggtttagactcattggagtttactgctagaaatggcttgagatgtcatctgggctttcctcctcatgtgatattttactagcctggcttggcatctttggaggtggagactggttctataggaactagattacctttctagagtggcttggcagtgtaagaacaccctgggcttcccctaaataagaaccagactctttggatgaatcctgaaatgtatttgtctcatttatccttttcacttactatgtttaattcatgttccctaaaaaataagataatgcatttaaagttcttagcttcataccttgaccattgtaaattcccaatagatgtcacttgtgcttgttgtttcctcagctgttttaatccttagtctttagttttaatcctcagtcaaaactaaactaattgtgtaggtttaagctttggagagaaaaaccatgtgccttaaattcaagttaaactatgtttttaaagattaacattcagagaacatgtttccatattgctgatgccctaataaatagcatataccagaagtcttaccacctgaagattgatatacatcaatctcatataaataaatcctcccttttctgtagatagctgagccagcaattggactaccttttcctaatgcaagtaagataaaagagaaagcaaaacatacatacttgcatcccatagtacacagcttcttactcaactcaagcaacagtctctgagcacatcaaaaatcaagattttaggctgctgaggtggaaatcctttggcatgaaggatcagagcaggggagacctttcagattgtggtgcccaatgttttctcctgggttccactaatgctgcagaggggaacagggagttagaaggaagaggaaatgttagaagacatttctgaagctggaagatgctagcacaccttcccccagttctgttaacttcctggagcagaaacaaaccaagtgttatactggaaaaatttcggcccaaactgtctactagcaacaacaacaacaaaccacactccacacaactaagggcggagtgggagtgatttatacaacgtgaccctcctgttctgacattcactgcactctcgcctgccttgcaggacattgtcccaactgtcctcagcgctcctcatgccccctaccggagaaagcaaatatatttcagaattagagggcagcagaagctcctattttcccccaactctatacttggaaaaactctaaggcagagggagcaaagttcagttttcagccaaagagtgtctttctctctcttgaaattctctcccgcaccctcttgtatccggtgtcgaaaacaactgccagaggttctttttcttggtccgaagaaaaaagactggccagactaaaaaggagggactttagggggaaagcaggcttccagccctgggctgcggcccagagggggtgatgtcaccgcttctgcaccgacgggcctgggggtggggcggccgagggggagcccgcgccgcggctgcagctgccaagggagcgttccgagcccacgtcaggggaggtgtcgggataaatagggtcccgcaatggccgtggctggctgcgctccgagctgcggagtccgggactggagctgcccgggcgggttcgcgccccgaaggctgagagctggcgctgctcgtgccctgtgtgccagacggcggagctccgcggccggaccccgcggccccgctttgctgccgactggagtttgggggaagaaactctcctgcgccccagaggatttcttcctcggcgaagggacagcgaaagatgagggtggcaggaagagaagggcgctttctgtctgccggggtcgcagcgcgagagggcagtgccatgttcctctccatcctagtggcgctgtgcctgtggctgcacctggcgctgggcgtgcgcggcgcgccctgcgaggcggtgcgcatccctatgtgccggcacatgccctggaacatcacgcggatgcccaaccacctgcaccacagcacgcaggagaacgccatcctggccatcgagcagtacgaggagctggtggacgtgaactgcagcgccgtgctgcgcttcttcctctgtgccatgtacgcgcccatttgcaccctggagttcctgcacgaccctatcaagccgtgcaagtcggtgtgccaacgcgcgcgcgacgactgcgagcccctcatgaagatgtacaaccacagctggcccgaaagcctggcctgcgacgagctgcctgtctatgaccgtggcgtgtgcatctcgcctgaagccatcgtcacggacctcccggagggtgaggccgtaggaaggatggagggaggcgaggaggcgcccggggctgtggctgccaatcgagaactgggcggccacacctaaggctgccaggggcgtctgaggcttgtaggaggtgggaaagaatgggggaaacattttcttcagaaaaagtctggtttctcccataggaattttaggagctagcggagagcactgcaccccataaagaaaaaaaaaaagattttgcttacaaagggagccttcgatgatgtttgcatttatagtaataacagaaatgataatagcagtaaacaggtgttgctaggtgtctgagcaagtgttaaacacattacacgttattgactcatttaatgcccaaaataatctcaccaagcaggtgccaatactcgttccatttagcgctacttcttaaaaagtt

SEQ ID NO: 11684 - DNA, 6000 bp, Homo sapiens
cttccctcttgtcacaccttgcagcttaagtaatcaccatatcaagattcttcctctgaagttcctaaatacctctctatctccatgcccaccgccaacactttactccaggctaccatcactcctcaccacgattattacaatcttttcttatttctgttctagccaccttccctgcccaagccatttcatgtcaaactagactttttttttttttaagactaaggaacaaagaaacatgtcacttaagacatttgctaagcacccactatgtatcaggtaatggcatgaggtcacaaagatgggttaaacactgtttagcttcatttcttactcctacccaatgtcaactctatccttcagctactttcagtcttcagaaggtaattttttcccttgcctccaggctttcatactgttgcctctgcctacaatactaaaccctttgcctaattgcttcctatttatctatcagtctggtctcagtttagacataatttctccagatggtgttaccaatctctctactctgggttaggtatcacctctatttttttttcttttttctccaactgttagctaaatatccatgtggtgttttaataattcctaaccatagaacttttaaaaataagttttattgaaatatagttcacattgccataaaactcatccttttaaaacatataaaaaacatatgccagtggtttttaatatattcatgaggtttttctgaacatcgtcaataattccagagcatttatttccatcaatacaaaaaaaaacaaaacccaaaacaaaaaaccaaccctggaaatgaccaatctactgtctatatttagaattttgcctactctgaacattttatgtaaatagaatcgcgtaattaatgtgccttttgtgtctggccactttcacttagcataatttttcaagtttatctatattgtagcatctatctgtacttcattccttttaagggtcaaataacctttcattgtatggatatagcacactttgtttatccatgcatcaaatgacggatattggggctgtttctgccgtctattatgaataatgctgctatgaatatgcacgtgcaagtgcttgtatgcacacacgttatcatttctcttgagtatatacctaagtgtagaactgctggttcatatgataattctatgtttaacatttttttgaagagctgccaaactttttcaacatggccgcaccatgatacaatcccatgaatagtgcatgagagttctgatttgtccacattctcaccagcatttatcattttttaaattttagtttttctagtgggtgtgaagttgtatctcattgcagttttgatttgtatttccctgagggctaatgatgagcatcttttcatgtgcatttgtatatcttcttggaagaaatgtctattcaaattcactgcccatttaaaaaactgaattatctgaggccagacatggtggcttacgcctgtaattccagcactttgaaaggctgaggcgggtggatcacttgaggtcaggagttcgagaccaacctggccaacgtggtgaagccctgtttctactaaaaatacaaaaatcagccaggcatggttgtgggcacctgtaatcccaactacgtgggaggatgaggtacaagaatcgcttgaacccaggaggtggaggtttcagtgagctgagattgtgccattgtactctagcctgggcaacagagcaagactccaactcaaaacaaaaaaacaaaacacacacacacacacacacacacacaaaacaaacccaaaaactgagttgtcttttcattgttgaattgtaagagttctttatatactctggatactaatcagttatcagatatgttatttgcacattcccttccatgttgtggactgttacttcactttcttgatagtgtcctttgatacacacaaaaaaatttgttttgagatatggtctcactgtttcccaggctggagtgcagtggcacaatctctgctcactgcaacccccacctcctgggctaaagcaatactcccacctcagcctcctgagtagctgggattagaagcacccaccaccatgccctgctaatttttttgcatttttttttgtagagatggagtctcatttcattacccaggatggtcttgaactcctggcctcaaaggtaatcctcttgcctcggcctcccaaaatgccgggattacacagttgtgagccaccaagcccagcactaaatttttttttaatgaatgaatggattaggtaaccaaaatatcaagtttcttttttctgtctaaaattgtatcaactctgtgcagtaacattgttttcatcatgttgttggcagttaaaaattccttgactaacaattcagaagcaaacgaatgcacaagatgatagggattgtgtgatttaacaggttttggagcaacactgatctggattcaaatcctaactttaagaactgtatccttgggcaaattacattactatttttctttctttaaaatgcgtttttttgtttgttttttaagtgccaggggtttatttccctcacatgtgggatggctcacatacacaacacacaaaggcgttggcaccgtgggagagggcagcacccctggcttctgcttggcctcacagtgtaagaagggagaggatgggttctctctcctcccctcactagggcctaggggacccaggagcaaattccatccctttcacctctcagccaaggagaagccacattggtgacatttagttccaacaattacagtaagtggagaagggattggtctggtcccgaccattacacggtgaaggtatacatagtaaaggaagatacagtttggatgaggccacaatagggtgcagatgacaccatcagaagcatgtgcaggggaggggcagtcactcagcttctgggctgcttagttcctgggttggcaggaagggtagggaagacggatggggctcattgtttggcattgatgatgtctacgaattcgggcttgagggaaacaccactcatgaggaaggcagccacgtcaggctggctggccagctccttgcaggttgccttggtcacagagcctccataaatgataccagtgctctgagccactgcatcagagatgttggacttaagccatcctcggagcttcttgtgtacctcctgggcctgttggggtgttgcagtcttgccagtaccagtggcccacacgggatcataggccaagatgaccttgctccagtccttcacattatctgcgatgacctttgtctgctcaaaaacaaccttctcagtgatgccagcttccctttcatctagcttctccccaatgcaggcgattactccgagtctctctgccagagcatgggccacttttctgcccaatcagctcatctgactccccaaagacacgccttctgagtgccccaggaccacaccacccacgtgactcctaagtctttgaccatgccagggctgatctccccagtaaaggccccattagtcactttgtagcagttctgcggagccacagcaatcttgggagctagcttctgccgggccaactcgttatacgcagtggcgagagcacaaatcaccttggtgtcggcaggcacagtggccgcgttctgagtgccgatgagctcccccagacatttcttccgcccgttcatcttccagttcctccccacgaagaacttcctggagggcgccatggcgctggagctgaggcgctgtaggtcagtgtcagcgcctaaaacgggttttattaatacttggcaaggttgttaggcggattaaatgagatcttgtaactacagtgttttacacattgtgatcatttatcaaatagcagttatttactagtgcaaaggactagcagcaatgttaatatcaatatactgttaccttttgtccctaatttctccatagtacagtttccaatatttctgttttcttttgtgaattgttagaccactggtattggattcggacagaaaggcattcacaaaaatacagttcaatgtgagaataaccctaaagatgtatgcaaaatgctctggagttagagcaccaggagctgtaagcagaatgaagacctcttttgggcttaagaactaagtaaaggggagctgaacaaagattctaggcattttggatttatctcaatgtggcacatatttcaggtttgtaaaatagttcagttgactacgtgtctgtctcctccactagagccagcgtaggtaccatgtcttaagtcatctttggatctccagtactgtggccactctagggagagttgaattgacgcgccttgatcaccagggcagaaaaggattctctggagagggatggggcagtcggaaggggtaggaaaaacctggatccgtttccaaggagctgaaggcagctcagatatggggcacatctcggcgctaatgtcccaagctgctagcgaggaacagagagaacaccggctcttcttcccggctcctggcccggcagggttacttccgggagggggcggggagacaagaggaggcgtgccgggaaggaggccgtttgtagtgtaccaggcggaagtgtgccaaaggtatcggtgctgtcgcttccggtccgggtaaacgaaccttaggtacactggtgtgtggcctcccaagataggcttctgagggcaagtcagcgactgaagacgggagcgccagaatctgtggactcaagagtctagaatcaagtggaaaaaccggaaaaaaggccaggaacctgaatacgacctaatagctgtttccgagggggcaacttccacggagagccttctgccctggtaacggccaaagaggaggagatggcgccagtcagggagcggccgtggcccagacagtgaggaagcgcgaaggcggagcaaccgaggaatcctccggagaagaatcagagccgtcgctaccgccactaccgccaccaccatggaaggagcaaagccgacattgcagctcgtgtaccaggcagtgcaggcgctttaccacgacccagatcccagcggaaaggagcgcgcctctttttggcttggggagctgcagcgttcggtgaggggcccagagaggcagttctgtgccgcacggccggggcggggtggaacctaggctccgggggagaacctgagcccggcagttgacctcgtgaggtcctccttggggaggagctgctgtcgtggggtggggctgcgaagctacatctttgccgcttttgggaaactagtcgcacctgatcggtcgcgaactggccctttccccacccggcagaatctgatttgtaggtcttatactcttcgattgtggcatcaatctaatcttgtttaagttctccctttgccgttgcttcttgggccgtgcttttccgttttgtcttcctcccaccaaatccaaccccagtgtttctccaccttccgcttaagaaggctttattcgtctcccctccgtgtccaagacttgcatctggcattttgctcccagtcgtagccttatgcctcactctttttgcctattttcactccagtttgagtctgttcttctcgaaacttctcaggtttctagattcttactcatgcgagttttccccttgctttggagtggcaacataatatgaagaaaaaacagtaattctgctttcagaaaatctttggagttctcattttgtttcatattaatcctctaaccttgttatttctctggcttttagatttttatttataagatgggtatcactgctgctttgattattccatataaaactgtgtgtgcatccggtgagatatttaattgtagcttatatctgttgtatttctgcattctttgattcatgttttatgcttcctgccctaattttcacacctttgctgtgcttcatttctgtgtaaatgtgtattcttggttatctggctgacttaggttctaatgtaggatgtac

SEQ ID NO: 11685 - DNA, 6000 bp, Homo sapiens; identical to SEQ ID NO: 3469

SEQ ID NO: 11686 - DNA, 6000 bp, Homo sapiens
tggcatgttccacagacacctcacacttctctcctcactgccctcctgagtctctctctccctgaggatcaaaaccatgtctacagctgttcaagccagaaacctgggattcacccctctctgttgacctcgaccccaacatcttatcaatcaccaaaccctggtgctttagtcctgaggtatttctggactttgttttcccatcttcactgcctccagttttgtccctgccacattcgtctctcacccggacaatcacaattatctcctgctgagatttattcccttttatccactctccacacagcagccagagtaagctttcagaaatgctattgggaccaggcgcggtggctcacacctgtaatctcagcagtttggaaaggtaaggtaggaggatcacttgagctcagaagttcaagaccagcctgggcaacaaaacaaaacctcctctctcctgaaaaaaaaaataataataataaaaactagctgggtgaggtggtcctgtagttctagctactgggaggctgaggcaggaagatcaatagagcctagaacatggaggctgcagtgagctctgattatgccattgcactccagcctgggcaacagaataagactttgtctcaaaaaaagagaaaagaaaagaagacaaaagaaaagctgttgctttgctttctgattttaaaagtattaaggccaagcacagtggctcaagcctgtaatttcagcactttgagagtccaaggtgggtggattgctgaacctagaagtttgagatcagcctgggcaatgtgacaaaatcctgtctctagaaaaaaatacaaaaattagcctaggatgatggcatgcacctgtggtccaagctacttgggaggctgaggtgggaggatcgcttgagcacaggaggttgaggctgcagtgagccatgattgagccactgctctccagcttgaacgacagagcaagaccctgtctcaaaaaatagtttttaaagtttttttatattttaatagacaaattatccacaagttataaaaatttaaaagtacaaagggagtacagttttcctgcctctgttttccccagctggacagatcctctcctcacaggcaaacactgttataagtttcttgtttttcccttctagaaatattccatgcatttacaaacacaaaaatttgttcatttttagttttagtttttactcacataattggtaacacatgctctgcctgcaatatccaatatggtagccaccagccacaggtttaggaacacttgccatgtggctggtgtgactgaggtatttattggaatgctaaaacaagagattgatgcttccaatgttgcttcatttcactttagggtacatattgaagatatttgtgctcagttttctgaaatttattctatgcaagtctcatggctacagccattaaaactaattccgtatttaagtggaaatgctatgaatcactgctggttttatggaactgttgaaagcaatgaaagataatgaatttaatgatcttttctttaccaaagctcattgtcagggttgtagaagagttctcctaagatttactgtacttttaactaactccaagattttcttgagacagaagccatgattaccaaatatacaacaataagtattattattatttgttttggggacaaggttttgctctgtggccaagtctgagagtggtggcttgagcctataatcccaacactttgggaggctgaggtgggagggtcatgtagtggcatgatcatagctcactgcaaccttgacttcccaggctcaagtgatcgtcccccgccagcctcctgagtagccaggactacagacttttgccaccacactcagctaattaaacttttttttttttgtaaagatagcctctctctatattgcccaggctggtcttgaactcctgggttcagtgatccacccaccttggactcccaaagtgctaggattacaggcatgagtcactactctcaacccaaatattcaataattaaaaataaaaaagtcagtgttttctcaccaataccacactacatataaatgggctaaatttgaatatccaaggagatgaaacctcatttgtgacctagccagataaatataagcatttcaaattaaatattttcataatactgacaaataattacaatctacatacttttgtcacaagaatcaacatacagaggttttaattgtaatatacagcattgtgtaaattggcaaaatttcaagaaaaatgtgaagaattcttagttgatattgataaatttagaatggcttttgaatttatgcaatatcatttttgaatttatgctaatggtaccgaattgacacaagttggaaaatgtacttaacttcaataggtgtagttttgcaactgatatgctcttacttcaaagtcaaatcacttcttctaaaaaaaactatttttgtcaatgtggttgcaaatattaaaggacaatgttttttggtactcagttcagttattggaaaactaagcttggaacaactggatacgtgagtctacttttttagctgtcatgaccaggaagatcattaaccatcattaaatagtgaagtcctgttgttgctcccctggactgggacatgttacctggagctgagctcatgaatatgccctaagtagtcctttcacacatccacacctatgagtgctctgcagtaggactgtccacctctttggggtgcacctcacatacctacacccaaagtgaattttgtgtggccatttaagtatagccagactggctccttcctcaccaactcccaccaccctgctcccaacctacctccccacctcaactgcctcacctcccctgcaacagacctgatgcaactttccccccagcccccaccaaagtcaggatgagtttcccgctttgctcagctcaagtcctaccttgtcctggaagatttctctcctcacccatcctcaggacgtcccccagcatgggtctgtgggggccaaaggaaaacttcccctttgccttctgaaggtttgctgaaaaatcaactgatgaaaggcagattaatagaataaattgattcatttatattttagagacaaggtcttgctctgtccagagaggctgaagtacagtttcatgatcagagctcactgcacctttgaactcctgggctcaagcaatcctcctgcctcggctttaacaggaaatatttattaacatacatgagagagaaccacaaagtgattaccccaacccctcagtgggatacagaagcttatccaccatcttgagtttatacaaatatgggggctcagatagtggcaagacaggttatggaagggagggaagaggaggcctggttggcaaagggagtcttgttaggtagatgacacctcacaggtagcagccctcagaaagaactgagggtaaatgtttctttcagatctgtaaaggtgtcagcctctcagttaatctttcctagagttagacaagggagagcctcggagaaagcctggctacatcaatgcagatttcctctacagatgcaaatctctccacaaaaagacagctttttggttattctatttccaaccattctgaacagccaccttgaaatgtgtcaaagaagtattttttggggtgaaatattttggtttccttcaagttcttgggctgggaaacatctttgggtgcatcttttctctctaaccccatctaaagctttcagggaacacggatcccatctctttctgcttaagggcggctgagtagctcacagctggggagtgaagtaccctaagtagtggtgggatttcagacacctggaagtggttaatggaagccgagtttctttctggtgcccccagagcacactgtaaaggaaattctcagctctaagtggagaatcctggttaggggtgcgtaagtaggggacaaaagccttgtgctcggcactggacatcagttgcttttcatgtttcttcatttaatcctcaaaacaactccttaagacagagtttctgatccccatcttacagataaagaaacagaagttcagagagagccatgaagttacatgagatcctctacttcaggtgatccctgcggtgtgggaaccagaggcatggtgttggtggttactgacgtgcaaagtctcagagcttcttcatccttgctccagcgtacccaggagtcgagccggtatttggacagttttccttgagtttctgctcaccttatgaattccatcatgccgttctgccacacccgaaggctcccccactccccatgagaatctatcccacggagaatggggcacgaggaatggtcaggaaaggcagatgcaggatacacactggacatctttgctgtcgatcaaggttgcaggcgccagagtcctccctaaaggagagaccttccttctcagtgtggctcagggagtgggaggcaggatcaggtgtagggacctcgaggtctcatttggtttgagaatgtctgtatttaggggaagaaatcccaggatgagtgtctcagggacgctggggaatggtcccccgtaaaggacccaagacagggcagccctgcctgggtaggagtggggcacagaaagtccttgggggagcagagcagcggagaagaggcccgggccggccgaggctgcggaatgctcaggcccgagccagagggaggtgggaccgagggctgcgcgcctgggcgagccgcctgcagccgcggccagggtcagggtcatgagggctggatcgaggggaaggaggggggtgggatggggagggagggcgcgggagggcatcccgccccagaggccggtcccactggggaggggaggagccagagttgctggagggggtccaggaggtgggggtgggaggaggtgggggccgccccgcgagaagaagagcgggaagaggcggacagcgaggccaagatttcagctgcgggacggtcaggggagacctccaggcgcagggaaggacgtgaggaggggaagcgggctggggcggcagccgggcggaggggcagctgcgcaggcggaatgaggaacgcctttgctctaaggcgaccaccctggcagctcttcactgaggggcctcggtttccacatctgtcgctctccggtcccaagaccaccaggaccgacggggctctccgggagggtcagcccctccggtggccccagtcatgcatcaggggacggatcagaagggctaggaagaggggtcgtggggaaggccccagaaaaaagaggaaggagggaagattttgcctgaagcgggaaagccaagggctgggcggcgcgagacccccattcctagcgactggggctggctggtggcccgcggcagcccccgcgccgggaggattaggcctcccgccgctcccacccgtccggaccctcccacgtgtttaggtcctcccaaaagtattcggcctccggcccctgccccttcccccggctggcctggacctcggggacgtggggggaaccccgtgggagcagggggattctggacggggagggagtagcggttggggagaaggctgagcggggaaaggagagaggggctccggggacggcagggaggagagtgggtcgtgccggagacccagggagagacacaatgggcaagattaggggtgtagggtgggagtgcgaactgactgattcctagcgtgggcagggaactttgctaaaactgcaggccccagggaacagcgcgggcagggtgggagggaacggagagggccaggcggaccctaaggtcaatttggagaaagggccatttccaggctccttcacctgtgcccagcgttctacaggcctggaccccgcccccgctccccaccctccccccagagcagggcgcgggaggaggcggctcgggctggctcggagagctgaggggcgcacacccgcttcgcagggccagggtgacacggaagcatgcgacg

SEQ ID NO: 11687 - DNA, 6000 bp, Homo sapiens
tcccactcccttccccagaggctgccagttgagggggaagaagtctgacacatgtggatttgaatcccagctctgccactttctggttatgtggccgcaaacatgtcacagatctccctgggctctgtgtcctgtcgtctgtaaatgtgaataataatgtccaccctgcagggccattggaagatcaaacacttgccacagagcccaacaggtggtgggtgaataaacactctttccatccttctagcatgttttccctttttttttttttctttgagatggagtcttacactgtcgcccaggctggagtgcagtggcacatggctgaccgcaacctccacctcccggattcaagtgattgtcctgcctcagcctcccgagtggctgggattacaggcatgtgccaccatgccccactaatttttgtatttttagtagaggaagggtttcgccatgttggccgggctggtttcaaacgcctgacctcaggtgatctgcccgcctcagcctcccacagtgctgggattacaggcatgaaccactgcgcccagccttcacttattatttttgtaaaacttggtagaatacacataacatacaatttaccatcttcactgttctaagtgtacagatcagtggcactgaagaaattcgcagtgctgtgcagccaccactgccatctacccacagaatgctcctcatcctgtgaaactgaagctcggtgtcctcattgcactgttaccccccctcccccagcccctggcatgtcccattctaccatctctcctctggcatttggcctggcctctgtgacggcactagccccttctagctggtgttgccagttgtttagaagtcttaattcccccgtaggtcaagtggcatctcattcatcctcacccctattaccgaggcacatgttgataatagaggtttgagaggaaaaatgcaaaatgaatgagagaatgagcagagagagggtcacgtgtgggttcatggttaaaggcacatagctgtgcgtctgattttatgtagcaggtgctcagaatatattgaaagtctaaatgatgatacgagtggtttttgtaaatgtttagttattttttgaataggtgaaatatttgaaattcaaaaatgtacaaaagaatacacagtggaaagtcagtcttcccccaacccagtcctccagcctcactggaggcaaccactctggccagtttcttctgcatttttctggaggagtgtacacacaccacatgtgcacacactcacacgtgtgcatgcacatgttcacacagcacatgctcgcacactcacatgtggaagcatgctttatgtactgtttgcacatcttgctttttctcatttgacagatctttgggatccttctaagatcagtatatggacagtttccccattgtctgatagcattcattgaatgataaatttatcctgtcaccatttacagctgtcacaggatttatgtcatctgtcacctgttgatgaccatgcaggccatttctgaattcttactatacaagccgtgctgcagtgagcagcctcggacgctcacgaatgactgaatgactgaatgcctgaacgtgacccctaaccctatagcccagtctaacccctgcctggtctccctggtccccaaagcaccccaccctcccaggactcccacctgcacccaccacggcttgtgatcttcctcttactccgtgccaggcactgtgctaggccctagagtgttcaggctgatgggccccagtcctgtcctcacagaggcacagctcagagggagagataaatgaggaaagagatatttagaaatcaggtttgagtgctgggatagacctgccgccctaaatttatgtccctcccctgacacctggggaggcacagacttatccttgataaccttatccccagtccaggctctcagggccaaggaggagaaagggaggctatggggtgtggggccagggtcagaggggaccgaatgcccatctggctgctctgccctgcaccacccgggccaggcctgtctgtctgatgttgtctgtgcccatcgactccccactgtgtcttggctgcctgctctccctctgggcccgctctgccaatccctatgacaggaccctgccacctcactgccctcctcacttttgaaactaactacctgtctcattggaagggcttttccacccttattctgtgaagttaatagctggtgacagtgggaggggaaggcagcattaaggccattcagatggtggggagagggcagacactgcctatacacaggttatcctcggcccaagggagtgaagccagcgctgacctccgggcaccagggtctgggtcccaggaagcctttcaagctgcaccaaaacccaccattcagaagctctcagcctctcccagttcactggacaatgctctccccactcaaaatacccaccccacctctcccttccctgccacacctgctgtccaagcactgcctccaggtttgtttcctggggttataagacactgcacctccaaaaacccctcgttcaaagggaaatgtccccaggaaggacagcagggactcctccttaccatggactcaggccccttcatgaaaacgggtagaagaatcagttttgatgaagggcattaagtaagcaaatgtggttaaaatgtccatagcgggtcctttgagtagccagaggtgtaagagtgcctggggtaagggtcctgaaggtaggaacacaggcgcgggggaaggggcgtgggaaggctgagaacgtcttccttgggccaagccagggtcagtttccctcctgtttgatgtcagcgtgttttaaaaggggagtaaaagcacaaatcgcaacagccagatgatggaagcatcccaagtgtcccacagtaaatgaatggataaacaacggtgcagtggctccagcctgtaaacccagcacttcgggaggccgagctgggtggatcgcctgagctcaagagttcgagaccagacttggcaacatggcgaaagcccatcactacaaaaaatacaaaaactagcctggtgtggtggtgtgcacctgtagtcccactacttaggaggctgaggctagaggattgctttagcccaggagtccaaggctgcagtgagcctagatcgtgccactgcactccagcatgggcgacagagtaagatcccatctctaatacaataacaacaacaggggtgtatacacacagtggaatacatttcggccttaaaaaggaagaaaatcctgactcgtgttacaacgtggatgaaccttgaagacattgtgtgaagtgaaataagccagccacaaaggcattatatgaggtacatggagtagtcaaatttatggacagaaagtagaatgtggttgccaggggacaggaagggggaagggggagttgttgttagatggatacagagctccagtttgggatgatggaaagagttctggagactggttgcacaacaatgtgaaatactttacaaaacctaacatacgctgcaaaatggctaagatggtaaattttacattatgtttattttatcacaattaaaaatttaaaacatgccgggtgtggtggttcacacctgtaatcccagcactttgggaggtcgaggcgggcagatcacctgaggtcaggagttcgagaccagcctagccaacatggtgaaaccccgtctctactaaaaatacaaaaattagccaggcatggtggcaggtgcccgtaatcccagctacttgggaggctgaggcaagagaatctcttgaacccaggaggcagaggttgcagtgagccgagatcgcgccatcgcattccagcctgggggacgagagcaagacttcatctcaaaaaaaaaaaattaaaagaataaaacagaaatattttcagatgaagggaggataggaagataccagaaagggaaggggtggaaaagctctgtctctgccttgggcctgcccataacagagacaaacccaggcagtgcagagcccagaccccaaaatacccctagtgttgaaggtgtgacctggcctgggggagaggctggatatcggcaggggcagagacgggaacctgagggagaaggacctgaccttgacctcagcctcagaccatgggtccctgctgcctgcctgcctcctactgggggcctacgaggcccacctggccccaaatgcttggcaggctccctgcccgctggctgcttagggaggtgctcccacttcccccgccgttgcctgagctctctagggctccttcactctgcaggtaggctggggtccccctctgtgctgggcactgtggtagctcagccgtgtgaggcggggccctggaagagcccatgagatggccagagctgggcttgtctggctggaagctgggaataggcttctccaagctgccaaatttaagtattgagtacataaaaggaggagattggcattagtgagaacatggccctgaggcttgatggacccaaagcctcccagggtatgtgcgttttgagggggtggggggtgcacatgggtgtccgggacctcgtctaggtaatgtctgcagccacataggatgatctgactgaatctgtgtgaggacaaccgtttgtgtgcctgtgtgtgcgcgcccacgtgcatgcgcgtgtgtggtcctagtgtaggtgatgtctgcggccacacaggatgctgactgcgtgtgtgactcgtgggcgtgcagatgcaagcacaggcctacgacacatctgtgtacaggctgaagatcacaacgggtctggccagggcccgccgagggcctccgagctggcgagcacaccgacggctggatggggcgacgcttcctgctccggtccctaactcattattaagctcctcgctctttgcagacgctccctgcgcctcccccgctccgggctgcagcggcgcaggcgccgggccgagccgagcgccgagcagggagcgggcggccgcgctccgggccggggtcccgggggagcaggtgagcgacccgcgccgcgcggcccccacggcccttggcgaaggcgcctcccggccgcgctgcgccggcgcccccgccttccctgcctggcagtctctgctcgcctctgttggcatcctcctcctcctcctcccccctgcctggcatccccctcctccccctgcctggcatcccttctcctccctgcctggcatcccttctccccctgcctggcttccccctcctccccctgcctggcttcccttctcccactgccaggcatcccccctccttctcctgcctggcaccttctcctcacctggcacttcccctcctccctacctggcatccccttctcccttcctggcatcttcctcccctcctcctttccaggtatctccccccactcctgactctttccgtccccccgcctggcacctccctccacccccaccccaacctcgtacctcttcctcctaccccttccttgcacctcttccctgactggcagactcccattcagcccctctgtgacaccacctcctccccatcgctgcctggcatcttcccctccttccctctccagtaccttcctatcctccctccacctgcatctcccctccttccctcgtctggcaccctcctgcctggcaccttcccctcctccccctgtctggcaccacctcctcccattgcctgtcacctcccccctgccgagcactttctcaacctgctcctgcctggcatgctctgcttcctactccccctgtctggcaccttccctccttcccctgcctggcatcctctccctccttcccctacctagcaccttcccatcattcccctgcctggcaccttctctgtctccacttggccaccgtcttccctggatacccctctcctattcaggttgtccctctgtcccccaccttcttgcagggcacctcccccccgaccctggactggtagcccctcccctaccgcatc

SEQ ID NO: 11688 - DNA, 6000 bp, Homo sapiens
gtcctttttttttgagtcagagtctcgctctgttgcccagcctggagtgcacgatcttggctcactgcaacctacccctcctgggttcaagcaattctcctacctcagcctcccaagttgctgggattacaggcgcctgccaccacacccagctaattttttaaatttttagtagagacagtgtttcaccatgttggctaggctgatctcaaactcctgacctcaagtaatccgcctgccttgggctcccaaagtgatgggattaccggtgtgagccgtggcacccagctgggctgcagtcctttctggaagcttcacaggagaatctgttttcttgccttttccagcttctacagttacctacattccttggctcatggccccttcctccatcttcaaaggcaggaatattgcatctctcagatcattcttcccttccctagccacacctcccttgggctctgacatcaggtgagaatgattttatgcttttaatgatccatgtgattatgttgataccacatagaaaatccaggataatcttttcttcttaaggtccatacccttaattgtcatggtgatcagcgactatccaggaccagaggtgcagacagtaaaaagaatgtttactcggctcactgcaacctccgcttcccgggctcaagtggttctcctacctcagtctcctgagtagctgggattacaggcgcctgccaccatgcccggctaatttttgtattttcagtagagatgaggtttcaccatgttggccaggctggtcttgaactcttggactcaagtgatccacccgccttggcctcccgaaatgatgggatgacaggcatgagccaccgcacctggcctaccgggtatcattcgaacacccagctaactccctactctaagtcacacctgagccattttatcatgggggctgtcagaggcactgctgtttttcactgaagcccatacccaatccctcggcctcgtgtgcttttccctcacccacttcaaaggcccgtggctttgggacgcctctccacctcattagtcattccctcccctgcccatcgcgtcgaaacacaatgcattgtggttatttatgtccagagctggttcctcaactaggctgtcagctagccagtgcagagggtgtgtgttagtcacatttgtatcatcagcccccgatgggccatggctacatacttgttgagtgaataacacaaggggcatctttagcatttctttgtggggcccaatctcctcagcgaaggtacagggaattctccacactaactaggccagctgggtctgggtggcattttatgacttttttgttgtcgttattttgcgatggagtcttgctctgtcacccaggctggagtgcagtggcgtgatctgcaacctccgcctcccagattcagacgatgctcctgcctcagcctcctgagtagctacgattacaggcacgagccatcaagctggttaatttctatttttttggtaaagatgaggtttcaccatgttgcccatgctggtctcaaactgggctcaagcgatccacctgccttcatcttccaaagtgctgggattacaggtgtggaccaccacactcagcagagtaaaaaatgtttaacagctttattaatataggattaatatgctgtacaatatgccatttaaagtatacaactcagtgtcttcagtatattcacagggttgtgcaaccaccaccaccatctataataattttagacaatttctgtttcccaaagagaaactccctacttattagcaatcacttcccatccttgcccccaacctagccttctgtctgtatccatagattggcctcttcttggacattctatataaagtgaatcataccatatgtattcttttttttttttttctagaaggagtctcattctgtcacccaggctggagtgcagtggcgtgatctcggctcactgcaacctccgcctcctgggttcaagcaattttcctgcctcagtctcccgagtagctgggattacaggtgccccccaccacacccagctactttttgtatttttagtagagacggggtttcaccatgttggctaggctggtctcgaactactgacctcatgatctgcctgcctcagtctcctaaagtgctgggattacaggcgtgagccaccacgcctggcgatttttgtattttcggtagagacagggtttccccatgttagccaggctggtcttgaactcctgatctcagatgatccacccacctcagccacccaaagtgctgggattacaggcgtgagccacctggccaggcaatatatattattttgtgtctggcttctttcacttattaatagcatcatgttttgggaggttatccatcttgcagcatttatctatcagtctgtctatatatattttttgcaacaaggtctctcactctgtaggctggagtgcagtggtgtgatcatagttccctgcagcctctaccttctggctcaagcgattctcctacctcagcctccccagtagctgggactagaggtgctcaccaccacacctggctaacttttcgtagttagggggtctagctatgttgcccaggctgctctggaactccttgtctcaagaaatcctcctgcctctgctccccaaagtgctgagatcaagcctggcctcctttttatttttatatttttgagacagagtcttgccctgtcttccaggctggagtgcagtggcacgatcttggctcactgcaagctctgccttctgggttcacgccattctcctgcctcagcctccctagtagctgggactacaggcgcccaccaccacgcccggctaattttttttgtatttttagtagagacggggtttcaccctgttagccaggatggtctcgatctcctgacatcgtgatctgcccgcctcggcctcccaaagtgctgggattacaggcgtgagccaccgtgcccggccagcctcctttttaagtagttttccattgcacaaatgtagcacattttattcatccactcatcagtctctagttaatgcatctgttgtatatgttcagattggctggggttcaatacccactggacaacttcctagatgagtgacttttggtaaatcataatctctccaagtctgcctcagtttcttcaattataaaatgtcaataataatgcaatgtacctcatagagagtcatggttgtattgccacagtaattaataaagtgccaggaactttataaggattatttaacacccttattatttacaaagtaggcaacagaggctattgtggtggttcacacctgtaatcccagcactttgggagttggaggtgggaggatcacttgaggcgaggagttcaagaccagcctgggcaacacagtgagacccccatctctacaaaaaaattaaaaaattttgtagctgactctttggacaataaagaattttattttagaaaattagccaggtggctgggtgcagtggctcacgcctgtaatcccaacactttgggaggctgatgagggtggatcacaaggtcaggagttcaagaccagcttggccaagatggtgaaaccccgtctctactaaaaaaatacaaaaattagctgggcattatggcgggcacctgtaatcctagctactggggaggctgaggcagggaactgcttgaatccaggaggcagaggttgcaatgagccgagatcacgacactgcactccagcctgggcaacagagtgagactgatctcaaaaaaaaaaaaaaagaaaaagaaaaagaaaaaaagaaaattagccaggtgtagcggagcgcacctgtggtcccagctactctggcaggctggggtgggaggattgcttgagcccaggagttcaaggctgcagtgagctctgattgcaccactgcattccagcctgggcgacagagcaagaccctgtctcttaaaaaataaataaataaactgcaatgtttctggcagcccagatgccaccagcctcactactctctgagaggtgggattttaacatgcaaaggcccactaacccgatcacgtctcacaacttcagctgattaatactttgttaaaacctagaccacgaaaacagacagagcccggcgaggtggctcacgcctgtaatcccaacactttgggaggccgaagcgggtggatcacgaggtcaggagttcaagactagcctggccaagatgatgaaaccccgtctctactaaaaaatacacaaattagctaggcgttatggcgggcgcctgtaatcccagctactcgggaggctgaggcagggaattgcttgaacctgggaggcagagattgcagtgagccgagatcgtgccactgcactccagcctgggtgacagagcgagactctgtctcaaaaaagaaaaaaagaggctgggcacggtgcctcacgcctgtaatcccaggactttgggaggccgaggcgggcggatcacgaggtcaggagattgaaaccatcctggctaacacggtgaaaccccgtctctactaaaaacacaaaaaattagccgggcttggtggcaagcgcctgtagtcccagctacttgggaggctgaggcagaaggagaatcgcttgaacccaggaggcggaggttgcagtaagccgagatccagcctgggcgacagagcgagactccgtctcaaaaaaaaaaaaaggttaaagaaaaaaagaaaagaaaacacaagataatcctgtccgcaaacgcttagcagtcttaaatcggcctggtggaaggatgcagggacactcccccaccctgccccccgaaaaaggggaacgcgcagcgcgaggttccgggtccgccaagctcccggcatgcagcgcggcgatcccggcgagcaccttggcgcgcggagctggcaccttggcgctgttggtggcggcggagacagctgtgaagtgtgaggttctttgtctgctggcagctaggggcgacgaggcgggacgtcatggaagtgtaagtcttctcgggcgcgtcccttttcgcccgaggagcccaacggtttgaccgctgagagctgagagccgagagccgtggggactgggcgaccctcgtacgggagtgagggcagcgggccggccctgtccgggagggccgcggggtggtgacggggacgaacgggactctcgctttgcccttccgaaccttcgcttcccctccacgccgtgtctggtgcggggccgagcacttccgtgtccggctgcctttcaatgtgccccctccttctctcattcgtttaccagcgtttctgggtcacagtgcgggggtggagcccagtctggtatccgaccccggacttagaaggctataaaggcctgagtctgtccgccctgaaagtaggtggaggagagacgaatcagggccgggtagagctctgcttgcagctgtaggcccctggagagccctcggaagagctgccctcggaatttgatgggagcagtaaacactgtgagggaaggggctggttttggggtggagaagggaaggacgtgaaccaggactgggaccagagaaacagcagggggtgtgtgggtgtgtgtgcaaggcgagggtaaaagattttctgacagtttaactccacgtggtcttttccatgcttgctcgttgcgcctggtgcaaatggaagattttgcatctactctgaatgtgggctttatacggttgatattaatttgtaggtattactatcttgtgttctctttgaactgattatttgatacagtttcctttatgttcttttgcctcatgtttaatggttatatgtactatggcatttcacatttttacatttttaattaattgttttttcttaagaaacagggtcttgctctgtcccccaggcggggtgtaatcatggttcactgcagcctcactttctggactcaagcaatcctgcttcagcctcttcagtagctgggactacaggccca

SEQ ID NO: 11689 - DNA, 6000 bp, Homo sapiens
gctgtctggaactcctggctcaagcagccctcccaccttggcttcccaaagggcagggattacaggcatgagccccgacaccagcccctctgccccttttatcctttcccatgacccctccaagtagccatagccctgcccaggcccgtctgtgatttggactctaggagacattgagtttggacaacactggctaccttcctttccttatcttctctgtagactccctgccctcggaccctgtacagccgcagtatggggcatggctcagcctggtggaccgtgcccaggtgaaggcttttgtggatctaaccctctcaccctccgtgcgccagggggctcagcatctgctgcgaatctccggcctcggtgagctgcttctccctggatgccctcggccttcctctgtggccacttcaaatctccgctcccctcccctagagagtcagccacagattgcaaactgcaaaaggaccttatagtcgagaggagataagacagtgctcaaagataatagcctcagacagtgtgtgataaggtctaataggagatgctagggactagtgatggggtgggcgatgttgtgggttttttttccttcttcttttttttttttttttttgagacggagtctcactctgtcttgcccaggctggagtacagtggcacgatcttggctcactgcctcctccacctcccaggttcaagtgattctcctgtcttagcctcccaaatatctgggactataggcatgtgctaccatacctggctaatttttgtatttttagtagagatgggggtttcaccatgttgcccaggccagtgtcgagctcctgacctcaggtgatctacccgcctcggcctcccaaagtgctgggattacaggcatgtaccactgtgcccagcctttccttctttttttttctgatccaaaaattggggcataggcactgaagagtgtatttttggagacaatggagcattatttgaatctccagctgcctcatcaaatcagatggtttttaaccaccagtgttcagaggaaggcaggccagccactatacactgatgtggccagcaaaggttttgcggagagatggtaattcatccagactttgaaagaggttgggatgtaggagatgtaacatgtctcccctgcccccgccacccaaagccacaaaggatgccggaggctgtgtggggcggacgtctgtggatggagcggtaaattctcagcttttagcgctgaggccaccagggttatctatgctcagtcactgccttttcccttaatcctggaccagtgcccgtcaccaaagtgcatgcttccttctctattcagagtctggctaaagttcaacagtgttggacattgcccagttcagtgtaaatcagaaccctgggaaatactgaggagggggcatgactagtttattttgcaagatcagctggaattcacacctgcggagatgttttggggtgtcgtcaagcatcattgacccacagaacatctgagagcctggtcttcactttttgtgcagagaccacaatgcttatgaaatacgaaatttttcctgtggaagatatcaggtcggtgcaaaagcaattgcggtttttgcctttttttttttttttttttggacagggtctcactctgttgcccaggctggagtgcagtggcacaatgtcagctcactgcaacctctgcctcccgggttcaagtattctcccatctcagcctcccaagtagctgggactacagatatacgccagcattgtccggctaatttttgtatatttttggtagagacggggtttcaccatattgcccaggctgatctcgaacttccaacctcaggtgatccgcctgcctcagcctcccaaagtgctgggatgccattttaatgggggaaaaaaagaaccacaattacttttgcaccaacctattccaataaaaggaaaagtagttcctttaaatggtggattctcctgtcatagaaaatttgatttatggcttgagcagtgtttgtttcatgagaaggggtcttggaagaggtctctgcgtctccctgtaaactcagcaattatccgattccacaagggttgttcaaaaattaagaacgaagagcttgtcagcagggacttggagcattgtggttgccacgtgcccagctcggtggctcagagtgtggcctctcacgctggatggaggcggattgcgttgacctacctgccccagtacctaccagatatgagcctatgggcaagtgacttcatcccttggtgctttgggctccttatcagtaaaaagaggagactaaatattacctacctcatagcattacttcgagtttcaaataagttaaaatataaagtgctttctacaggacatagcccctggtaagcggataccatgcaatgaaccaccatgattagggttttggtaaaacctactagggttagggtttactgcagtaaacatacggggtagccctgtttctttttttctttttttttgagatggagtctcgctctgttgcccaggctggagtgcagtggcgtgatctcggcttactacaaccaccaccttccgggttcaggcaattctcatgtctcagcctcctgagtagctgggattatagatgcccaccacaatgcccggctaatttttgtatttttagtagagatagcatttcaccgtattggccaggctggtctcaaactcctgatctcaggtgatcaacgtgcctcagcttcccaagatgctgcgattacaggtgtgagccacggtgccctgcctggtccattttttcatcttcccattgcagagtctgggacgctattaccctggggattcaggtcatgagcttggctgatcagggtgtctggtttgcacaacagagtcaaactcgcatcccctgccgtgaaacagatgccccgctagaagccgggagtggacagcatcctcctctccatagaattggagtgctcattagtggcaagaatcctaaggcgaactttgcctgtttaagtggaggagattagtcactgagataataaaataaatgcatgtgaaagtgtttaggaaaaatgaaaagtctttatgcaaatatgcagaatgttgccgtaagagcccgtacacagtgggaatgtcatacctatggctgacgcaccttgctgtcagtgtgtgggagcgtggtgtaaacttagcctgtgagcctgactcctgtctgttcctgccttccccgctctgcccccaggtggcatgaagcccaacacgttggtcctaggtttctacgatgacgctccaccgcaggaccatttcctgacggacccggctttctctgagcctgcagacagcaccagggagggcagttccccagctctgagcaccctgttccctcctccccgggctcctgggagcccccgggccctcaatccccaggactatgtggccacggtggccgacgccctcaagatgaacaagaatgtggtgctggcccgggccagcggggccttgccccctgagcggctgagccgggggtctgggggcacctctcagctgcaccatgtggacgtgtggcccctcaacctgctgcggccccggggtgggcccggctatgtggatgtctgcggcctcttcctgctgcagatggcaaccatcttgggcatggtgcccgcttggcatagcgcccggctccggatcttcctgtgcctggggcctcgggaggcgcctggggcggccgaggggcggctgcgggcactgctgagccaactgaggatccgggctgaggtgcaggaggtggtgtggggcgagggggccggggctggggaacccgaggcggaggaggaaggggactttgtgaacagtgggcggggagacgcagaggcagaggccctggcacgcagcgccaacgccctggttcgggcccagcaggggcgcggcacaggaggagggccgggtgggccggagggtggggatgctgagggccccatcacagccctcaccttcctgtacttgcctcggccgccagccgatcccgcccgatacccccgctacctggcgctactggagactctaacccgagacctgggccccacgctgctggttcatggggtcactccagtcacctgcactgatctgtgatgcccctgcctccagggctaggtagagagggcccaggcaggcggcctatcctgatccttggaggaggaggaagaggaggccactgtggcccgtggccctgcccttgggacgtggagcccaggggaggtttgaaggggatcctgggcttgggcatcacgcccacctcctttggcagagggaccccagcacactaactctgggtggctgtccccaccgtgcaggggagggagtccgcagcctcccttcactggtgccttgatgctaggggccaggcctcctctgtgactctgggctacctcagtttccccattttggccagactcaccggcccactggggtggtgatgttttcgttctgttttatttttctaactctgctgaccatgaataaaagaccaaaacactacaggctggctgagcagtgctggtgggtagctgagagggagggggtgggaatggagagctctgcagaggggtggagatcggagccttcagcctcccgccgcgaggctgccacgtgcagggctggggtgcggggcccggacgcatccgtggacttggaggctggctcgggcccgcacctcccatccccagctgcccgcaacccccagtgactcgggatcccccggagagccctcccctctcggcaggagggggctgactcagggagaaatggcagtttagggcctagggggccacgtgaccctcccccaggaatgtggtgacgtcatcggaggcgtggtcgtccccaaaattagggaggaagaggaaaaaaaaaagccagaaaaagttttcttttctggagtcccaaacgaggtgcgggacggaagagggggtgaaggccagaggctcggggcttcaagaccgctgtctggagtccccctttccaggccatgtcggggcccacctggctgcccccgaagcagccggagcccgccagagcccctcaggggagggcgatcccccgcggcaccccggggccaccaccggcccacggagcaggtaaggcagcccttgtgagacagaagagccacccagctgtggcgctcacctctgtcctaccgctccagcctcccgccctggctgcttcctcctgccccttccccaagccgaggcggggggaacagccgcctgcgctctcttgggaccctagatttgggggaggaggtaacgagaggcggagagggtggctcctcaaatatacacccctcctgtcctccgccaccccacctttgatttctcttccctcaacccagcactccagccccaccccagggtcaatttttgcccccttccatctgagcagtgttaccaggccccagggggaccggaggatcgggggccggcgtgggtggggtcccatggagtactccagcacacgcaggtgagacccgggatcgtggggtgggacatgtgggatcccccagaaccgagtctgagggacccaggacaggagaaggcctatggtgatttgcattcttcctgccctggctccatcctcaggggctccctgcagacagggggggccttcgccctggaagcctggacgccgagatagacttgctgagcagcacgctggccgagctgaatgggggtcggggtcatgcgtcacggcgaccagaccgacaggtgactctgcccctcctccccgtcagcaccctgcccccttctctggactctcagacccagcctgatcgatcccccatgtgtgtaatgtgcaccccagcatggaggaagcgtggctgcaagtaccaacatgtcagccacttgaggacgggaccttgtcaaatgcaaaaagcctgtgcttccccacagccagggtcatttccacaaatgtgggtcttggagtggggt

SEQ ID NO: 11690 - DNA, 6000 bp, Homo sapiens
ccctagcctcagtctcccgagcagctgggattataggcacccgccatcacccctagctaatttttttgtattttgtagagacagggtttcaccacgttggccaggctggtcttgaactcctgacctcaggtcatccacctgcctccgcctcccaaagttctgagattacaggcacgagccactgcgcccggccatacttctagtccttgctttcattccatatgatttatcctttctaatcctaacaacttgctttattgatcttattcttgacctacaaatgataccaggtgaaggggtgggttgccccccacacctgtgggtgtttctcgttaggtggaacgagagatttggaaaagaaaaagacacagagacaaagtatagagaaagaaataaggggacccagggaaccagcgttcagcatatggaggatcccgccagcctctgagttcccttagtatttattgatcattcatgggtgtttctccgagagggggatgtggcagggtcacaagacaatagtggggagagggtcagcagacaaacacgtgaacaaaggtctttgcatcatagacagggtaaagaatcaagtgctgtgcttttagatatgcatacacataaacgtctcaatgctttacaaagcagtattgctgcccgcatgtcccacctccagccctaagacggtttttccctatctcagtagatggaacgtacaatcgggttttataccaagacattccattgcccagggacgggcaggagacagatgccttcctcttgtctcaactgcaagaggcatgccttcctcttatactaatcctcctcagcacagaccctttacgggtgtcgggctgggggacagtcaggtctttcccttcccacgaggccatatttcagactatcccatggggagaaaccttggacaatacctggctttcctaggcagaggtccctgcggccttccgcagtgtttgtgtccctgggtacttgagattagggagtggtgatgactcttaaggagcatgctgccttcaagcatctgtttaacaaagcacatcttgcaccgcccttaatctatttaaccctgagtttgacacagcacatgtttcagagagcacggggttgggggtaaggtcatagattaacagaaactcaaggcagaagaatttgtcttagtacagaacaaaatggagtctcctatgtctacttctttctacacagacacagtaacaatctgatctgtcttgcttttccccacaaccaggatagtccagccagctaactgtctgtgccatcttattcttgacctaataaatagctgccgggcttggtggctcacacctgtaatcccagcattttgggaggccgaggcgggtggatcacgaggtcaggagttcgagaccagcctggccaacatagtgaaaccccgtctctactgaaaatacaaaaattagctgggcgtggtggcatgcacctataatcccagctacttaggaggccgaggcaggaaaatcacttgagcccaggaggtggaggttgcagtgagccgagatcacaccattgcagtccagcctgagcgacagtgcaagagtctgtctcaaaaaaaaaaaataaataaataaataaataagtagcaccacaatagttcaggcagccaataatctatgccactggtaagatattccactagtatatgtcatatatcttagacgatggtgttgaaaagcctaaggtggaggcagaggagaaaagaaaacaaaagcaaaaggaagaagaaaaagtaaaagaagaaagaagttgggcccgggcgcggtggctcacacctgtaatcccagaacttttgagaggccaaggcaggcagatcactcgaggtcaggagtttgagaccagcgtggccaacgtggtgaaaccccatctctactaaaaaaataaaacttagcggggtgtggtggtagatatctgtagtcccagctacttgggaggctgaggaaggagaattgcttgatccggggaggtggaggctgcagtgagccgagatcgtgccactgcactccagcgtgggcaacaagaacgagactccgtctcaacaacaacaacaacaacaaaaaaaaaaaaaaaaaaggaagagtctgggaagaggaaatgataggtaccattatgaagtgtttacagatacttgctatacattacctctaatcctcagaaccaccttgcaagatatgtactactgtcctctttttttttttttttttttgagacagaaggctgagtcaggaggctgaatcaggagaatcacttgaacccgggaggtggaggttgcagtgagccgagattgtgccactgcactccagcctgggcaacagagcaagactccatctcaaaaaaataaatacacaaaataaataaataaagtggagacaggaggtgaggccttaccaacaattgcatcatgtgctactcaaaaataatagcacattagttgccaacaattatctaccattaacttttctgcatgacaaaatttaagattttctcttatccttctatccagacctctttactttatcatttgtgctagggaagcaggagcctcagagagccagcataaagccattttaagttcagctccatcttgaaactaacaaggcacattccttgtcagtcacaacccaaagctgtttacagttggggaaacagcttaaagatacctgcaaggacagactcctccaactacagaaaatccagatgccccaatacccataacaatatgtgcctttaagataattatagttctggctgggtgtggaggctaaggcaggattgctttaggccaggagttcgagatcagcctggccaacattgcaaaaccccctctctactaaagatacaaaaattagctgggtgtcgtagcacatgcctacaatcccagtagtgagaccccatctctacaacaaaatatttttttaattaattggatgcactggttcatgcctgcagtcacagctacttgggaggctgaggtgaaaggatgtagctgtaatccagctattagggatgctgagacacaagaatggcttgaacccaggaggtggaggttgcagtgagctgagatcacgccactgcactacagcctgggcaacagatcaagactctgtctcaagaaaaaaaaaaaaggaagaaagataattaagttttgctttgatgtacttacctactagaatgtcaaggatagttaaattaacagaataataaattttgtcatgccattggcccatctgcacattgactcggcttagtttagtctctacaaaaacaagacccctatataagaaaaacttaaaggtcaggggcggtggctcatacctgtaatcccaacactttgggaggctgaggagtgtggataccttgagtccaggagtcccagaccagcttgggtagcatgacaataccctgtgtctacaaaacatacaactattagctggctgtggtggtgcatgcctgtagtcctagctacttgggagactgaagtgggaggatcgcttgagctcaggaggtggaggctgcagtgaactatgatcatgctactacactccagcctgggcaacagagtaagaccctgtctcaaaaaaagaagaaaaaaaaaaagaaagaaagaaaagaaaaacttaagacagtgtgttcctctgtttgctttctgaggacgccctactccgtaagggtgtagctttcaataaactctctcttctcatcgcactctacgacttgctttgggttccttcctgcatgagatccaagaattctctcttggggtctggatcgggacccctttttccagtaacatgtagacacacacacacattcagtttaaaagcccatattacaacgtacatccacctcatcttcacactgagatttgggtgacatctgtccctttttgagttttgacccaagttaaccttttaagacgctctttatttcttccccttttgcctcagttcacgttcctcccccttctccttacatgccttttatagcagcctctccttttctcttttattctttttctacacatttctcttactgtaaaatcagaagccaggcgcggtggctcacgcctgtaatcccagcagtttgggaaaccgaggcgggagggtctcttgaacccaagagttcgagaccagcctgggcaacatagtaagacccccgtctctactaaaaaaaaattaaaaattagctgggcatgacggtgtgcgtctgtagtcccagctactcaggaggctgaggcgggaggatcgcttgaggccaggagttcaaggctgcagagagtcacgatcccaccactgcactccaacctgggtgacgcggccagaccctgtctctaaaaagaaaaaaactagaggggtgtatctatcacgctttcaatagatattcagcttgggttctatacttttctcatgaccctttgtctttctgttttccaggtcactcctcctcccctacacttaattcccaccctgctcccttttcacggcccactccccttccaggagtcctgcctgctgcttcgaactccaatgatcgtcccattcacctctcaccccttttcccgcctttttgccccacaaggctccaaagcgcgaggaccttattgtcctcctcccccatcctccaaccagcccacaggacagccgcgttaccatgacgaccgggctcctagaagctgcagtcaaggacctggttgccatggtttccgcttctccgcctccagccccgcccgcgctccccgcggcgtcggcgcctgcgcagtgcgtggcgcgccgggagtcagagcctgggcgggacggggcggggcttcgggcgagagggagggcagcaggagaaaggataagaaagggagtgggactggcgcctacggtggccgaagtgggacgcgccgagccggaggctgcaggatggtaggctgtgcgaagagggaggggagggggaagcgaggggcgtgggctgcacctgcgggggtcctcgggggccgccctcggggtgaaccgccctgtcttccctctggtcctcagaggcctcccttgcctcggcgggtgggcgagccgggctcgggaggaagagggggaggtggcattcgggagaggggcggggagggggcgcatttgcagggcgagcgggggctgacgaaggggcggcggggccgtcccgagccgggaggggcgctctggtcttggcccctggggtccctcgatccccgctgcagggaagccgcccgaagcagagggttgcgggagtctctttgctgagggagggagcgggggtcaccagtcaccgagacccccttcccgggctgcacaggcgggagcggggacccgggtggggagaggggtgtgggaggggagtttccgggtcggaaaagggagcgccctactgcgttcgtggccgtgcttgcctagaggctgggcccaggtagggaagcgaagtggactcgtggtttttctccgagggacccaggctttgggatcccgggctccggggctctctgccccccttcccattctctttccggaatccaggccttccgtcttcctgcttgctccccacccccctatttgagcgccgcacgaggctccccagcgcccctcttttcccctccaccaaaaaaatcagttctcctgaattctgatttttcacttactaagctagtacagtgccacacacccagggattccaagcctgggcatgtccatgaatagaagagctactggggtaaggagaagactccaggatgtggcccagaccccccggaactgggaagctggggtacactgggcagtgagggttctgtcttccatcccacttgacccagcttgctgtctgttctgcagacattcttttaggggaaccccctgggtggcggggccctaactgagggaaattggtcacctggtgtctggggaggagtgggcgcttagcaggaggcaccctaaaaggaagaaaagt

SEQ ID NO: 11691 - DNA, 6000 bp, Homo sapiens; identical to SEQ ID NO: 2503

SEQ ID NO: 11692 - DNA, 6000 bp, Homo sapiens
agatcatgtgtgtatcttgctccctgacaactctttactcaatagctttagcttcaattgatgatccttacctgagccaatagatttgggattataaaaaatgattttcctaatgttcttattcttttaacatttattagctgctattcttctgtaatgaacatctgttccctcctcttctatctcattcattctcctccccaccttccctgaattttcaagagttttttacttaatcctttatcacttaaaacaattatcaaattctcccttataaaagacatttcaagcagaattgtgtgtctctttgatatgtaccattagtttttgagcacttccctggcacaactaagtatttcagactcttccaaaacaactttttttttcttttttagaaagggtttggctctgttgcccaggctggagtacagtggctccatctcggctcactgcaacctccacctcctaggttcatgcgatcctcccacctcagcctcctaagtagctgggaccacaggtgcatgccaccacacctagctaattttttgtagagacagggtttcatatgttgcccaggctggtctcaaactcctgggctcaggtgatccacctgtctcagcctctcaacgtgttgggattataggcgtaagccaccacgtctggcctcaaagcaatttttagtaggaaatttgcacaaataataattcattctcctctctcactgtatatatgtagcttatttcagggaaagagtacttggaccttggggcaccctaactattacatggggcgatagtgagagtacattaacttcatctgttcctatgataaataataaagaaatcattacatggctacatcagagtatctcatgccccactcagaggatttcccataaaagttatttcattttattttattattttattttattttttgagactgagtctcgctctgtcacccaggctggagtgcagtggcgcgaaagttgttttaatacactaaaactttaaagtattaactgtgtcaagttactgtcattaattttttcttgtagcagtaatatcaatgttgaattttcattgattaggtaatgtaataaattcattttcatttttcttttttaaaatttaatttttaaaaaacttttacgagcccacatctgatatcatataaattcacttttcaagggtactttaactctttcacgtcagaagggtttattctgcacataaacctgtcctaaatcaataatgggctgttacattataaggtgaggccagtcaaaggataatgagaggtaattctactaatgatggctatgactcatgctgacaataattatcaacatcttgttacaatgtatgttctccatgatcactcaagaacacatcgataagatgctttccatttcccagagtcaagagaaacttggtaaataactcagtataccagtgtattggcatctggactgggaaatagtttttgtccacagctggatgaaatggtaacttagtgtccttaaaatgtaaaaggtgttatccttctcacaaggagtcgattaattatctactgtcaggtgatcaatatctcagatttctagtattttaaagctactcttattatctacttactgtagtgatcaatagtatacaattgtcaaaatcatgaaagatgcaatcttttgaccacatgaaatatttactgttattttaaaactaactgacctatatcgagaggctcaaagcatgaccttaaatgtgtcagaatgctctaccatacctgttccatactaaaaaatatatttttaaacatttcaaactggttatcaatttattcctttactaccaagagattcagagccattacaaaggtaaacacttttctctgtactgataaacatatttatttataataaaataaatatgtttaataataaaggatttccccaaatcactagaaataagtgattaaatttgttgataaactaaggcattttctttacaagaagctgagttccaaagattacatatgagcaaaaatacgtcaagcctatttaaaaataatacacagaattcagaggcattaaaaagcacaaagtaagggggacaaaatgtaggaatagggtcattgtgcttaaaatgcaaacttcagtgtcatttatcggccagtgagaactgtggtatcagagtctaatcttatttataactcccttttcctctcatacctgggttctatctcattctactctatagaaaaacccaatttgttgtctgccaccttggggagttcgagtggaatcaaagtggtctgttgatataagagagggatttttctacttaccagtaaaactggtatggggattggtagaggttgtagtataatggagttcattatcatagtatgtggtataatgattcctaataatagtaataatgttaaccatactaatactcattgagtgcttgctgtgtaccagtaactttgactaacttttactaactcacctaagcttcacaacaaccctgagaatgaggtagtataattatgcccagggaatagcgttgccagataaaatacaggatatcgggctacatttgaatttcacggaaacagtgaattttccaactactatgtgggacatatttatactaactaaaattatattcgttgtttctatgaaattcaaattcaactggatgtcctatatacttatttgttaaatctgacaatcctaatagtgaggttatatgacatacccaagatcacccagctggaagagacagagctgggattcaaacagcctgtctccataatttttttttttttaatcaatttcagtatcttgtctctccaatagaaaactgtggattccaggaagtggtaaaataattggagtcctacccagtccttgagggggaaaaatggaaaataacatttgaatctgtgaaacattttaacatgatcatgataacatgatactctttcattttttatgttaagtacacttactttttagaaaggaacagctcaaagacatcagcatccctcctgtggccacatatctttagctgatcttcaactgcctgataacatataattaatctgtcaaactacattccaatgaacaaaagtgctgaggcacttgcagtcagtaacaataacgtctacaagaagatcaaaagaaaggtgaatatggaggtaaccattctaaactgataaattccaaggctacaattatatattatttactcatttttgtggttgaatttcattatccttaatcctgggcacagatgtttaaataatttttaatcagagagaaaaaaatatgtatgtgtacgtatacaccaaaagcaagttttttttattctgtatgaggcaaggtaatttggtctttaaagaactatttttaaatgattctttgaacatgaagaattagtatttcataggtttcctatagagaattcatgcagtatcagggttggaggtggagagagtaggataaaatgtatgttattataggacattcttttttgtgcctatcacattatgcttggcacccagtaaattctcagaaaatgtgaaatgaatgaatacatgtcatttttctctgaacaaatgaataaatacattttcccttgcttggcaagcagcagtgacttcgtttctcatgagttgctaacatactcatgctgtgagaatttttggtggagaagcagcttttattcccatagctctgttttaaaaataaaactttagcaacagctatttaaatgctttacttttttttcttaaagtcctttgctaaattataaaataatgttaataggccacatgacctaaaataatatgaaaaaagtaaagtctgtctgtaattttccatgagaaagtagagctcacaagacatgacaaaagtgaaaagtataatctttgcaatcctggaatctgacaaacattgtaattatcagagtcaaaacaatcaccgaattttagctgggatttgttatgaatggtgaggttataatgacttataaatctttctgggtgatatatgaaattttgacagtggttttgctatttggtagaggactttaacaggagttatatttagtgcaatgaacatatttaaagaaatgaggaagataggtacgctagtgatggagagcagctgcaaatgtatagtcctgaacttcccttgatgccttgttaataagcaagctgaatctaggggcttggagcattcataggctcaggtttaggcattgccatcagggtgctttgttatccagttacacaagccgacctggggcttggaaaaacccattggatcaggcttagacattgtcatctgggttttgttttttttgtttgtttttgtttttcttttttttttttttgagagagttttgctctgttgcccaggctggagtacagtggtgtgatttcagctcactgcaacctctgcctcccaggttcaagcaattctcctgcctcccaagtagctgggactacaggtgcacgctgccacacctgaataattttttgtagagatggggtttcaccatgttggccaggctggtctcaaactcctgagttcaggcaatctgcctgccctggcctcccaaagtgctaggattacaggagtgagccattgtgcccagccctcatctgggtattttaacttaaagatgtcaactatcagcctctactacgtacagtcagtcacatctttgcatagtgtttggggtggttatagcccagccaaagaagaattaaaacttggcagccatctgttaaaattataaatgtgcttttaaattgatccagccattctacctccaggactcagaaacacacaggtgcatacacccagacaaatgtgattatcactgcttatttcagcatacattttctgtggttgtgaaatagtccccactaattggaatgcaggttaaattgacatgtgacatcacaatggaatactgtgaagtagtttcaaaatatagagaagtggtctgatggttaattttatatataaatttgactggactaggggatgcccagaagctggtaaaacattatttatgggtgtgtttctgaggatgtttttggaagagattagcattagtattagtggactgagtaaacaagatcaccctcgccaacaggggtggatattatccaatccactgagggccccaatagaacagaaaaacagaggaatgtgaattcatgcttgcttctggagttaggacatccatcttctgccttcagacatcagcattcctagttctcaggtctctgggcttggactaaactacattactggctctctcctgggctccagattgcagacagcagattgtgggacttctcagcctccgtaatcaagtgagtcaattcctcataataatagtctttttctatatatctctatatatcctattgttttgtttctcccgagaactctaataatacagacagatatctagacatctaaagatatcgaaaacatatttataaataaaaagtaattggcagtataatatgtgtaacaatatttctgttaaaagtcatatttatatgaatacaaaatgcacacacttcaaattactagcaaaagtcaacacttgagatcatgagggactttcactttctaggcaatatatatttttagtgatgttttagtatttcacaataaccacatattaatttgataatcagaaagtaatgcatgttttaaaaattttagccatagaatgaatatttaaaaatttaaatcaaatttcaaaaaatgtgaggtgaaagggaaattgaatgtatcagcataatatgtaaatcactatcataattatttatttacacaagtttttatcacagcatgtttctttccaatcaataattttgcatgaatccagtacaaaatattaatatcaaagtgcccagaaacatgaaaatgttccaattcacatttcagtgaatccatggtggaacaat

SEQ ID NO: 11693 - DNA, 6000 bp, Homo sapiens; identical to SEQ ID NO: 3468

SEQ ID NO: 11694 - DNA, 6000 bp, Homo sapiens
gaggggtgtcaaggagcatcccattagactgaggaatcccacgcaggcaaagagaggaaggaggcctcattcattccactaaccttcgcatgcacctgcctgccacacaggaccctggggaccccaaggtaaggcccaccctgctgtctggatgctgaaggtgtaggggtgagggctcagccaggtgtgcgtgacaggggcagagccacccagagagagctactctgaggggaggacggagggagtgagtgggagggccgcgtccctgaggaccccatagaggagggggtgctgagctgggaccaggcctcactcatggtgagcagcccccactcactcggtgcgggtctgcttcccggcacagctccgtcgctctgctccctccctctgtccccctccttcctcccagtctgccttggttcctgcctctgtcttaggaaattcttggatttcagagctggaagggctctaggaatgctctgacttaagcctctcctttcacttctgaggacactgagggacagggaggtacagcgacttgcccaaggtcgcaccattattttggtgtcctagtttttctttgttttttgcttctatatattgcatttgtctctttcgtgtatgtttgcaaaagtgacacagaaagacaaagtcacacagagagacagcccccttgatagcagcagagagtgtcgggggtacagaaacatcccaacacaaacagggaagcgcacagctgccctggcctggaagcagcatgggggcagccaggaggaggaggaggaaggtgcctgatgcccctggcctggcttcggagcgtcccctctgctgaccgtcaccagaggcgggggttgaggtagtctcccctcctccctctctggagctgggcgtgaccccaaggactagccagaggtcccccgaggctggtgcttagcccgggcaggtaggctggatggcggaaagtggggcctggtttagagatggccagaacaccgaaaccaaggctttgtggtcctcacagcgccaagtggtctcactttctccctctctctttctttctctctctccctctcctctcgcgttctctcgctctctctctctctcacacacacacacacacacactcactcaggccgccccagtgagggtgatcgtattctcctaaggagagctttattgctgggggtgtagggaaaagggaatagaggaaagagctctctcccaagcaatccgttctccctccagtctcgcttcctttgttcctcccttcccttcctccctatcccctcgccagcttctcttctctccttccagccccttcttccatgttccccgctctcctgctcctcctgccgcgccccccgagcggagtccccgtggtgggaccttcacggagggcaggagggcgggactgcggctggggcccggcctaggtggccatcttcccgcagggaaggagttaagtctcttccccgcatccctcctccctccgccgcctccccggccgccgcggagtcctgcagctgggccccgggctgaccttcaccgggagggaggccgcggcgcgcatgcccaggccggggaccggcgcgggcggagggaggggcggcgcgggccgggccggcccgagcccccccagctccccggccgccgcccgctcgctcgggcgcggtgggggcgaggcggccgagcccgtcccgcaggccgcggcgcatctctccctgcgcggggagcggcgctttgccatttggtgctggtggtgcttcagcgagggaaggagcgatggggggacggcaggggggactgcggcgccgggcgccgggcggccgccctcgcccccgacaggcgcacggcctgccccaagtgcggcgggcgccctattgcgctgggaggaatccacgctcttcccgggcctccttcccacccgcaggagccatcggcggcgtggcacaccgagcgcccttctggggttaagccactggggatcctggcctttgtgaggagggagccctggcccgggcccccacactggcgccgccccagctttctggtctgaaggctcctcctgtcgcccacctaaaagcagtacgcaaatgtgtctgggcctgccttgtgaatggggcccaccacgggatgtggaggtgctcaaggtgtgcctgtgtgtgcagagccatgtggcttcctcgaccttttggtgcttgtattggtgtgcctgctgtgtgtgtgttgggagggtgtgtgtgcaaggtgtatctattgtctgtgtacacttaaggatgtctcccagaggggtggctcaggagagcgcttatgtatggacttgggtgaagctcaccagctcctccacaggggcttcaccatagcccctcgtctaactacctcccgcaacctcttccaccaccaagaccaagcccgggatctcccaggccctgcctcaaacttcccagctacccaaactggagtgcccagcatctcctctgctgtcttcttttcccaaaaggtctctccaatagttgagaacactgagctttaacaaagcctaggggtgtctatctccaacccccagaacctccaaggcctgtggtttcccatgcccctgctagacgcacccatggtgggtgggggtgcccatggtaactcacaccatcaggtaaatggcagagtaccagctccatgcattggctcattaagctttgcaagcatcaggtatctggggtactgttgagttcctgtgcccaggcatggaggaagagtgggagttaaagatcagtctctgaccttatggggaccttagcctctctgggaaagcaaagctaatgtccttgaagcacagtgcacgtcaggccagtccaatgccaattcatggtgctgggtagatggcaatgagcatttggagaagagaaaaatctttgcatacaagtaggacgaaggaaggcttcctggaggaagtggggcctgggctgggctttaaagaataggtgtgatttggacaagcagagggaaggcagagggcaggcaaagggcattccaggtaaaagaatcgggggcaggggctaagaaatgggagtgagcggggattctggaggttagcaggcagactgggcaagtcacttccccaggttcccagcagcatgacctatggcagacagaggcaggccacccacccatccccaccgtgtcagggcccaggctctgtgtgtgggggtgtgtggggggtagtctaggctaaagccctgggagagatttggtagcaaggggatctctaggtcccctttcaagctaggggtggtggaggagcaacctggaccagatgtcctccctgacatttcagattgacagtgggcacctaaatgaacagtgacagccaagagcacaaccagggccagcagaaatcaggctgcaggcagaaaggaccccctgggcaaaggcattctgaagggtttagggtcagtacccttcagtcttcagggcccaacttcaagtaagtgtttcaacaaactcccctaggcactaggctatggtcctgccctcacctggattctcacagtgaggccccagcagacccccaaacttgacccaagggccttgttccaaagcccacggctcctccccaagaaggagaaaaaaggggcgtggcctttggggacctgggtaggcccaggactccctgcctgggtatgtcaggatttgcccctcctccttccggtccctcctccactccagggactgccaactccttccacacgccccttctggggctcccttgccaccccacgccacaccccagcctcaagacccctctctttggggtcttgaggccggcccaatatacccactatacccagcccagctgccccaactcctctgggtcccctaaccccactccacccccaccccaaggaaaccaagcccagcttgcctcgttctctccacgcacccacccgagcacccccctggcgctgcgccattccccacattcattctcttcctgttctcatgagcacaatccctgtccctctttctgaaatacttcccctattgccctcactttctcacagagcggcaaacaaagactcacatacccagaaatagcctctcacagagctgaaaggcacaggccatgtcctgccacacacgcaggcgcgcgcgcacggaggctgtcgtggagggaggcacacatacagggcgtctgtctgcacgcacataagctgccacgccacaaaagggcgcggacacacacggcgtgtgagacaagggcacacacagcagtggacgcagggccacgccgccgcccgggcacacccaccgccgccggccccgggcaggcgcgaggcctcgcgggccgggctcccccggttcctgccagcgaatgtttccctgctcggcctgccaggtctctggggaaagggcctcagaaatgcagcaggagccgctgggggaaaagttggaactgactgttccctgcctggcgcggccggcgaattccctgacggagaaactatttgtggcgagagccggtggccggcgaccccccgccgcctcccctggcgtcccctccccgcgccgcctcccgcgggcctcggcggcttcgggctgcagcactgctgcccagcgcccgcggccgggctggtcggcgcgcctcgccgcttatctgcgctgtttggacagcgggcttggaaaggcaggcggccccgtccccgccgagtcaacaggcagaccccgggccgccggactatttctgtcttatcagtgcaggaatgcggcagccgcggcggcggcggcggcggcgggcgggcggcggcggcgtgggccgtgggccgtcagggcagccctgaaggggccccctccccactccgctcgagtagaagtgtgagagagcccagcaggactcagaggggagagttggaggaaaaaaaaaggcagaaaagggaaagaaagaggaagagagagagagagtgagaggagccgctgagcccaccccgatggccgcggacgaagttgccggaggggcgcgcaaagccacgaaaagcaaactttttgagtttctggtccatggggtggtgagtgggggaaagttagcgggggagggcaagcgagctggctcgggctgaatggagggctgatcgggaggggccgggagggcgctcccgctctcccacccctctagtggggggcgtcatggcccacggcccggccgcgggactgtgctggcgccctggcacccgaacacgtcgccaggcggccggccgggtctgacgcgaggcggggaagggaggcgtttgcatggctcttgtcaggggcgggggtgggacttggggactctaccccccaagtagggggtcctcgctgtagccgacaggttgactttcgttcttttccttgtgggcccaggtgttgcccctgccctgggggtgggggtgggggatggggacatggcagaggctgggctgggctgtctgttcatccgttgggacagtgtcactgcttgtgtctccggagcaaggagcaggtgaccctggaggcactgtagcgggaagctcgcaggctgagccacctctgcatcccagcgggagggctctggagcttctgccttagggtgggggagaggaccgctctagggacttagcccaagttaggggctctgagggtctccttggcggactcagccaccagaagctgatgtccttaactcctcgaacatgtgaaggaaggggctggagttggggacatgaggcctagagaccgaagggacaggggagcactgtcctgccacaggcaggctgtgaaggcacgtgggagcccgggaggctggagctgagtcagtagggcccggctgggaggggtatggaggggtggggaatgggagaagcaggggctgcgactcttgggatgggtgagggagtggaggccctgtgtagaggaagctgtcgggtttactatggccaaatttggttgtgaccccaaggaagacaccctctcagtaaggccagagtccctagg

SEQ ID NO: 11695 - DNA, 6000 bp, Homo sapiens
agtggtgcaatctcagctcactgcaaactctgcctcctgggtgaagagattctcctgcctcagcctccccagtagctgggattacaggtgtgcgccaccacgcccagctaattttttttgtattttttagtagagacggggtttcaccatgttggccaggctggtcttaaacgcctgacctcatgatctgcctgcctcagcctcccaaagtgctgggattacagacatgagccaccatgcccggccttcaggtatttctttatagaagtgtgagaatggagtaatacagaagtcctaaatcagtctcactgggttaaaatcaaggtgttggtagggctgcagtcctttttttttgagtcagagtctcgctctgttgcccagcctggagtgcacgatcttggctcactgcaacctacccctcctgggttcaagcaattctcctacctcagcctcccaagttgctgggattacaggcgcctgccaccacacccagctaattttttaaatttttagtagagacagtgtttcaccatgttggctaggctgatctcaaactcctgacctcaagtaatccgcctgccttgggctcccaaagtgatgggattaccggtgtgagccgtggcacccagctgggctgcagtcctttctggaagcttcacaggagaatctgttttcttgccttttccagcttctacagttacctacattccttggctcatggccccttcctccatcttcaaaggcaggaatattgcatctctcagatcattcttcccttccctagccacacctcccttgggctctgacatcaggtgagaatgattttatgcttttaatgatccatgtgattatgttgataccacatagaaaatccaggataatcttttcttcttaaggtccatacccttaattgtcatggtgatcagcgactatccaggaccagaggtgcagacagtaaaaagaatgtttactcggctcactgcaacctccgcttcccgggctcaagtggttctcctacctcagtctcctgagtagctgggattacaggcgcctgccaccatgcccggctaatttttgtattttcagtagagatgaggtttcaccatgttggccaggctggtcttgaactcttggactcaagtgatccacccgccttggcctcccgaaatgatgggatgacaggcatgagccaccgcacctggcctaccgggtatcattcgaacacccagctaactccctactctaagtcacacctgagccattttatcatgggggctgtcagaggcactgctgtttttcactgaagcccatacccaatccctcggcctcgtgtgcttttccctcacccacttcaaaggcccgtggctttgggacgcctctccacctcattagtcattccctcccctgcccatcgcgtcgaaacacaatgcattgtggttatttatgtccagagctggttcctcaactaggctgtcagctagccagtgcagagggtgtgtgttagtcacatttgtatcatcagcccccgatgggccatggctacatacttgttgagtgaataacacaaggggcatctttagcatttctttgtggggcccaatctcctcagcgaaggtacagggaattctccacactaactaggccagctgggtctgggtggcattttatgacttttttgttgtcgttattttgcgatggagtcttgctctgtcacccaggctggagtgcagtggcgtgatctgcaacctccgcctcccagattcagacgatgctcctgcctcagcctcctgagtagctacgattacaggcacgagccatcaagctggttaatttctatttttttggtaaagatgaggtttcaccatgttgcccatgctggtctcaaactgggctcaagcgatccacctgccttcatcttccaaagtgctgggattacaggtgtggaccaccacactcagcagagtaaaaaatgtttaacagctttattaatataggattaatatgctgtacaatatgccatttaaagtatacaactcagtgtcttcagtatattcacagggttgtgcaaccaccaccaccatctataataattttagacaatttctgtttcccaaagagaaactccctacttattagcaatcacttcccatccttgcccccaacctagccttctgtctgtatccatagattggcctcttcttggacattctatataaagtgaatcataccatatgtattcttttttttttttttctagaaggagtctcattctgtcacccaggctggagtgcagtggcgtgatctcggctcactgcaacctccgcctcctgggttcaagcaattttcctgcctcagtctcccgagtagctgggattacaggtgccccccaccacacccagctactttttgtatttttagtagagacggggtttcaccatgttggctaggctggtctcgaactactgacctcatgatctgcctgcctcagtctcctaaagtgctgggattacaggcgtgagccaccacgcctggcgatttttgtattttcggtagagacagggtttccccatgttagccaggctggtcttgaactcctgatctcagatgatccacccacctcagccacccaaagtgctgggattacaggcgtgagccacctggccaggcaatatatattattttgtgtctggcttctttcacttattaatagcatcatgttttgggaggttatccatcttgcagcatttatctatcagtctgtctatatatattttttgcaacaaggtctctcactctgtaggctggagtgcagtggtgtgatcatagttccctgcagcctctaccttctggctcaagcgattctcctacctcagcctccccagtagctgggactagaggtgctcaccaccacacctggctaacttttcgtagttagggggtctagctatgttgcccaggctgctctggaactccttgtctcaagaaatcctcctgcctctgctccccaaagtgctgagatcaagcctggcctcctttttatttttatatttttgagacagagtcttgccctgtcttccaggctggagtgcagtggcacgatcttggctcactgcaagctctgccttctgggttcacgccattctcctgcctcagcctccctagtagctgggactacaggcgcccaccaccacgcccggctaattttttttgtatttttagtagagacggggtttcaccctgttagccaggatggtctcgatctcctgacatcgtgatctgcccgcctcggcctcccaaagtgctgggattacaggcgtgagccaccgtgcccggccagcctcctttttaagtagttttccattgcacaaatgtagcacattttattcatccactcatcagtctctagttaatgcatctgttgtatatgttcagattggctggggttcaatacccactggacaacttcctagatgagtgacttttggtaaatcataatctctccaagtctgcctcagtttcttcaattataaaatgtcaataataatgcaatgtacctcatagagagtcatggttgtattgccacagtaattaataaagtgccaggaactttataaggattatttaacacccttattatttacaaagtaggcaacagaggctattgtggtggttcacacctgtaatcccagcactttgggagttggaggtgggaggatcacttgaggcgaggagttcaagaccagcctgggcaacacagtgagacccccatctctacaaaaaaattaaaaaattttgtagctgactctttggacaataaagaattttattttagaaaattagccaggtggctgggtgcagtggctcacgcctgtaatcccaacactttgggaggctgatgagggtggatcacaaggtcaggagttcaagaccagcttggccaagatggtgaaaccccgtctctactaaaaaaatacaaaaattagctgggcattatggcgggcacctgtaatcctagctactggggaggctgaggcagggaactgcttgaatccaggaggcagaggttgcaatgagccgagatcacgacactgcactccagcctgggcaacagagtgagactgatctcaaaaaaaaaaaaaaagaaaaagaaaaagaaaaaaagaaaattagccaggtgtagcggagcgcacctgtggtcccagctactctggcaggctggggtgggaggattgcttgagcccaggagttcaaggctgcagtgagctctgattgcaccactgcattccagcctgggcgacagagcaagaccctgtctcttaaaaaataaataaataaactgcaatgtttctggcagcccagatgccaccagcctcactactctctgagaggtgggattttaacatgcaaaggcccactaacccgatcacgtctcacaacttcagctgattaatactttgttaaaacctagaccacgaaaacagacagagcccggcgaggtggctcacgcctgtaatcccaacactttgggaggccgaagcgggtggatcacgaggtcaggagttcaagactagcctggccaagatgatgaaaccccgtctctactaaaaaatacacaaattagctaggcgttatggcgggcgcctgtaatcccagctactcgggaggctgaggcagggaattgcttgaacctgggaggcagagattgcagtgagccgagatcgtgccactgcactccagcctgggtgacagagcgagactctgtctcaaaaaagaaaaaaagaggctgggcacggtgcctcacgcctgtaatcccaggactttgggaggccgaggcgggcggatcacgaggtcaggagattgaaaccatcctggctaacacggtgaaaccccgtctctactaaaaacacaaaaaattagccgggcttggtggcaagcgcctgtagtcccagctacttgggaggctgaggcagaaggagaatcgcttgaacccaggaggcggaggttgcagtaagccgagatccagcctgggcgacagagcgagactccgtctcaaaaaaaaaaaaaggttaaagaaaaaaagaaaagaaaacacaagataatcctgtccgcaaacgcttagcagtcttaaatcggcctggtggaaggatgcagggacactcccccaccctgccccccgaaaaaggggaacgcgcagcgcgaggttccgggtccgccaagctcccggcatgcagcgcggcgatcccggcgagcaccttggcgcgcggagctggcaccttggcgctgttggtggcggcggagacagctgtgaagtgtgaggttctttgtctgctggcagctaggggcgacgaggcgggacgtcatggaagtgtaagtcttctcgggcgcgtcccttttcgcccgaggagcccaacggtttgaccgctgagagctgagagccgagagccgtggggactgggcgaccctcgtacgggagtgagggcagcgggccggccctgtccgggagggccgcggggtggtgacggggacgaacgggactctcgctttgcccttccgaaccttcgcttcccctccacgccgtgtctggtgcggggccgagcacttccgtgtccggctgcctttcaatgtgccccctccttctctcattcgtttaccagcgtttctgggtcacagtgcgggggtggagcccagtctggtatccgaccccggacttagaaggctataaaggcctgagtctgtccgccctgaaagtaggtggaggagagacgaatcagggccgggtagagctctgcttgcagctgtaggcccctggagagccctcggaagagctgccctcggaatttgatgggagcagtaaacactgtgagggaaggggctggttttggggtggagaagggaaggacgtgaaccaggactgggaccagagaaacagcagggggtgtgtgggtgtgtgtgcaaggcgagggtaaaagattttctgacagtttaactccacgtggtctt

SEQ ID NO: 11696 - DNA, 6000 bp, Homo sapiens
cagtgctcaaagataatagcctcagacagtgtgtgataaggtctaataggagatgctagggactagtgatggggtgggcgatgttgtgggttttttttccttcttcttttttttttttttttttgagacggagtctcactctgtcttgcccaggctggagtacagtggcacgatcttggctcactgcctcctccacctcccaggttcaagtgattctcctgtcttagcctcccaaatatctgggactataggcatgtgctaccatacctggctaatttttgtatttttagtagagatgggggtttcaccatgttgcccaggccagtgtcgagctcctgacctcaggtgatctacccgcctcggcctcccaaagtgctgggattacaggcatgtaccactgtgcccagcctttccttctttttttttctgatccaaaaattggggcataggcactgaagagtgtatttttggagacaatggagcattatttgaatctccagctgcctcatcaaatcagatggtttttaaccaccagtgttcagaggaaggcaggccagccactatacactgatgtggccagcaaaggttttgcggagagatggtaattcatccagactttgaaagaggttgggatgtaggagatgtaacatgtctcccctgcccccgccacccaaagccacaaaggatgccggaggctgtgtggggcggacgtctgtggatggagcggtaaattctcagcttttagcgctgaggccaccagggttatctatgctcagtcactgccttttcccttaatcctggaccagtgcccgtcaccaaagtgcatgcttccttctctattcagagtctggctaaagttcaacagtgttggacattgcccagttcagtgtaaatcagaaccctgggaaatactgaggagggggcatgactagtttattttgcaagatcagctggaattcacacctgcggagatgttttggggtgtcgtcaagcatcattgacccacagaacatctgagagcctggtcttcactttttgtgcagagaccacaatgcttatgaaatacgaaatttttcctgtggaagatatcaggtcggtgcaaaagcaattgcggtttttgcctttttttttttttttttttggacagggtctcactctgttgcccaggctggagtgcagtggcacaatgtcagctcactgcaacctctgcctcccgggttcaagtattctcccatctcagcctcccaagtagctgggactacagatatacgccagcattgtccggctaatttttgtatatttttggtagagacggggtttcaccatattgcccaggctgatctcgaacttccaacctcaggtgatccgcctgcctcagcctcccaaagtgctgggatgccattttaatgggggaaaaaaagaaccacaattacttttgcaccaacctattccaataaaaggaaaagtagttcctttaaatggtggattctcctgtcatagaaaatttgatttatggcttgagcagtgtttgtttcatgagaaggggtcttggaagaggtctctgcgtctccctgtaaactcagcaattatccgattccacaagggttgttcaaaaattaagaacgaagagcttgtcagcagggacttggagcattgtggttgccacgtgcccagctcggtggctcagagtgtggcctctcacgctggatggaggcggattgcgttgacctacctgccccagtacctaccagatatgagcctatgggcaagtgacttcatcccttggtgctttgggctccttatcagtaaaaagaggagactaaatattacctacctcatagcattacttcgagtttcaaataagttaaaatataaagtgctttctacaggacatagcccctggtaagcggataccatgcaatgaaccaccatgattagggttttggtaaaacctactagggttagggtttactgcagtaaacatacggggtagccctgtttctttttttctttttttttgagatggagtctcgctctgttgcccaggctggagtgcagtggcgtgatctcggcttactacaaccaccaccttccgggttcaggcaattctcatgtctcagcctcctgagtagctgggattatagatgcccaccacaatgcccggctaatttttgtatttttagtagagatagcatttcaccgtattggccaggctggtctcaaactcctgatctcaggtgatcaacgtgcctcagcttcccaagatgctgcgattacaggtgtgagccacggtgccctgcctggtccattttttcatcttcccattgcagagtctgggacgctattaccctggggattcaggtcatgagcttggctgatcagggtgtctggtttgcacaacagagtcaaactcgcatcccctgccgtgaaacagatgccccgctagaagccgggagtggacagcatcctcctctccatagaattggagtgctcattagtggcaagaatcctaaggcgaactttgcctgtttaagtggaggagattagtcactgagataataaaataaatgcatgtgaaagtgtttaggaaaaatgaaaagtctttatgcaaatatgcagaatgttgccgtaagagcccgtacacagtgggaatgtcatacctatggctgacgcaccttgctgtcagtgtgtgggagcgtggtgtaaacttagcctgtgagcctgactcctgtctgttcctgccttccccgctctgcccccaggtggcatgaagcccaacacgttggtcctaggtttctacgatgacgctccaccgcaggaccatttcctgacggacccggctttctctgagcctgcagacagcaccagggagggcagttccccagctctgagcaccctgttccctcctccccgggctcctgggagcccccgggccctcaatccccaggactatgtggccacggtggccgacgccctcaagatgaacaagaatgtggtgctggcccgggccagcggggccttgccccctgagcggctgagccgggggtctgggggcacctctcagctgcaccatgtggacgtgtggcccctcaacctgctgcggccccggggtgggcccggctatgtggatgtctgcggcctcttcctgctgcagatggcaaccatcttgggcatggtgcccgcttggcatagcgcccggctccggatcttcctgtgcctggggcctcgggaggcgcctggggcggccgaggggcggctgcgggcactgctgagccaactgaggatccgggctgaggtgcaggaggtggtgtggggcgagggggccggggctggggaacccgaggcggaggaggaaggggactttgtgaacagtgggcggggagacgcagaggcagaggccctggcacgcagcgccaacgccctggttcgggcccagcaggggcgcggcacaggaggagggccgggtgggccggagggtggggatgctgagggccccatcacagccctcaccttcctgtacttgcctcggccgccagccgatcccgcccgatacccccgctacctggcgctactggagactctaacccgagacctgggccccacgctgctggttcatggggtcactccagtcacctgcactgatctgtgatgcccctgcctccagggctaggtagagagggcccaggcaggcggcctatcctgatccttggaggaggaggaagaggaggccactgtggcccgtggccctgcccttgggacgtggagcccaggggaggtttgaaggggatcctgggcttgggcatcacgcccacctcctttggcagagggaccccagcacactaactctgggtggctgtccccaccgtgcaggggagggagtccgcagcctcccttcactggtgccttgatgctaggggccaggcctcctctgtgactctgggctacctcagtttccccattttggccagactcaccggcccactggggtggtgatgttttcgttctgttttatttttctaactctgctgaccatgaataaaagaccaaaacactacaggctggctgagcagtgctggtgggtagctgagagggagggggtgggaatggagagctctgcagaggggtggagatcggagccttcagcctcccgccgcgaggctgccacgtgcagggctggggtgcggggcccggacgcatccgtggacttggaggctggctcgggcccgcacctcccatccccagctgcccgcaacccccagtgactcgggatcccccggagagccctcccctctcggcaggagggggctgactcagggagaaatggcagtttagggcctagggggccacgtgaccctcccccaggaatgtggtgacgtcatcggaggcgtggtcgtccccaaaattagggaggaagaggaaaaaaaaaagccagaaaaagttttcttttctggagtcccaaacgaggtgcgggacggaagagggggtgaaggccagaggctcggggcttcaagaccgctgtctggagtccccctttccaggccatgtcggggcccacctggctgcccccgaagcagccggagcccgccagagcccctcaggggagggcgatcccccgcggcaccccggggccaccaccggcccacggagcaggtaaggcagcccttgtgagacagaagagccacccagctgtggcgctcacctctgtcctaccgctccagcctcccgccctggctgcttcctcctgccccttccccaagccgaggcggggggaacagccgcctgcgctctcttgggaccctagatttgggggaggaggtaacgagaggcggagagggtggctcctcaaatatacacccctcctgtcctccgccaccccacctttgatttctcttccctcaacccagcactccagccccaccccagggtcaatttttgcccccttccatctgagcagtgttaccaggccccagggggaccggaggatcgggggccggcgtgggtggggtcccatggagtactccagcacacgcaggtgagacccgggatcgtggggtgggacatgtgggatcccccagaaccgagtctgagggacccaggacaggagaaggcctatggtgatttgcattcttcctgccctggctccatcctcaggggctccctgcagacagggggggccttcgccctggaagcctggacgccgagatagacttgctgagcagcacgctggccgagctgaatgggggtcggggtcatgcgtcacggcgaccagaccgacaggtgactctgcccctcctccccgtcagcaccctgcccccttctctggactctcagacccagcctgatcgatcccccatgtgtgtaatgtgcaccccagcatggaggaagcgtggctgcaagtaccaacatgtcagccacttgaggacgggaccttgtcaaatgcaaaaagcctgtgcttccccacagccagggtcatttccacaaatgtgggtcttggagtggggtccttgcttacgacttctggcctgcgtttctcctcaggcatatgagcccccgccacctcctgcctaccgcacgggctccctgaagccaaatccagcctcgccgctcccagcgtctccctatgggggccccactccagcctcttacactaccgccagcaccccggctggcccagccttccccgtgcaagtgaaggtggcacagccagtgaggggctgcggcccacccaggcggggagcctctcaggcctctgggcccctcccgggcccccactttcctctcccaggccgaggtgaagtctgggggcctggctataggagccagagagagccagggccaggggccaaagaggaagctgctggggtctctggccctgcaggaagaggaagaggaggcgagcacgggccccaggtgagccctggggaactgggatttcaggccctacagacaatgggacaccgactgggtggggtggctggtggtgttttagggggctttttt

SEQ ID NO: 11697 - DNA, 6000 bp, Homo sapiens; identical to SEQ ID NO: 2504

SEQ ID NO: 11698 - DNA, 6000 bp, Homo sapiens
ccgagtggctgggattacaggcatgtgccaccatgccccactaatttttgtatttttagtagaggaagggtttcgccatgttggccgggctggtttcaaacgcctgacctcaggtgatctgcccgcctcagcctcccacagtgctgggattacaggcatgaaccactgcgcccagccttcacttattatttttgtaaaacttggtagaatacacataacatacaatttaccatcttcactgttctaagtgtacagatcagtggcactgaagaaattcgcagtgctgtgcagccaccactgccatctacccacagaatgctcctcatcctgtgaaactgaagctcggtgtcctcattgcactgttaccccccctcccccagcccctggcatgtcccattctaccatctctcctctggcatttggcctggcctctgtgacggcactagccccttctagctggtgttgccagttgtttagaagtcttaattcccccgtaggtcaagtggcatctcattcatcctcacccctattaccgaggcacatgttgataatagaggtttgagaggaaaaatgcaaaatgaatgagagaatgagcagagagagggtcacgtgtgggttcatggttaaaggcacatagctgtgcgtctgattttatgtagcaggtgctcagaatatattgaaagtctaaatgatgatacgagtggtttttgtaaatgtttagttattttttgaataggtgaaatatttgaaattcaaaaatgtacaaaagaatacacagtggaaagtcagtcttcccccaacccagtcctccagcctcactggaggcaaccactctggccagtttcttctgcatttttctggaggagtgtacacacaccacatgtgcacacactcacacgtgtgcatgcacatgttcacacagcacatgctcgcacactcacatgtggaagcatgctttatgtactgtttgcacatcttgctttttctcatttgacagatctttgggatccttctaagatcagtatatggacagtttccccattgtctgatagcattcattgaatgataaatttatcctgtcaccatttacagctgtcacaggatttatgtcatctgtcacctgttgatgaccatgcaggccatttctgaattcttactatacaagccgtgctgcagtgagcagcctcggacgctcacgaatgactgaatgactgaatgcctgaacgtgacccctaaccctatagcccagtctaacccctgcctggtctccctggtccccaaagcaccccaccctcccaggactcccacctgcacccaccacggcttgtgatcttcctcttactccgtgccaggcactgtgctaggccctagagtgttcaggctgatgggccccagtcctgtcctcacagaggcacagctcagagggagagataaatgaggaaagagatatttagaaatcaggtttgagtgctgggatagacctgccgccctaaatttatgtccctcccctgacacctggggaggcacagacttatccttgataaccttatccccagtccaggctctcagggccaaggaggagaaagggaggctatggggtgtggggccagggtcagaggggaccgaatgcccatctggctgctctgccctgcaccacccgggccaggcctgtctgtctgatgttgtctgtgcccatcgactccccactgtgtcttggctgcctgctctccctctgggcccgctctgccaatccctatgacaggaccctgccacctcactgccctcctcacttttgaaactaactacctgtctcattggaagggcttttccacccttattctgtgaagttaatagctggtgacagtgggaggggaaggcagcattaaggccattcagatggtggggagagggcagacactgcctatacacaggttatcctcggcccaagggagtgaagccagcgctgacctccgggcaccagggtctgggtcccaggaagcctttcaagctgcaccaaaacccaccattcagaagctctcagcctctcccagttcactggacaatgctctccccactcaaaatacccaccccacctctcccttccctgccacacctgctgtccaagcactgcctccaggtttgtttcctggggttataagacactgcacctccaaaaacccctcgttcaaagggaaatgtccccaggaaggacagcagggactcctccttaccatggactcaggccccttcatgaaaacgggtagaagaatcagttttgatgaagggcattaagtaagcaaatgtggttaaaatgtccatagcgggtcctttgagtagccagaggtgtaagagtgcctggggtaagggtcctgaaggtaggaacacaggcgcgggggaaggggcgtgggaaggctgagaacgtcttccttgggccaagccagggtcagtttccctcctgtttgatgtcagcgtgttttaaaaggggagtaaaagcacaaatcgcaacagccagatgatggaagcatcccaagtgtcccacagtaaatgaatggataaacaacggtgcagtggctccagcctgtaaacccagcacttcgggaggccgagctgggtggatcgcctgagctcaagagttcgagaccagacttggcaacatggcgaaagcccatcactacaaaaaatacaaaaactagcctggtgtggtggtgtgcacctgtagtcccactacttaggaggctgaggctagaggattgctttagcccaggagtccaaggctgcagtgagcctagatcgtgccactgcactccagcatgggcgacagagtaagatcccatctctaatacaataacaacaacaggggtgtatacacacagtggaatacatttcggccttaaaaaggaagaaaatcctgactcgtgttacaacgtggatgaaccttgaagacattgtgtgaagtgaaataagccagccacaaaggcattatatgaggtacatggagtagtcaaatttatggacagaaagtagaatgtggttgccaggggacaggaagggggaagggggagttgttgttagatggatacagagctccagtttgggatgatggaaagagttctggagactggttgcacaacaatgtgaaatactttacaaaacctaacatacgctgcaaaatggctaagatggtaaattttacattatgtttattttatcacaattaaaaatttaaaacatgccgggtgtggtggttcacacctgtaatcccagcactttgggaggtcgaggcgggcagatcacctgaggtcaggagttcgagaccagcctagccaacatggtgaaaccccgtctctactaaaaatacaaaaattagccaggcatggtggcaggtgcccgtaatcccagctacttgggaggctgaggcaagagaatctcttgaacccaggaggcagaggttgcagtgagccgagatcgcgccatcgcattccagcctgggggacgagagcaagacttcatctcaaaaaaaaaaaattaaaagaataaaacagaaatattttcagatgaagggaggataggaagataccagaaagggaaggggtggaaaagctctgtctctgccttgggcctgcccataacagagacaaacccaggcagtgcagagcccagaccccaaaatacccctagtgttgaaggtgtgacctggcctgggggagaggctggatatcggcaggggcagagacgggaacctgagggagaaggacctgaccttgacctcagcctcagaccatgggtccctgctgcctgcctgcctcctactgggggcctacgaggcccacctggccccaaatgcttggcaggctccctgcccgctggctgcttagggaggtgctcccacttcccccgccgttgcctgagctctctagggctccttcactctgcaggtaggctggggtccccctctgtgctgggcactgtggtagctcagccgtgtgaggcggggccctggaagagcccatgagatggccagagctgggcttgtctggctggaagctgggaataggcttctccaagctgccaaatttaagtattgagtacataaaaggaggagattggcattagtgagaacatggccctgaggcttgatggacccaaagcctcccagggtatgtgcgttttgagggggtggggggtgcacatgggtgtccgggacctcgtctaggtaatgtctgcagccacataggatgatctgactgaatctgtgtgaggacaaccgtttgtgtgcctgtgtgtgcgcgcccacgtgcatgcgcgtgtgtggtcctagtgtaggtgatgtctgcggccacacaggatgctgactgcgtgtgtgactcgtgggcgtgcagatgcaagcacaggcctacgacacatctgtgtacaggctgaagatcacaacgggtctggccagggcccgccgagggcctccgagctggcgagcacaccgacggctggatggggcgacgcttcctgctccggtccctaactcattattaagctcctcgctctttgcagacgctccctgcgcctcccccgctccgggctgcagcggcgcaggcgccgggccgagccgagcgccgagcagggagcgggcggccgcgctccgggccggggtcccgggggagcaggtgagcgacccgcgccgcgcggcccccacggcccttggcgaaggcgcctcccggccgcgctgcgccggcgcccccgccttccctgcctggcagtctctgctcgcctctgttggcatcctcctcctcctcctcccccctgcctggcatccccctcctccccctgcctggcatcccttctcctccctgcctggcatcccttctccccctgcctggcttccccctcctccccctgcctggcttcccttctcccactgccaggcatcccccctccttctcctgcctggcaccttctcctcacctggcacttcccctcctccctacctggcatccccttctcccttcctggcatcttcctcccctcctcctttccaggtatctccccccactcctgactctttccgtccccccgcctggcacctccctccacccccaccccaacctcgtacctcttcctcctaccccttccttgcacctcttccctgactggcagactcccattcagcccctctgtgacaccacctcctccccatcgctgcctggcatcttcccctccttccctctccagtaccttcctatcctccctccacctgcatctcccctccttccctcgtctggcaccctcctgcctggcaccttcccctcctccccctgtctggcaccacctcctcccattgcctgtcacctcccccctgccgagcactttctcaacctgctcctgcctggcatgctctgcttcctactccccctgtctggcaccttccctccttcccctgcctggcatcctctccctccttcccctacctagcaccttcccatcattcccctgcctggcaccttctctgtctccacttggccaccgtcttccctggatacccctctcctattcaggttgtccctctgtcccccaccttcttgcagggcacctcccccccgaccctggactggtagcccctcccctaccgcatcttcctctcctcatcctcccctcccactctgtctcccggaccccaccagctctcccatccccagcactccctgtctccagcctcctccttcctcatcccctttcctcccaaccctgctcaggattgatccatgggcagcagcctcttttgctcacatggcttaaccagaccctgagccactcccaagccccacctctgtcacccacaccccgctcctacagcactgctctcttcttagctcccatgccccaccgtctgctcagggacttcatttcataagttgggtcctgacccaacgagctggaggccttcctgctcttccagcaaggaaggaagcagggcaggacaggacagagcaggcactagcagggaccagg

SEQ ID NO: 11699 - DNA, 6000 bp, Homo sapiens; identical to SEQ ID NO: 2505

SEQ ID NO: 11700 - DNA, 6000 bp, Homo sapiens
ggggaggcaggggctgcgtcactcgtgaaggggcatcgggaccccagcccacttgtggtcccacgtctgaaatccaccggacagggagattggtccaggctcacacccgctgggatggcaggaggcaggggtggcacgtggacagatgtgggtcccaaaatccgggcaggggggaaggtggagggtgtggtccgtgccagctgtacccaggcaggtagggctggctgggtggggagggggtggggctgggaggagttcctgggtctggggagaggccactgctcaggagcaatcatctctcagggacccaggctgcccgccgctgtgaggaggcggcagcagaggccaggaggccgggggccgagcttcaggcccaccccgccttggcccccccctcaggcccagagacctgcagccaacctgcctgacaggctgagcgccaccagggaggtgagctgcgtgggtgtgggagtgcgagagtgtgtgtgtgggggaagggggtgcataccagaggggtatggtgtccaggctgagcccctgcacttcaatggggtggggggctcctcgaaaaaaaaaacataccttgaaattcggagaatcacagtccgccaacccctaagcctcaccgccacctcagaggctgggccccaggacggcacctggacaccaaacagggtctccagccagcctggcaagtccaggccagacgagcaccccccatcctggctccagatgaaagggtgcccccgacccgtacacgcccagggctggcagctccctcaggtgaaggcaagtataggcaggccctgggtgactttctggggatgggggcaacagagggaccagggacaggagcagggaggtgggggcttggccccggaggacaggacgggagacctatgggaggaagagagcagatccttgggacggccccaccctgggatctggggctgatgggctcaggcagaacagaattgctcgagagtcagaagctgaggcaagcgcccccctatgacctgccaggtcgccaggtcagctgagacagtggagctgagtcccagggcctggccaggctggctctcccatgcagcagcctacgtccctagaagggcagatgacagggaggccaacctgaggccctggcccggcctccctgacctgccgcatagctcttgccggtggagacaggcccaggctggcataggctctgcctgaggtcacagacacctcacacagccagagccaggccccagcttgtggcatgtggtccagggcctgctcctcctggctgtgggggctgctccccggccccagtgaggagggggcatgtgggtcaccaggaggccatgctgcctgcccgccccacgcggctctcaggaggccgtgcccgtggacaggagccgggggaatcccagaagcagagccgggaggatgtggagccccatccctgtcaccccctgctcacacccggggctgctgccttggtgaactgctggccagggcccccaggggagggccgcgggacctgggaagccgggtgtctgagatgggtgcccaccggtcacctcatccccctagtgtgcagctcagcctgggacatcaaatgagccagccctgaggaggcggctcctgggcgccccgagttccacccagcagtgaaggaggcaggcaggggggtacaccatgcctgtccgcatctgcagagagacgggcaggcagggggtcggggtgggcactagcagggcagccggcctggaaccaggcaacagctcatgggccctcagccgggtttctcatgagagcaggaggaggtggctgtgccagggccagggtgtgggactggctgggcggcttctcagcctccccacagctctgggcacctggacgcagtgaacaatggtcagagggccccgtcgcctggatctgggcagacaggtctgtcctgcaatgggcttggtcagtgtcccgcccccgccagaaaaatcaggcccagccggccctgccgcctcctgtgaccgggcgcagaggctgtgacaccagcaccgggtgaggcctcgatcagccggcgagccctgtgagcaggtggcagagcggtcaacctcccgactgcccctccctggggaccaggccctgctcctgacatccccagaccagtacacttggtccacggttcccgagctggcgcatctggctcagccgggacagctgtgggctgaggagatcagcaggcctccctgtccagtgcccagctggccctgtgagaaaaccccacctttttccacagaggatctgcctctggcggaagacagagctttggaggtccctcagtctgtgtccggggcccaagccctgagcctgcccgaagccagagccctcccagaagcctggctctgctggctccagccaaaacggtcctgctgacatctagccacagtgcctcctgctgtctgcacagccattcccaccgtcagcccagggaggggcccgaggcttcatcctgtgctgggggctggacgcaaatcaagcaggggctggggcctcagtttccctgcctgtagcatgagcgagttggatgaggggattcccggtcccttccagctctgcgcatgcccaggcaccaaagtcttcacccttcaaacgggcccccagccatcgtcacttcatagttgtccgtgacggtgatcccgacacagccagagggcgacatccacacgcgctgagccgactgcctggggctctgcaggccgggtgggaggccggcaggagtacctgtggctgcagtgggaatgcagctggatggaagttggggaccgccttccagcacccctgcctggccaaagggagaccttagcccacagggtcaccgcctcagcaggacagcccccaccccgcaagccctgtgccccgagcatggacagggcacagctctaggctctggcagctcctgcagagggaggaccagcagcaaacacagacaggtggacagggagtcacacacacagtgaggagggtgatgggacagcggggatggtctctccagaggtgacgcctgaggctgcaggacagagtcacccgggagcagggtcggttggtccagaaggtccctgcctggggagcaggcaggctccaggagggcccagccagggtgtgcatgctgtggctctgggcccgggcccgggtgggcgctgatggggaggttaggcaaggcgggcctgagagctgggcacgacttcctgagcttgttccccacctgggagcctccctggagggacagtgtcagtggaggagttgggaaaagcaggcagggtgtcccagggaaggatgggcctcagcccgggcccctcacggacccctcaaggatgctggacgcgttgatgcgcctctcgttcccatctctaaaaggggaacaggccggacgtggtggctcaaacctgtaatcccagcactttgggaggctgaggcgggcagatcacctgaggtcaggagttcaagcccagcctggccaacgtggtgaaaccccgtctttactaaaaatacaaaaattagctaggtgtggtggtgggcgcctgtaatcccagctactcgggaggctgaggcaggagaatcacttgaacccaggaggcggaggttgcagtgagccgagatcgcgccattgtactccagcctggcgacagagcgaggctccgtctcaaaaaataaattaattaaaaataaaaggggaacagtggctccagtcattccagcctcaaccccttgagccctgttgctcagggctgtgggagggtaggagatatgaaggacaaggagtgtgtggatccgttgcgggcatggagcgggacttggtaatggtggccccagcggcatgagcccaagcgtaaccagaacaggacaagaggtgggctgagggcccacatccctctcccaggagccggggtgagtgagttttttctccacaggggcctctgcatgggggtgacagggaccctcagggccccgcaaccccttgccagaccccaaagggtccagggactgggctgtcactccccctctcctgccttgatccacaaaaaccagaaatatttccttttttttttttttttttttttggacacagagtctccctctgtccccaggctggagtgcagtggtgtgatctcagcttactgcaacctccgccttctgagttcaagcgattctcctgtctcagcctcttgagtatctggaattacaggtgcacgctgccacacctagctaatttttgcgtatttcgtagagacggcgtttcaccatgttggccaggctggtctcgaactcctgacctcaagtgatccacccaccttggcctcccaaagtgtggggatgacaggcgtgagccaccacgcccggcccagaaaacaaatgttttcaactcatctcttggggcgtggattttttttttaattcagatgaaattcacataacatcaatttacccaggtttaagtgaacgattcggtggcggtaagtatatccacagtgctgtgtgcctgccgcctctacctcatttcaggactcctgtcaccccccagagaaaccctgtaccattagctctccacccctcctcctgcagcccggccctccttggcctgccgcagacctctcccacgtgtccccaccaggtggcagctgcctggccgtctggcataggcaggtgagggcgccaggcggccagcaggttcctgggagccagctgccacccagcaaacaaccgggaggatagggtgtcagccgtgggaggggacaggaggggacgggcctgcagcctggggcccaggtgggccactggggacgtgaggcactggccgccccgccccagcctggcacagcccttcagatcctggccttgccgcacccacagtggggcctccagttggggccacgtggccatgagaatgaccagctaggcttccctggaggccaggcctccctggactgggccaggtgcttcctgccagcaaaggtagagctgggccctgtgaccgcagaccagagggagaggaggaggctggactgggctgcgagtgtgggagagggtggactcagggccccagcaggttagtgggagatggaacaggcacccagggctgccaagaaccccagcaaagccgggctcccaggtgggtggacaggtcccagagccagtgagggccggctcctcccatgagggtggctgcacaccccctcctgccggggcaggcagtgctggtctgcgcccgctccccagccctcccgggcaggcagggcggcaggggttccccctcttctgccccactggaagacggtctttgtcccctaagaagcaggctccctgcaagcctgagactcggagttggaagctggttttacaagggggaattgaggtgggaccctcaggtcgcaggtggttgatgggtgagcttcgatggctgagctcggagcagggagggagccgggcctggcgctggtgtccgtgtggggggtgcggcctggtgggtggctcagcctcagctcccgtctcactgtctcctccctcccccgctgcttcctgctgccgggagccagtacctttgccctcactcctcccggtgtgtgtcctccctccctctgcagatgagtaatgtctcagggatcctggagacagccggcgtccccctggtgtcagcgaactggccgcagcccagccccccaccggctgtgccagctgggccgcagatggaccacatggggaacagctcccagggggccccctggctcttcctcacctccgcactggcccgaggcgtctcggggatcttcgtgtggactgccctggtgctcacctgccaccaggtaagcccttccgcccccgagcctccttcaggaccttggtctccacaggacgtggccgtggctcagcccggtccccctgggtgccgctgctatagacgctgtcagaagtgggatcggccagggcacgggggaggggatgagcttccccaggatg

SEQ ID NO: 11701 - DNA, 6000 bp, Homo sapiens
tggctcacgcctgcaattccagcactttgggaggtcaaggcaggcagattacctgagatcaggagttcgagaccagcctggccaacatggtgaaaccccgtcactactaaaaatacaaaaattagccgggctcggtggcaggagtatgtaatcccagctactcgggaggctgaggcaggagaatcgcttgaacccaggaggcggaggtggcagggagccgagattgtgccattgtactccagcctgggtgacagagtgagactctgtctcataaataaataaataaaataaaataaaaaataaaagagatggggtcttgctatgttgcccaggctggtctcaaactcctgggctcaaacgatcctcccatctcgacctcccaaagttctgggattacaggcatgagccatcgcacctggctcctgttggctttaacagaaaacaggaacactcagtactccaggttcaagacatttgaacatagggaaggcagtgaggtcaggcctggccacccctagggagaggacaaggaactcagtccagcaggtcgttccaggaatacgaatgtggggagggagccggatgacacgtcaggccagcgcagtcccataggagcggctcggggaagacaactgacttcctcctcatttgttttgaataacgctttgtgctagtggtgctggaacttcaaatgctggagatcaggctgcaccaccaatgcttctccaaggatagcagcccccagggtgggcaggtagtttttggattgggaaggcaactatttcccgagctctgaaccgttttatttattttttcatttagagacagtgtctcaccttgtcacccaggttggagtgtagtggcacaatgatagctcactgcagcctcgacctgcgctcaagggatcatcccgcctcagcctcctaagcagcagctggtactacaggtatgcaccactacacctggcatttttgcttttgcttttatcgttgttttttgtttgtttgtttgtttatttttttatttttattttttttttgagagacggttttgatacgttgcccaggctggtcttgaactcctgggctcaagcaatctgcccgcctcagcctcccaaagtgctcctgcactgttttaaggtcctgtctgaagtcctgtgaatgtactgtctgaggcacagtcctgataaatcctgctacagatgtgaacagcacgacctaagtattggttctgaatttttcctcacactttagctaaggtgccggtccactgctgaagtacctacgcaaataaatctttagggctaaagaacagaaaatacagtgtccaaggttgagagttaccggcaagctataactcctgttggctaaagaaagggatgatcacatgtttgaccccgacgtgatttgaacacgcaaccttctgatctggagtcagacgcgctgccgttgcgccacgaggtcttggaaacctaacttttttgtgctttagatggaccctaaagagttctttttcccttttgtaattcagagggaagtgtaaaagtaaacgaaacaggatagaagcagacgccaccacggggttcgggaataatcctcttgtcattcgggaaaattcacctgcctcgggctgtgtagtctcctaaggagacacgtttgggaagccacagtggaaaatgtttcacgcagcttagcagagaaggctggggcggggttgtcagggatccggattctcttctccccagccctctgcttggggagcactaagaatttgcacgagggccagatcaacgaaagagtactatgttcaagctgggggcggtggctcacgcctgtaatcccagcagtttgggtggccgaggctaggcggatcacctgaggccaggagttcgataccagcctggccaacatggtgaatccccgtctctactaaaaatataaaaattagccgggcgtggtggcgggtgccagtaatcccaactactcgggaggctgaggcagaatcgcttcaactcgggaggcggaggtacagggagccgagatcgcgccattgcactccagcctgggcgacagagcgggactccgtctcttaccaaaaaaaaaaaaattatctttggaataatctgctccctccaacccacccccaccttccccgaaacaaccccagttcattaactaaaacgttggcatttatacatatacaaatcacagctcctgcgccctcagtccttccatccaccccaggggatcgggcattggcgtagcttccctccggcctcttcccggggcctccctggattccagtgtgcggatcctgggctccggcggctctgcgtccccgcgagtgtccggcctggggaaggggcgggggcgcgggtgccactggccactcctgccttttgctgctctcctgcacgtcccacggaacagcggccccctcagcttcccctgccccagccctcaagtccatcagctcccggaggctgcctctgcccggacacagtgcagtcgggtctcttcggtccctcgtagtcttccaggtcccatactcgcaccctgcaggaggattccctgggtggaccaggaaggtccccaggccgattcctgccccacggaggacctgacacctggggtccggcagaccccatccctgatccttcctgcggggccctctgccccagccctggcatctgccccagccctggggagtgggagttacataggccctggtgcaatgggcagggtttttcctgggggttcagttgcttagggacgcagcccaaggcgggtaataaactcctaagactacattatacccgcattataccgtggatggtcaacacacaccgcaaggagcaagtgaaataaactttgaagacagagagttcaagggtgcaaggaaccgttgagaacactcctaccgcagtacactactatatttgctggggttggttggtttgtttggagacaagttctcactccatcacccaggctgcagtgcagtggccccatctctgctcactgcaacctccgcctcccaggttcaagcaattctcccgcctcagcctctggagtagctggaatgacaggcgcatatcaccacgcttggctactttttgtatttttagcagagatgaggttttgccatgttgaggaggctgatctcgaactcctgatctcaggtgatccgcgcaccttggcctcccaaagtgctgggattacaggcgtgaaccaccgcgaccagcctggtttttttttgtttgtttgttttttgttttttttgagacagagtcttgctctgccgcccaggctggagtgcagtggcttgacctccgctcgctgcaacctccacttcccaggttcaagtgattctcctgcctcagcctcccaagtagctggaattgcaggcacctgccaccgcgctcagctaatttttttcgtattttcaccatgttggcccggctggttttgaacacctgacctcaagtgatccgcccacctctgcctcccaaagtgctaggattacaggcgtgaaccaccgcacctggcctgtttgttttgttttgtttttttaaccatttttaattcccactggcgatgctggccgtgctttcacacacctataattgtatatgcgattttcactgcctggggagaagggaagcagacatggaggagccccacaatgccacctctgaaacaagaaatgtagcagaatgaactgaacgagggtggcatttatttggcaagttatgactacaagacctgctctcgaggttgttttaaaaatcggaggcccggcgcggtggctcacgcctgtaatcctagaactttgggaggccgaagcgggtggatcacgaggtcaggagattgagaccatcctggctaacatgttgaaaccccgtctctactaaaaatacaaaaaaatacaaaaaattagccaggcgtggtggtgggcgcctgtagtcccagctactcgggaggctgaggcaggagaatggagtgaaccccggaggtggagctggcagtgagccgagatcgcgccactgcactctagcctgggtgacagagcgagactctgtctctaaataaataaataaattaattaaaataatcaaaattgaagtagcccgggcagtgtggttcatgccggcagttccagtattttgggaggccgaggtaggaggaacgctcgaggccaagagtttaagagcagtctaggcaacatagggagacgccttctctacaaaatataattagctgggcgtggtggcgtgcacctgtagtcccagctacttcggaggtggaggaagaacgcttgaggccaggagttcaagaccagcctgagcaaaatagagagcctctacccccactcctcaccacactgtttccaccaaaaaaaaaaaaaaaaaaaaaaaaaaaaaaaaaaagctggaagtggtgatgtgagcctgtagtcctagctacttgggaggctgagatgggtggatcgcttgactccgggagttcaaggctgcagtcagccgtgatcaagccactgtctgaaaagtaaatgctcgtctgaaaagtaaaaaataaaaataaaaatagactgggcgcggtggctcacgccggtaaccccagaactttgggaggccgaggcggggggatcacgtgaggaaaggagttcaaggccagcctggccaacatggtgaaaccctgtctctactaaaaatacaaaaattagcttgctgtgctggtgcacgcttgtagtcccagcgcggcctcttcccaccttttaaggtagagagcccaggctgaggcgcccctctctctaactgcaggaccctcggatttttgctgtccaggcacctcgcccttcgcttcatggccttctagtagttccagggtgttcgcagttgtgacctgcttcccgtgagcctctgctctacgcccctggatggggcgtgcattccctacccagcagccctcgcgcggtccggcacagcggacaccaggactccaaaatggcgtcagttggtgagtgtccggccccaggtaaggctgtttggactccgtggtggaagcaggagccagggtccagggtccagagccacactgggagagaaggaagctgcggagctgcctgccctttgctcaggcacttcgccacgacctcacttgaggcgcgccagaccccgctccgcctgcccaggcgcgccttcctgctgcccagggcctgcgccaaccgggttaggcgtggagggtgaaggcatctggggcacgcgcttctgggcctgggaatgcgccgccttgggccactgttcctctttccgctaagaaatagccgcttccctctcccgctgcgacccagttgctttgcacttgaatgttaggcgcagcttttgcccttttttcccaaggcttaagctcagatgaagctccaggaggagctcaggactaggactgtacctgataccatgtaaggttcgatgcatatatgttgaatcagagaggcgaggtgacctgttcaaggtcacaactcgtgcgagggctgagctggtattcaaacctgaggattcgtggtaaatgaactttattctctaggacggccttatgactagcaggcttttccgagacacccatgtgtaaatcgctacattcatcccgctgtgcacactgatgatttttgtttgtttgtttttgaatagttagccctagatgctccatagtagccttgtcagagagtccttgttgggaaagtcgattccattttacagatgagggaaataactgttcgggatgtggtgtggcctctctgaggtcacacagcctgatagtggcagagttttgattaacacatgtgtgtcttagctcagtttctggtttttttttatcattttttttttgagatggcgtttcgctcttgtcgcccagggtggagtgcaatggtgtgatctcggctcactgtaacctttgcctcctgggttcaagcgattctccagcctcagcctccgagtag

SEQ ID NO: 11702 - DNA, 6000 bp, Homo sapiens
ttttattatatatacatattttttagagacagggtcttgctctatggctcaggctggagtgcagaggcataattatggctcactgcagccacaacatcccaggctcaaggaagcctcccacttcagcctcccaagtagctgggactacagtcatacaccaccatgccccactatttattgtttttagagctgggatctccctatgttgcccatggtggtttgacactcctgggtttggccaggcatggtggctcatgcctgtgatcccagcactttgggaggctgaggtgggcagatcacctgaggtcaggagttcgagaccagcctggccaacatggcaaaaccccatctctactaaaaatacaaaaattacccgggtctggtggtgagcctataatcccagctactctggcaggagaatcgcttgagcctgcgaggtggaggttgcagtgagccaaggtcgcgccactgcactccagcctgggtgacagagtgagactccgtctcaaaaaaaaaaagaaaaaaagagaagaaactcctgggctcaagtgatcctcctgccttggcttcccgaagtgctgggattacaaggcatgaaaccaccgtacctggccagattgtaagtaatttaagtctttgttttgtagatctgaatatctctttgtgaggagtcagagaaaggagatgatgcaaagagaaggaagcaaaaacaaaactaaaagaactttgaaggtatatgagaagaaaaagctgaaaagaaaatgtctgcctcactccctcaaaaattctaccatagagcaaaggttgacgtccagaaaacctcaagtttatcagtcccagatgctggcagtagaagcataaagctgaggtgaattttccttactattttttccccagagtctagaacagtaactgcctcccaatgtctatcacagggaccagattttctccactacataggatgtgatatgtaggcagttaaatggcattatagacacaataagcaaaattgaaacagagacaccctgttggataaaatatttacatcggtgtcctgtttccaaactgtgggctgagacctataaatgagtcatgaaatcaacctttgtgggttgcaaccagcattttcacaagaagggattaagaaacaacttcagaatgtatcttgtgtagtaacagtgactactgttttgcaaaatgtttgggtcagttgtacacatgcatattttacagggtgatgtaaaaaaaaaatgttttttttgagacagggtctcactttgtctcccaggctgaagtgcagtggcaccgtcatggctcactgcggcctcaacctcctgggctcaagcaatcttcctgccttagcctcctgtatatctgggactacaggtgtgcaccatcatgcccagctatttatttcatttttttgtagagccagggcctcactttgttacccagactggtctcgaactcctgggatcaagcaatcctcccacatcagcctcccaaggtgctgggataacaggcgtgggccaccgtgcctggcctgaaatgtctttttaactgtaggctggggtccgcaacgtttgagaagcactgaaatacagggcaatttattcactgtccaagaacattacttctatgatgtcttcagataaatttgaaaatatttgtcttacccaaaattccagttacatatccattttcaggatactctcttctgagtgagataaactcaacactggcaggtatagcaagaaaacaaaagactctgccaaatattgctgcagggtgagaaccaccagcacaatgtggaaatccagtgtaggtaaagattcgccccaaatgtgtgatcaggaaataaaacctgttaggtgtcagtgtcatgaagttcagtgtccaaatgttgtctttcttctggtaatggttactttttttttttttttcctgagataaggtttagcttttgtcactcaggctcgagtgcaatggtgcgatcttggctcactgcaacctccacctcccgggttcaagcgattctcctgcctcagcctcccgagtagttgggattacaggcacccgccaccacgtccagctaatttttgtatttttagtagagatggggtttcactatgttggccaggctggtctggaactcctgacctcaggtgatccacttgcctcggccttccaaagtgctgggattataggggtgagccaccgcacctggggtggttactgtttaaaaaaaaagtcacctgactcagacccactgagcacttggagaacatctacaggtagaaaacaaatgttacaaatatttaaatatcctgatggttttggaagtcaaggggagagagatcttacctctgtctaccacccaaccctctccaccaaggtcactataaatacaaagagcatagcttgggctacaggaaagaaggcattcatatgtataaatgtgtgtgtatatatacactgttttttcttttttaagagactgggtctccctctgtcacccaggctggagcacagtggtacgatcatagctcactgcagcctccaaaggtgcggctgaagtgatcctcctacctcaacctccctagtagctgggattaaagatacacaccaccacatggctaagaaggcattctagccctgagtggtggtgacacaggttatatacttgaagtatacacacacacatatatatgtatacacccatatgtaaatataacacaaaaaactatgtatttcactctatgtatatatatttaccattttaaccgtttttaagtgtacaattcaatggcattaaatacattgttgtgcaaccaacatcaccatccatctccaggacttttttggcatcccaaacggaaactccatagccattaaacaacaatttctcatttccccttccctccagccatgggcaaccaccatgctactttctgactctatgaatttcactactctggctacctcatataagtggaactgtactgtactggtccttttatgtctgacttatttcacttagcataatgtttttgaaggttcgtctatgttgtagtatgtgtcagaatttgctaccttttttaggctgaaaaataaacgattcacaatatatttttaaaaataaaagtaacatatttggctcatttatttttgctcaccctgacatcatatttctccttggatgcctagagacaaaactaccactgtataagggctagaaacaaaactaccactgtataagggcaaataaaaatgaaaaataacaggcttaattcctctgctgaaaataaagagacttctcagccttctctctgttccttcaaaatttctttctctgtccttttcgaatgtacacaaatctttataacggcgaaatgagcctcttgccagtatcacaactcagaaatgtatcctcaaggacttgggggtcatctttttgaaattcagacgtgagttagtgcctgtatcttccagttcctacatgagggtaagagactaaattagtgggtatgggcgccttgctccaatttgtaaaactacctcctgctataaagatatgcgaactttggccggctgcggtggctcacacctgtaatgctagaactttgggaggccaaggagggcagatcacgaggtcaggagatcgagaccatcctggctaacacggtgaaaccccgtctctactaaaaatacaaaaaaattagccaggcgtggtggcgggcgcctgtagtcccagctattcgggaggctgaggcaggagaatcccttgaacccgggaggcggagcttgcagtgagctgagatcacgccactgcactccagcctgggtaacagagcaagactccgtctcaaaaacaaaaaacaaacaaacaaaaagatatgcgaagtttaaaaaacgaacaacaacaacaaaaagttatgcgaagtttgttttgcttctggataaagccaacatgagtggtctccccaattactactattaagtaaggaggaactatgtttgacaaaaggtgttgtcaagttctgttatttgaagactagtgattgtttatcttgagaacaggtatgtaatggttgttgtggagattttctggattaagagaagttttttttctttaaaattcgaacaagtgtctgtattttttccctttatttaagaaacggtggcggcggtggtggtggtggatggggggcggctctcactaccttgcccaggctggtctcaaactcttgttctcaaatgatgctcctacttcggcctcccaaagtgttaggattacaggtgtgagacacttgtgttggattttttttttttggaggcagggtctcgttctgttgcccaggctggtgcagtggagcaatcacagctgccagcctcaaacttttgggctcaagcgatcctcgcacctcggtcgccccagtagcagggaccacaggcacatgccactactcctggctaattttaacattttttgtagagatggggtctggctatgttgctaaggctggtcttgaactactgggttcaagtgatcctcccttctcgacctcctaaagtgttggattacaggcgtgagcccactgtgcccggcctgcatttaattagacacctaaaatttaggccggtcagtagcacacttagcagcacgttactttttataaaaacaaagaccgaataccgcttttttgaaaaaaaaaaaaaaaaaaaaaaaaaaaggatgcaccagttctccccatatcatttcttctctctacctctcgtcttttgcagctaacattactggccaggtccgcagcagcagagttctgtgggctcccagcctccgccctcctcgccctcctccgcgccggcaggtgaggccgcgtggcgggactacaactcccagcgtgccccgcgacgggagggtcacgtgggcgtccggaaaccctggtcgcaccgccaggggtgagctggcggcgggggaggcgggcagcggagccaagctgacccggcgagcggagccggggctggagagcggcgaccactgcggatctcgggtgcgcaagcggtgatgcgtggggccgaagacctgctggggcgggggcgggtccaatccgaggggcttcccgggtcgggagggcggtggggagatgtaggtggcggccccccttgggtggggcgcccaggcagggtcggccgctcgccccctccttctcctccctgggcccgggcctggggtcccggccgtcacggggaggctgcgatggggtggatggggaggagaaggacccccgggggaccctgcggcccggccccgatccatgcggcagaggcttttgtgctcctcgcccgcctgtcctccggccgtgggtctgggagattctgacttgatcagaaaagggcttgtcgttcggaccaggggagaggggatgcttttcaggtaggtggggaaggaagctctttggaaaggatgtatagaggtcagagaagaagcgtggtctcagtgagtgactggttttgttttctggtaactagcatgaactcagtcaaggaatttggtcaaattattcgtcattccctccttattcttcgcagggtgtgttctgtttattctcagttttgacaggagataatgggaatgtgtccccggagtttttagtgtttttttgaaatgtaagatggtaggctatctcgtggtaactcttactgaaaagtttatagtttatagggaggagtggttcctggggtgagcaaaatcattcagttgttatctttttgtccaccggtttatttctacctttacacaaatttatacatacataaatatatataacagttgttgaagggaatgtcttcagtgctttggtgcttaaatgatttcttttcagtttgtttgatgtttcttggatactaggctctatactaagaactccatataaattatctcatttaattaatacatgaggaaattgagcttcgggttgggcgcggtgtctcatgcct

SEQ ID NO: 11703 - DNA, 6000 bp, Homo sapiens; identical to SEQ ID NO: 3091

SEQ ID NO: 11704 - DNA, 6000 bp, Homo sapiens
aatatgggaaaattataacaaaattcaaatctaggtatgtgggtgatgggtagacattcattgttctattatttcaacttctttctgtgtttgaagtttttcataataaaaagttaggagacgtcgggtgtggtggctcatgcctataatcccagcactttgggaggctaaggtgagtggatcacttgaggtcaggagttcaagaccccgtctggtgaactcccgacagagctcaggtgaaaccccgtctctagtaaaaatacaaaaattagccaggaatggtggtgggcacctgtaatcccagctactcagaaggctgtggcaggagaattgcttgaacccaggaggcggaggctgcagtgagctgagatcgcaccactgcattccagcctgggcaacaaagcaagactctgtctcaaaaattaaaaaaaaaaaaagaagagaaatgttattttttcacatctcactaggtatctagaatacagtcaggaagggaaaaagcttggaaactctgcagtccatggcagcagaaggcactgaggggctggggaactagaaggatgtttgcgtgcatgggtgggggtcggggagttgctgcataaaagccagggaaatgaagaaatccaaagatgaagtgctggctaatataagccaagttggcattatattataaatagtgatcaaagagaattaatgatggccacccaggttcccagctctttcatcacaagtttcttgtgtgactacataaagaacctcatcctgctgaagaagaacctcgtcttaaaccacctcattccaacagcctgagaagcataggagtacattgtggtgctaaagccgggtgccctggtgccacctgcgatcccagctactgctactcgtgaggctgaggctggaggattgattgagcccaggagtttgagcaacctagttgagcctgggcaacctagcaagatcctgttatttatttttatttatttatttatttatttaagacagggtctggctcagtcacccaggctggagtgcagttgcagatctgggctcactgcaaccttcgcctcccaggctaaagcgatcctcccacctcagccttccaattagctaggaccacagactcccacaaccaggcctgactaattaaaaaaacttttctgtagagatgggggttttctctctatattgcccaggctgatgagctcaagcgatcctcccgcctcggcctcccaaagtgggattactggcatgagccatcgcgcctggcctgaggcactgttaacacacacacacgcacacacacatagaccccaaagagaagaatgccaatgacacgctgctgcacgagcctgcgagaaatgggactacagggtggctggctgctccaagctgcatgttgtgatgttgtagaattaactgataatagcgctcagccggcggcccgcggaccgggcgtcacaggcggctcctccgggcgcgttgcgctgcgggtttcgctgcggcctgtgggccccaggccaagccttcgtgcgccctagctcaggagggccctcctggaccctggagcggaccctcatcgtggtgaagccagatggggcacagcggcggctcgtgggggacgggatccagcgctttgagaggtggcttcacgctggtggggaaggacgcaggcgcacagcgcgtccttgccgggcaccgcgagggcccgcgagggcccgcgggggaagccctgctacccaaggcctgcgaagggtccagtgtggtcccgcgccccgggaccatacagggagatttcagcgcccacatcagcaggaacttcttccaggcaagcaactccgtggaaggggctcggagatggatcccgctgtggctcccgagcagggacctggtgagctgggcacggcgccagcacagccgcagccacccagcctgaggcccaggccgccctcccaactccctcggtcagcaagaacccaggcccacacccatatctgcctctcccaaaccgctttcctgttcacctctgcccacccccagcccagaggagtttgagccaccaactttagtacctgtaatctcagctacgcaggaggctgaggcaggaggatcccttgagtccaggagttcaagactagcctgggcaatgcaccaccacgcctgggtaatttttgtatttttagtagagatggggtttcaccatgttggccaggctggtcttgaactcctcaagtgatccgtctgccttggcctcccaaagtgccaggattacagacatgagccactgcacctggcccctagaatttttatttttatttatttttttattttttttgagacggagtctccctgtcgcccaggctggagtgcagtggcgcgatctcggctcactgcaggctccgccccccggggttcacgccattctcctgcctcagcctcccgagtagctgggactacaggcgcccgctacctcgcccagctaattttttgtatttttagtagagacggggtttcactgtgttagccaggatggtctcgatctcctgacctcatgatccacccgcctcggcctcccaaagtgctgggattacaggcgtgagccaccgcgcccggcctagaatttttaaatggaataaggtaggagtctctccaaagagggagttttctttgaagattacatcttggtcagtggattcatcaagaaatgtaggagggttttctgtactgaagttgtttgaaccctgctcttcaccccaacccttctgcaggttttagtaggtctgagctgggcgggcaaatgtcatcttactcttctcactttcctggggttcataatggagaccactttccccagaggcttcacccatgaccaagtgagaagatagtccaggggcccagtgtggtggctcacacctgtaatcccagaactttggaaggctgaggcgggagaattgcttgagcctagaagtttgagaccagcctgggcaacatagcaagactccatctttttttttttttttttttgagatggaatctcactcagttgcccaggctggagtgcagtggctcaatctcagctcaccacaacctcctcctcccaggttcaagcaattctcctgcctcagcctcctgagtagctgtaggtgtgcaccaccatgcccggctaatttttgtatttttaatagagacagggtttccctatgttggccaggctggtctctaactcctgacctcgtgatctgcccacctcggcctcccaaagtgctgggattatgggcgtgagccaccacgcccagccacaagaccccatctttacaaacaatacaaaaatgagccgggtatggtagtgcaagcctgtagtctcagctagctattcagggggctgaggtgggaggatcacttgagcctgggaggtcaaggctacagggagctgtgattgtgtcactgcactccagattgggtggcagagtgagaccatatctctaaaaaaagaaagaaagaaaggaaggaagaaaaaagatagtccagagaacctaaggagcactaccttggcctctgctgtgggccaggcaacccgaggcctctccaggattcctcatcatgagtgacacacagcctccctccaacacccagtcaatttcatatctccctgatctctctgttcctatgccctggaaattttgctgcattacccatgtgtgatttgatcttggaacctgttaggaaattattctagaaatggcgtttgtcagaacatgctggcaccaagaagctgtaaaaaggttctttctggagctgaagggcacagggcttggaatagtggcaggaagggttttgcaaaccgtctttctgaagagacaccaccccagaacttcacatcccccaccataactcttccctgggcaggctgaggggcaggcaccagccacaggggctctgtgaggctgggtgttggtagttcagggctgtttgctccatggatggacaatgaagtcctttaccatcgcttcttgtgaggacagtgctttgacatgtgcattttcaggtaatgtgagtttttcaagaatttccttatgtcatcaagagtatttgtgccaacacatggagtagagaagggctttattctcaaggaactagtaggccacagggaaaatgcacccctttccacctcttcccaggtgacaaggccttaaataccaaaccaagtgtccagaaactgagcttcagttccctgatggctgctgaacaacatgaccatgattccctattgcctttgtcttgcttttatattttcttttctttttttttttttttgagatggagtcttgctctgtcactcaggctggagtgcagtggcacaatctcggctcactacagcctctgcctcccgggttccagcgattctcctgcctcagcctcctgggtaggtgggattacaggcccacgccaccatgtccagctaagtttttgtatttttaggatcgatggggtttcgccatgttggccaggccggtcttgaactcctgacctcaggcgatcctcccgcctcagcctcccaaactgctgggattacaggcgtgagccatattgactggcctggttttatattttcaaagcattttcacagccattccctctcttggtcctcacaagagtttaattaagcaactgcatcatatgcttgagcaaagggaattcatagaggtgtgtgacttgtccaaggatacgtagtgcccaagcccaggggtttgagtctcataccatcaccctctccttctatcacgggccaggtctgcccaggtgggtcacagagagctgtgggcccctgccttggcttgtttttttttttgttttttttttttaattgatcattcttgggtgtttctcgcagagggggatttggcagggtcataggacaatagtggagggaaggtcagcagataaacaagtgaacaaaggtctctggttttcctaggcagaggaccctgcggccttccgaagtgtttgtgtccctgggtacttgagattagggagtggcgatgactcttaaggagcatgctgccttcaagcatctgtttaacaaagcacatcttgcaccacccttaatccattcaaccctgagtggacacagcacatgtttcagagagcacagggttgggggtaaggtcacagatcaacaggatcccaaggcagaagaatttttcttagtacagaacaaaatgaaaagtctcccatgtctacttctttctacacagacacggcaaccatccgatttctcaatcttttccccacctttcccccctttctattccacaaaaccgccattgtcatcatggcctgttctcaatgagctgttgagtacacctcccagacggggtggtggccgggcagaggggctcctcacttcccagtaggggcggccgggcagaggcgcccctcacctcccggacggggcagctggccgggcggggggctgacccccacctccctcccggacggggtggctgccgggcggaggggctcctcacttctcagacggggtggctgccgggcggaggggcttctcacttctcagatggggcggttgccaggcagagggtctcctcacttctcagacggggcggccaggcagagacgctcctcacatcccagatggggcggcagggcagaggtgctccccacatctcagatgatgggcggccgggcagagacgctcctcacttcctagatgggatggcggccgggcagagacgctcctcactttccagactgggcagccaggcagagaggctcctcacatcccagacgatgggcggccaggcagagacgctcctcacttcccagacggggtggcggccgggcagaggctgcaatctcggcactttgggaggccaaggcaggcagctgggaggtggaggttgtagcgagccgagatcacgccactgcactccagcctgggcaccattgagcactgagtgaacgcaactccgtctgccatcccgg

SEQ ID NO: 11705 - DNA, 6000 bp, Homo sapiens
aagaaggctgggcgcagtggctcacacctgtaatcccagcactttgggaggctgagacgggagtctcacctgaggtcaggatttcaagaccagcctggccaacatggtgaaacccctgtttctaccaaaaatacaaaaattacccgggggtggtggcacacgcctgtaatcccagctactcaggagactgaggaagaagaatcgcttggacccgggaggtggaagttgcagtgagccgagatcgtgccactgcattccagcctgggcgacagagagagactccatctcaaaaatataaaagagatgagggatattacacaatgattttttaaaagaaggttcaatttgccaggaagttgtcaaaattccgtatttgtttgtacctcaattacagcctcaaatattgaatgcaaaagttgacaaaactacagggaagaaagaaacccgcaatcatctctgtattcaacagaataattagaccaaattttaaaagacaggaaaaatatggatgttctgaaccacacaattagcactcttgatctaatggacttacccggagcactgaccccacaactgcatgacacattcaagagccacaaaaattggtcatatggtgtcttttaactaacatcaaaaaatagaaatcatcaaagtatattcgcaggtcacagtgcaactaagctacaaatcaataacaaaaagataactagaaaacctccgtatgtttggaaattaagaaatatacttcagagaagatgggagggaataagatacaggacctaggtggaaggttgttttcgccaagaggaaggacctcctttgtgttaacctccgcgtgtctggaccatagctgcaccgcctcccagtgcaattttgaacaagctaaattagtcatcctgggaagtgttcaaaaattattccaaatggtggactccaggacttccttgctgactttcttactttgatcaactaactctatggcatgatcttaacagctgtagttctcaaggtttcctaaaagggaacctcttgttctctccaaattacagacccatcactgaagggcagggagtgaggttaactcctccacaaactaagtgctgctcaggtccacatctagatgtttcggtcccacaaccacccagagcctgacattattttgtaaaaacagatcctgacagagccaggagcaagaagagccatcaaccccatctctgtgagggagctggggcttggcaggcacaggcttggttagggccacaattctcctctgaatagattttgggttaactggagatgaaaaacccaagttcaaggtgagaggtcttttccccgagatggacaggtggcaacggggcctatcagaatcacaagagaagcttcattaacatgaaatattcttccctgggccgttccaggccacagactgcaggttttccatcttttagccctggaaactctctgcctacttcttttctttttcacatgaaatcttatcagggataacaggtgaaattggaagcagtaagagccctggaatcccactctcttggctactcctctctccaaccaccaccatggtgcctagccacagacatttcagcctgaacttttaaaatagtgtgtgtaaccaaatacctatctcacccatttaaaaaaaaaaaaagtcttgagaaagtctagctttgagtaaggcaacttcctgatatgcgctccaaagtaaacctgatgcaaaatgtatgagtgaggaaatgggccacatggagttgttagttgtagacctgctacaaacagcaaatactggtgacactcgtaaagtaaaaagtggccacacacacacagccctttctttggggttaatagttatcattggccagtccagcccaccctattttttttttttttttttgagacagagtctcactctgttgcccaggctggagtgcagtggcacaatcacggttcactataacctccacctccccagttcaagtgattctcctgcctcagcctcccaagtagccgggattacaggcatgcaccaccacgcctggctaatatttctgaatttttttagtagagatgggatttcaccatgttagccaggctggtctcgaactcctgacctcaaatgagccacctgcctcagtttcccaaagtgctgggattacaggcctgagccaccgtgcctggcccagcctatactattttcgaataacaaagttcttccatctgtagataggagaatgtttgtcctacaaacagctcatctaaaacagtccgacatcacataacaatgataaaatagggagggagggccaacacattatccccctcctccacatccactgcttgccagaaaagctttccctgatacgacttgataggatggtctcagcttaggctgcagatgctgttcaatccaccactacaataaccccaggcaggccatcttacatgtttgcatacctcaggttccgattccataggagggacaggctctgctcacgtcaaacacattaaaatgcacccagcgtcccacattaaatcgtttccgtttaaacatttcaagtgaactgtataactttgcttttgaaacaatcatttattttgcccagtttttgattgttcaaatttttgtttgtttgtttggggacagggtctcactgtgtcacccaggctggagtgcagtggtgccatctcagctcactgcagcctcaacctcctgggctcaagtgatcctcccacctcagcctcctgagtagctgagactacaggtgcacactaccatacccaagtaatttttttgtgtttttttttgtttgttttgcggaggcagggtcttactatgttgtgcaggctggtcttgaactccctggctcaagtgatcttcccacctcggcctcccaaagtgttgggatgacaggcgtgtgccaatatgcctggtctgttcttcaaattttggatctgagaatattttctcaggtctcaaacatttttgagatccttggaaatcttggggattccacgtaccgctgttatccctagtacccattggataaatcagtcctgccctgtgaagcccactgcagggtttacttgtgaggaaaacatcgaggacagcatttgttctactaagcagcgtcctctctgtggggaccttgagttccttgagcacaagggctgtgtggtctttctcacccccaggtccccacaccgagagcctggcctggcatgcaactgtttaatgttcaactagtggtaatgcctaaactggacttctgtgcactgactgaaaatcacccttcctagggcacgttggccctatccccaaatccaggaacataggccaccactattttatatcttagagccaattagaaaaaagtgcctcccctgggctgttacactccactaggaaatctttccttggggcttactcacgccttctatgtctttccacagagctggagtccacccctcacccttaccaggcccattcatgcgcaggaacacttccacacatggcaggctgtgtgcacacagacgattccctcgcctttataggtgctattcctttgacttgaaaagcccatcaactctaatctgcacatacaaacttcagcacccagcccaaatgtcactttctctgtgaatccttcccctatacctctcaggcagagttcatcccatcctcctttttattcccatcacagtggaaggtacccctatttgagtcttgccaggttgcatcaaatttctttcttccgggtttggttccctgctgcactgtgctctcaaggggaagaggcgtgtctcagtcatctcagtctccagtgcctaggatgagaccttttatatacatgtgggtcttcaataaatgttttagacggaatgcagagctctagtcaagttactcctcagctcaaaatctctacagaaccttcccctttgcttcctgactttgtttcaaattcctctaccaggcacgcagaagcttagcccacagctctcctcttgcctccccacctcacatgccttggctcacctgcgcttctgggtgctgctggtacagccaccctctgacacttccttacctctggacctttgctcatctgtccctctacctataatgccatcttcccctctccccctgtcaaaattctagccatccttcaaggcccaggccaaatgccattttctttttttttttttttttttttttggagatggagtctccctctgtcggccaagctggaatgcagggtcaggagcatctcagcttactgcaacctctgtcttccgggttcaagcgattttcctgcctcagcttcccaagtggctgggactacaggcatgcaccaccacacctggctaatttttgtatttttattagagatggggtttcaccattttggccaggctggtcttgaactcctgacttcaagtgatccacctgcctcagcctcccagagtgctgggactacagggtgagcccccatgcccaacctcaaatgccattttcttcttgaagcatcccatcagcagatgtggcctccactgttgaaacccacagtgctttatcctcccaagccattcctcaaacacggttctggggttgaatgatgcgtgtttgtaattaacgcacttcgacagcaggtatctcccaacttcagcatagtgggtgctcagtgaatattggcccaaatggaattgagcatccatgctacacctgcagatgggagaggcagcaaactcatgtcccaggaaccagcatgacacagatctctcttgtcctccccttgtttctcaataaggacaatatttgcgctcaggggagaagggcacagcttgcccctcccttccttcctcagccaacggtttggcttcccttctagagaggtgagagaaggtgtgacaggccaagtttcctttgctccaccccatggtgtttcccccaaacacccagcataagttcacctctggcagagttgctttccagctcctgcaggtgggagtcgactcacctgcagcaggcactcggcacaactccgcaggaccggctcacctgcaccgggcactcagcacagcctccagcatgcagcgcctccccgctgccacccgggccaccctgatcctcagcctggcctttgcctccctccactcggcttgctcggcaggtagcgttatgagctttattcatggccaggctgggaagggggagggaaggagggaagagaggtgggagggaaagaaggaggagggggaagattctttggccagggttggtcctgcgcaaaggaaggaggaaacagaactttctcatctgaaggattaggcagggggtgggaggtggggctggggcagggggggtcttaggttggcctgagacggagatcagatactcaattcctcagctaaggcaggagcagccacctctcttggcctttgccacaaagaaaggaaaaagttatttgctggagtctcacccatcaggggaccaaaatgatatctcttggtccgctgtgtcctgaaggctccttctcagccccactgggctgtcgtgctttgcaatcctccctgtgcacatttgtgtctgaccttccctttcctaagtcctccatccctccctgccccttgtactttctctgcgactttcacaaaacctgactgccaggagggctgccattcactgtctcccaccctcctgcctccccgggcactggaaatgctgggttatctccccattttcctgtggaggctggaaggctgatctacatcccctgccttgccctgccaggccgggttctgcaactcacggcagagggaccttggttaccatcttctgctcctggctttgatcttgttctcagccacctcagaacaccaccacactctctatgccctgcaacactcctgctcccaaaaccaaccctgcccccaaagtcctgtgtctgcccctctcatcctcagactctcttctgtagccactgccagggg

SEQ ID NO: 11706 - DNA, 6000 bp, Homo sapiens
agtgaatcattaggacacaaaataggctgaaaaagatgttccaaaaatccaggagactatgggctacttccattaaacacagaggtgctgcccttctccactccaaacagaacaggaaaaaggcaaggggactgggccacagtgcattagggaggacagggtctctcggcttctctaccccaacatcaccagagggaaaggttaggttagaaaaacaatgccccactctttcccctcagagcccagggctgaagcctgggggaatgcttcattttgctccttttctctttgccttttccaaatggtcacattcttgaggtagggagtggagctggggaggggcccagagtcctgtcagaaatcctataatgagaaagatgaaaggaatacacaggtgcaccaccacgcccagctaccttttcgtatttttagtagagatggggtttcgccatgttggccaggctggtctcgaactcctgacctcaagtgatctgcccgtcttggcctcccaaagtgctggagttacaggtgtgagccactgcacccggcctccatacctcttttaaaaaccaattttgaaagttcattcaggctgggcatggtggccaaaaattagccaagcatggtggcgggtgcctgtagtcccagctacttggcaggctgaggcaggagaatcgcctgaacccgggaggcggaggtgcagtgagccaagatcgcgtcactgcactccagcctggtgacagagcaagactccgtttcaaataaaaaactaacacactgtacaactgcatgtaaggtggaaaagacaactggaattaaaatgtgctcaggtccttgtagaagataagaaatccagaggaaagtaagcaaagggggaaaaagaaacagaaaagataaaacgaatgtaccaactcaatactaggccataaggctaagtctccataaatgtctttttttttttttttttttgagacagagtatcactctgttacccaggctggagtgccatggcacaatctcagctcactgcaacctccacctcctgggttcaagcaattctcatgcctcagcctcccaagtggctgggattacagacaaatgccaccacatgcagctaatttttgtatttttagtagagatggggtttcgccatgttggccaggctggtctcgaactcctggcctcaagtgatctgcctgcctcagcctccccaagtgctgggatcacagctgtgagccactgcgcccagcccctacataaatttcaaacaccacattccctgactacaacacaataaagttagaaatcaaataacgaaaatataactagcaaaattctgtatgtttgaaaattttaaatattttcccagaaactataaaattacacattaatgtggataaatctcaaacaatgttaactgaaataattaaatcacagaagcctgaataatggattcatttacataattaaagaacacattcatagtggtaacactataatgaaatgacaaagattaacacaaaattcaccctagtgtttacctatgggtaataaggggactgtgaggtagggtagaaagaaggtacacaaaggatctctacagcactattaatgtttcatttcttgagctggggctagagatctgggtgatatctcatttttattttttaaactacatatacgctttgtacactttcagatattagaacttcaataaaattataaaaaaagaaacagagagagggaaaaataattaagtataattgtcaagatggagctaaaaaataacatgggtgaacaaggtgccacccacatctaagcttccttcccatgtcatgcaatgcctctccccatctgctccatcaatcaacaaaggcataatcactcctgtgatacctttaagaaaagaacacgctttaagaaaagaaacgctctctcgaagccgggtgcggtggctcacacctgtaatcccagcactttgggaggccgaggcaggcggatcacctgaggtcaggagttggagaccagcctggccgacatggcgaaaccccatctctactaaaaatacagaaattagctaggcatggtggcacatgcctgtaagcccagctacttgggaggctgaggcataagaatcgcttgaacccaggaggcagaggctgcagtgagctgagactgtgccactgcactccagcctgggcaacagaaagagactctgtctcaaaaaaaaaaaaaaaagaacatgctctcttattcaaggttacccttctatcactccaaggattcaccccataatcttatctttcttgatatgttacactcactaaaatgttcacatcaaatcaagtttgtagacacttgtccttaccaccttacaaaaagtgagatggtatcaacagaggtaagacactgctttacctgcatgtcacttttggcagctttcgcagcattgaaaagatcattggctggtggctctgactgtttccagctatgacgatgtaccacttgggaccctttctttggatgttttgccacctgatacacataaaaagatcagaaatatgaaaaaaaggtaacagtgacattaacacttggtttcatcattatcacacaagtaggcttacgctgccaattccacagcagagtctgagttagactcagtcctaaaataattgatttttatattatgaagtttattaacttttttccctttaaaaaaaaattccttgagtccccttcctgtatctctataaccaaacatccttttcttttcttttctcttcgaaatttctcttcttcctatttccgtcccttaatactttgtaaatcttgtccttttttgaaccatatcacctgaacctcttaggttttctcttttttttgagactgagtctcgctctgtcgcccaggctggcgtgcagtggcgtgatctcggctcactgccagctctgcccccggggttcgtgccattctcctgtctcagcctcccgaatagctgggctgcttccctgacaagattcaaaaacaaaactggctgactcaccggcattgttttcagtggtcgttttgttgctttcttcttcacaccgcgattgaagctgtcctcaaatcattttcttgtcttcttgtctatttgtatgaattactgagttacattctcattgctacttatttaagcaaagtattcttagtttgttaacaacaaagaactacaaattgtgttcattttctgtcctttcctgttcttagactaaattacctgaaatacatcaaaatatatgctgtatgcttacctatatcaaaactatgttgtttaggtgccgggcacggtggctcacacctgtaatcccagcactttgggagttcaaggcgggcggatcgcctgaggtcaggagttcaagaccagcctggtcaacatggcaaaaccccgtctctactaaaaatacaaaaattagccaggtgcagtggacagcgcctgtaatctcagctactcatgaggctgaggcctgagaattccttgaacccaggaggccaaggtggcagtgagccgagatcatgccactgcactccagcctgggtgacagagtgaaactccgtctgaaaaaaacaaacaaacaaaaacaaacaaaaaaccagaccatattgtttagggatacttagctgacaaaataatagagacaagcaggacataattaccataaaaatcgggccctgggatgttggtggggaaggtttaagtggaaagaatggagcggtcacaatgtgtgtcaacctgggaggtggtgaccctggggttcgctttgtaattcctcaaaatgagcatttatgtgctactcacttttcagaggatagaattctgaactaaaatgtttaagcagccatacgcaaaaaaaaagaaaaaatatggatagatttttattttaattaaaacatttaaaaaatagagacaaggcagctgggcgtggtggctcacgcctgtaatcccagcaatttgggaggccgaggcaggcgaatcacgaggtcaggagatcgagaccatcctggctaacacggtgaaaccatgtctctactaaaaatacaaaaaaaagttagccaggcatggtggcgggcgcctgtagtcccatctactggggaggctgaggcaggagaatggcgtgaacccgggaggtggagcttgcagtgagccgagatcaggccactgcattccagcctgggcgacagagcaagactccaactcaaaaaaaaaaaaaaacatagagacaagggtcttgctatgttgctcagggtggtctcaaactctccgggctcaagcaatcctcccgcttcggtctcccaaagcgctgagattccaggcgtgaaccaccgcgctcgaccaggaaagatatatatatatataatatatattttataatatatcatgttatatattacacataatatacaatatgtataatacgcataataaaggtatatttaacatatataaaaatatatatatatataataattttttttttgagacggagtttcactcttgctgcccaggctcgagtgcaatggctcgatctcagctcactgcaagctccgcctccagggttcaaaccattctcctgcctcagcctcccgagtagctgggattacaggcgcccgacacatgcccggctaatttttgcatttttagtagagacgaggtttcaccatgttggccagactggtctcgaactcttgatctcaggtgatccgcccgcctcggcctcccaaagtgccgggattacaggcgtgagccacggcgcccggcctgaataaatcttttaaaacataaaaatctgggtgaccccctggccggccggcacagatgccggggtggggccgcgaatcggttgggacgcactctatccggcctaggggcacctgggccagcaacgggccgccgcgcgtgcgcagtgggcgggggggccccgcgctcctacctgcaagtggccagtgccgagtgctgggccgccgctcctgccgtgcatgttggggagccagtacatgcaggtgggctccacacggagaggggcgccgaccccgtgatagggctttacctggtacatcggggtggcgcgtgccagacaccaacggtcggaaaccgccagacaccaacgctcggaatccacgccaggccacgacggagggcgactacctcccttctgaccctgctgctggcgttcggaaaaaacgcagtccggtgtgctctgattggtccaggctctttgacgtcacggactcgacctttgacagagccactaggcgaaaaggagagacgggaagtattttttccgccccgcccggaaagggtggagcacaacgtcgaaagcagccgttgggagcccaggaggcggggcgcctgtgggagccgtggagggaactttcccagtccccgaggcggatccggtgttgcatccttggagcgagctgagagctcgaggtgagctgggctcgcggtcgcccctctcgcgcgccctctttaagaaccacggcgtccaacctccctggaaatggggggaacatggccgaggcgcgtggcgaggccgcctcgtggaggccccggagcggcatcctcagcgccccagcgatccggtgcccattaggtgcgccttgaagccgaggcaagctccttcggggtgctgggctgcgggcaaagaattcggccctgtgaagagttgggttcggcctgtctcaggccctgcccacatcccatcacagggccgtggacttgaagccggaacgtgaaatccctatagactgaatgcatttccttcctacctgttctctctccccttttatttttatttttatattattttatttttaatttttactttatttttttgtagagacggggatttagctatgttgcccaagctggtctggaactccggagctcaagcagtccgcccgccttggccccccaaagcgctggaattacaggcgtaatgcactgtgcctggcctttaa

SEQ ID NO: 11707 - DNA, 6000 bp, Homo sapiens
gttcatgaaggtgagggaccctttcacctccccactgggcagaaagcacttgccagaagaaagggttgcaaaagaaggttgaactcagcaagaaaagtgccttgggtcagtctctgtactgctaaatagggcctaccaccctaccctgccaatccctacataggccctgtcttcagtaaacactagagttcgcttaccttccattccaagaaccaatctgacatctgctgtattagtctgttttcacactgctgataaagacatacccgagactggctaatttacaaaagaaagagctttaatggacttacagttccacatggcttgggaagcctcacaatcatggcggaaggcaaggaggagcaagtcacatcttacatggatggcagcaggcacagagagggcttgtgcagggaaactcctatttttaaaaccatcagatctcatgagacttattcactatcatgagaacagcatgggaaagacctgccctcatgattcaattatctcccacccagtccctcccacaacatgtgggaattcaagatgagatttgggtgggaacacagccaaaccacatcatctgctgtgcctcatcccacagatagcagagcttcctcctaatctatcaagagttcagcatttagtgagtggtcaggatctcacccttcatttaaccaactaaccaccaccaaccaaccaccaccatcagaggtgggcctaaggcaggccttggggtctctgggaagtgggccatgctcagtctacatcccaatgtgctatggctcctgacactctgagcaggggctctcccttgcacacaccaaaggaatgactgggcttaaaaaacgtgccaacttgcttataaatcagtctcctcagattctacaattcaccgagccataaaacctcagagcttcaaagatgcttagaaaatatcaaggccagggttcccaggaagcctcaatgctgccattttacaaaggaagaaactgaagtgcagagagattaaggggcttgtccaggtcacacagctacttagtggtagatctgtaactagaaaggtttcagttcacactcaatgttctttcctctagaatctaacctctgcccccttgttatttttggcatgagagaggaggattatatttatgtctctagaaaagctgtgcttttggattgaattctgattttctcttctcaagtctcattgagaaccacatgaaaaaactctgctggatttgagttaaaaaaaaaaaaaaaagaatctgaagaaaaaaatagcaaatctggtatcctaatgagataatgaatgcacaagtactttgaaagaggtacagcacttcagtgcttttcagatatgaggttttgtcatgctcttgaaagaaatgcataggctttactgacatgggggctggggctggggctggggccctggcagaaatggggaagcacaggctgtggcaaggggggtttctccagaaggctgactcatttcttggctgtcccaagcttagagagccagatttcttagggttgtttaccaccttagtaaggaactggtggagggtttttttctggagttaagcactgcaggaagagctgcccacagtatgggggtgggtcatctgcttctggactgcccaggccaactgtggttaccccagttaactgtggtgaactgtccacataaccagccttctggatctgcctttcaaggagtcccactgtgcttctccctgctgaggccgctgaaagggcataggcaattgctagaggtgaagaaaaactctgtagctaagctataaaaacaggcatcctgaatctggctacatcctggtaatcttgcacataggatgaatcctaagaaaaggtgagtcttgttaatgtgcacagcacacaagccagcgggatggcgtgccagtcagcagattttcagtttcaagataactgaaaatccatttttatctgacttagacaaaatgaaacaaaacaccaaaccaacaaacaacaaccacacaatttcactgattcgcataactgaaaagtctaaggttagggcttgtttcaggcaccactgatcttgtggctcaaactatgtcactgggacttggtttaaccctgtctcagctctacctttcctcagtgttaccttctctctcaggagccctggggtagcccccagtggctgcaggtcatctgtaatcccagggggtcccagcaaaagagagagggaatccctttcagtaatggtcctcctccccaactaaattagaggcttcattctgactggaccaagttagagcgcataaccatccctgggctctgattggccagaacagagtccggcgttccacctgccaggtggaagggtagatctctcccatgctcactgagcctgagacaggaggtggggtggcatcccaaaggaaatctagcatgctggtaccagaacggggaataggtgctgggcttggaaaaataacagacaaacactcagtgctacccatttaagcatttgaaataatttcacttcaaaatcagagtggtcgagtctcagacacatgagattctgtctcagatttctggtggcttgaatggagggtgtacagaatcatgtcttgataaatgtttaacttctaagatttgaagtgcagatattggtctgggtatccctcctagaaatctttgcattttctgcattttctttttaatattttatttttatttttatttttatttttttgagacagtgtctcagtcacccaggctggagtgcagtagtgcgatcttggctcactgcaacctccgcctcccggattcaagcgattcttgtgcttcagcattcggagtagctgggactacaggtgtgagccaccacggctggctagtttttgtatttttagtagagacagggttttgccatgttgcccaggctggtctcgaactcctggcctcaagtgatcctcctgcctcagtctcccaaagtgctgggattacaggcgtgagccactcactgcacctagcctatatttgaattttaaatagtgattccacaccttaacctaaccataatgggaattggattagagaatggtgggaatttcagacaagttggtgagggtgagaagtaagggaagagaaacgttatggaacctctcacataaaaagtgcacagtggcctacccctatatggatgtgagactgctcctgataggaaatatccccaaaccccttgtttgcagtccacggccccagtctcaactccaccaaatcatgatgcttcccctgagatcatgattgcgttgcccagtttcctctctgaccagacctgattctacagacaaaagccaacctcctcacttcgattcccctggatcctttcctcctcttcacatctacagccgctcttctaacttcttactcccgttgcaattccagatattccagagacaggatatctccaaggcactccagggccccaaataacaaaccttatttgttttccacctcacacaatctgaactcttctgcctgccctttgaaacccttcgcgaacacctccaaccttatttcttgctcctcctcaatacagcctgttctggttggcacagcctcacctcttacctttgccacgatgctactcctgctgcgtcactcagttctgcatggtgagtctcctccatccactgtgatctggaaccacgtcattgtcagtggaggttgaatacaactggaattttttatgggattctaacagacctgtccctgataatggcgtgcccctaatttccgttctttactgactactcattggctgtatcactctagttgcacaaatgatctctatctccctctatgcatgcctactaggtccagggaagtaatatagtgtttgtaactaggagtggtaaagatgatggctaattggagagagtaagctcaagctaaaagcattcaaattcaattttttttttttttttgagacaaggtctagctctcttgcccaggctggagtacagtggcatgatcacagctcgctgcagcttcaaactcctggactcaaatgatcctcccacctcagcctccggagtagctgggactgcaggtgctcaccactatgcccagctaattttttttaaaaaaaaaattgtggagacagaggtctttctatgttgttcaggctggtcttgaactcctgggctcaagtgattctcccatcttggcctcccaaaatgctgggattacagacatgagccaccgtgcccagctcaaattcaaaaattttaagacattatgggacaaagaaaattcacctgtccatccaaataatgtaatgtgcaataaatctgcaaccactgcttaagcttgtcttgaagtttttctgttttgcaggactcttcctgagcagtacattttcttctcttctaacagagttagaatttattgcttacaactctttcagaaaatggcagtaattagaaatggagtctgaggagggggatttgctcaaaatacgagtatcgtttctttaccatttttctttagcaatgtattctgtaatcataaatgagctacatgaagatctgagcacagcctggaaatattgcatgtttaatatcagcctcctttcccttcttcagaattaaactctggatccttcctagacttggccagttccaagtcacgacttcgtcagatacactcttgctgtaagaagcagtaaagttcagtggttatgatcacagacctagagctggtctatctgggtttaaagccagactctatagctttctggatgtggctgtctgtttaaccttgggcaagctaggtgacctctgtttgcctcagtttcctcatttgtgaagtgcggataataatagtacctacctcatgtcatcgttttaaggattaaatgaattaacacatttaaaatataagaagtttgaaaagctcttggactccggctgcagcgtcagcctccctcgggcctcggcagcggcggcggctcgctcgcctcagccccagcgcccctcggctaccctcggaccaggcccgcagcgccgcccgccctcggccgccccgacgccggcctgggccgcggtcgcagccccgggctcgcgtaggcgccgaacgctcccggcccgcccactacgggcccaggctagaggcgccgccgccaccggcccgcggagcccggatgctggcccggaggaagccgatgctgccggcgctcaccatcaaccctaccatcgccgagggcccgtccccaaccagcgagggcgcctccgaggcaaacctggtggacctgcagaagaagctggaggagctggaacttgacgagcagcagaagcggctggaagcctttctcacccagaaagccaaggtcggcgaactcaaagacgatgacttcgaaaggacctcagagctggacgcgggcaacggcggggtggtcaccaaagtccagcacagaccctcgggcctcatcatggccaggaagctgatccaccttgagatcaagccggccatccggaaccagatcatccgcgagcaccaggtcctgcacgagtgcaactcaccgtacatcgtgggcttctacggggccttctactgtgacagggagatcagcatctgcatggagcacatggatggcggctccctggaccaggggctgaaagaggccaagaggattcccgaggacatcctggggaaagtcagcattgcggttctccggggcttggcgtacctccgagagaagcaccagatcatgcaccgaaatgtgaagccctccaacatcctcgtgaactctagaggggagatcaagctgtgtgacttcggggtgagcggccagctcatcgactccatggccaactccttcgtgggcacgcgctcctacatggctccggagcggttgcagggcacacattactcggtgcagtcggtcatctggagcatggacctgtccctggtggagctggccatcgaaaggtaccccatccc

SEQ ID NO: 11708 - DNA, 6000 bp, Homo sapiens
ccatgtgtgcatgcgtgtcacttgtaactgtggatctcacagcttttttgtgaaccatcctggttgggaaaggcttcattactttacgtgagcctgtacccttttcgtctctcccttttctttgctactcatgttctgcccccaccccatcaccacaaccagttgacatccgctgtaataatccctaatgaatcagcatttagaagagtcaccaaatcacaagcatgagaaaagcttccactcccaagctccccaattcaggcttctcctccctctccaccttaaaacaaacaaaatcttttttaaaaatcataaaatgccatcattgtctacaatcatgtgtcagagtccaggaacaacaggtggacatggcacaatgctaatttatggcctcctgtgaatacattctctctgctttaccctcccttcccacccccctgctgccgcaccccttcaggggcctcctcctcctgggaaaccctgaatagacacatgccttgcagagtgggttaagcccaactgcaggaatctggtgcaatgtgaaagcattagactgagagctacgccagctcccgtccttctctgctcctttctaagcaattctgtcaggcaaggcacatgtgtgtccagtgcacagacccccaagacttgtgcacatggacaaagactcagcccctttaagggttcgtttgaattttggtggttttcctgcttaaaatacatgtacaggtctatcttccccttagcctctgaagaaaaatattattgccactatcattttggcacagtacaaattcatggtgctttttttttgtatttttttttaataagataattctgcaaagacagctctcggcttaagaaagatgtctgtagaaatggatagtcctgtgtcctatgaagcatcttctaaaaaatgacagattcagtctatccctcttgccccctcagcagcccacaccctacctctttaaggatgtttgttgttttagtttattttatctcagcaatttcaaccttataccagaaatcccttctggcagcatagcaagttaacttgtggcttgtaccccacaacgttcccaagattcccccccaccccctttaaatagaacttacaagttagaaaatatttttgttttgactttttgtctttaaattttaatataatctgttttttttaaccagcccatagacttaatatataagcatatacaagaaaaagtctctccccactctgtacaaaagttgctgtctttgtgtgcattctattgcattttataagttttttgggggaggggagtcatatttgagtttcctgtaccttgtccttggtatgggtctgaattatataaggttcagagatagtggtgactgtggggtgcagagagttccccaggctgttttctgtccagtgggccccatgtgctggtttgtaggtgttgtagttaatatggtcatgaattgtgggcagcactactgccccctcacctgatacaccggacggagctgctgttgctgctgcggatgttgctgctgggatgtcttcgtccacctggattatctcaacagtccgggcggctgtgactgtactccgctgctggtgccgcttacgaagtttatagaagacaatcaacatggcggcagctagcagagtcactgccacaaagcagccaatgatgatcttggtggtcttcatgacttcatccaggctggtctgcatcttgtcagtggtgtctgtcgcgggtactgccacctgcttgggcacacgggtagtctgaatgagcaccgtggtagaggtggtatatgccggctggtaaccagtggacgtggtaggaacaggcttgtactttcgcgttgtgtcctcaggcgagatctccgtggtctccactgttactgtggtgaagaagctgtagttggaggtgttaagctcagccgtgctcacattgaggtaggccgaggcgttggagttgcctgcaacattggtcaccatgcatgtgtacaccccagtgtctgaaagcagcacgtgggaaaagttcaaggtgccgtcgttgaggacagagatccttgggtggcgggaggcgtggctgagcactgtcccattgggcagcaaccacttcacggaggacatagggggagtccgacacttaagttctgccatccgaccctcagaaatgttgaggtctcgaggtgcgtccatgatgaagggggcagagcactggaaggaggcctggtccacctccacgaggtagcggcctcgcatgtgcatgggagcatgacagcggccacagcaggtggaattggtgggtatatactctcgaagccaccaggctagccacagaatgtcacaatcacagttccaagggttgtggtgtagatgcaactccaccaggtacctcagcggggtaaagaggtcatggggcaaagaagagaggttattgtgggccaagttgagttccacaagtgaagccagcccgtcaaaagcattccgctcaatcaggctgacctgtgagttcatgacccagagcttcttgagggagctcaggccatggaaggagccaggcctgatctcagggaagtggttccctgacatctccagctcctccagccccaccaggggggtgagattgggcatgtctttaatgttgcacatgcccaagttcagatacttgaggttgaacagcccctcaaaagctccctcagagatatactccagcttcttgagctcccccaagtccaggcgcatgagggagggcacccggttgaaggcgtaagaggggatgctttcgatggggttgttgcgaagccagagctcccgcagcttggacaggtattcaaaggccccgctagggatgactgtcagccagttgtcgaacagctccagggtgttgaggctggccaggccgttgaaggcccccacctcaatctgccggatggagttcctgcccaactgcaggacctccaggtggtggaggtggcggaaggtgtcggcctggatcatctggatgttgttctccatgaggttgaggtaccgggtgttcgagggaataccctgcgggacctcggagaggccccggcgcgtgcacaccaccttgctgaactggttactgcacgagcagacggaggggcagttctggggcccggctgaggcggcagcagcgatggctgcacacagaatccacacttgcgccgtgaggtagacgaacgggagcaggatggcattccaggtgtggtggtgcacagttacctgccacaagagcttcatggtgtggcacgttcataattcaccatcgcctgggattttggctcggaaaggagaaccagccctaccccggcttaagtgagctaggagctcctctttccatctggagaaggaggtggggagggggcgattagagagacggagcggatcggccgaaaaaaatcctgccaaactcgagcggcccctggtctcccaacccaccctcaaggcaagccctccgaaagctacgactctcccacactgcaaccgtccccacccagttcgccgtcacctacctcggaaggaaggcaggaaagcactggcgtggtgtccttaagctttctccacgggagctgggcacctcgttcccattccgacttcttagttttaattaacaaaagggggaagtggtgggggcggggagggcagaggggaggggaggggaggggagggaaggggtgggggagacaaaatggcctctagtaaatccggagccggagccggcgaagccgcggagttgaggcgcgcctgggagagccaaggcccggcgggctatgcaggtgcatgcccccccctccgcccaaggagcggcgccaccagcgcttcccggctttgtccttggaccctggcaccggctcgctccagccgcgggggaaggcgcttcatcgccaaagtgcgctccggcggccccggcccgctctgcgggccgccgccggagggagtgcgggggcgccccgaagccgcccaggccgcactcgctggatgctgcgctccctctcccggcgtcggccgctccgggccggcggcagctgattgcggtcgtgagctcgcggagcggcgagagttaagaggaggtgttcgcggcgccttcgccctccccagacacacaccccctttctcctcgcctcttctcggagggtggaagagacaaaaacggggggtcagttctccagtccgccggctgccggcacgcggggcggcgctccgtccggcccccgaggaccagcggcgtggcggctgcgctcggacccggtccgccggccggaggagcgcgcggcgcccgcggtcgcgcccgcaccgcaggccccttcagagagtccgggggcgggcgcgggtccggcggcggcggcggccgcagcccccggcggcgcgcaaccgcccgtcgccgcccgccgctgcccggcccccggcgcgccgccggctccggctttgtgcggagggagcgagttcgcggcttcggctcccggcgccctcagtggccgcgccgccagcggactgctgcagcggcgtgagcagcgggggtcgcggctgcgggaaacgctccggagcccaggaacatagtccccgctggctagcggcggcagcagcagcagcggggcccctgcgcgcggcgcccaccgtctcctcctcgcgccgggctcgcggtgttgcaggcggcagccacgcagactgctctctcatccttttgtccttcagtcagaacgtgaatgtactgctgacgcatactgttctgggagaagattagcgtgatgcagtgctcttatgtattagcgccgctccccctccgtcgcctgcctcgcggggttaacgccggcgccttccagcgccgcgccggccggcgccgcgcagccccgcgcctccggccgcccgtcttcctctttcctccttccttcctcctctcttcctctctccccctcccccctcccccctccccgggccgcttcctccccgccccctctagacgagcggagcggggccagggcgagcgggcgagcgagccggagtgagcgtcaagtgaggggccgcgcgcaagtcgcaggcgttcgcagctattttgggccggtcggagggagcagttgggtggccgctgataggctggagcggcgcggggctgcggcgggagagcccgcgccggcccccgccctccggcccgcacccggggccccctggctctgaagagcggggctcaggggcccggcggcccgcggcggggctgctgcatttggcctgcctctcgcccggcccgcgtcatcctcacccccgctgactgctgacggggcgcggactcgcgttcggagttcggaactgcgtggtggggactcgggggacggcggccggggccacgaggctcccaggaccgagagcccgggcttcgctgctgcactgccgccagcccctccttcgctttgcctcacccctcctgtgctctcactggggctttaaatgagggtttccttaatgagggttgcgggggcgggaaacagtggcaggaatgaccaagtgtgatgagctggggaatggcaacctgggacagcacagaggccggcaggaaggattgaggtgaactcccggagcccacgacacagcccgttcattcatggagctgcagccgcggcttctcagtcttcgctggccggagtcgccccttgctccccgctgcccccagagaactgggggaagggaggcgggcggctgagccccctgccctgtgagctcgccagcccttccttggctaggactctgagaagaactgcgtagcagccaggggtagcgattgggagtgggggtggaattcttgctcctatttctggtaggagaccctaaggcatttgacagactagtgtaggagaaggggactaggtcagctttttcccacccccctgaaaaaagactgcccctttctctgccgactgtgggtgaggcaatctagctgagccctgggaagccggtccagtagaatatagcatggtttaatatcc

SEQ ID NO: 11709 - DNA, 6000 bp, Homo sapiens; identical to SEQ ID NO: 2486

SEQ ID NO: 11710 - DNA, 6000 bp, Homo sapiens
tgaattatttgatgacttgatgctaccccaaaccattctaaactgaggtcctccagggaacctccagaaagagaagtgtggacattgccattaaaccaagaacctcgggacaaacagatgaccatgtgaattagtgaccatcttggcaatacttacagataacgtacctacagcttcactaagattgatcacctctcttctatagttcctgggtcctttatcctatgctgacgttaagtgtctcaatgtcaactgagaagaaaagttaattgctccatagggccataggttaggccattccaaaatctggctcgccaatgccctcaatggactatacctccttatgaagagtccaaagggacaaaactctctcagagaaggctcctgaagataatgaccccatttaaacagttggataactagagggtttttttttaaagttgtcatagtaaataatgcctgcattagctgacataaaatattatatagcctaagctcccaggccacaacaattaacccaaatagtcatgatgaatagaatagccttcagtttccttgtggccagtcatggaagagtttaccctatagctaccatttcttgttgtacctggattaagacagaggcaaaacaatctatatttaagctagaagaaaaaggaacatagctacctaacagatacacaagaaacttttgggacttgctttcctgatcaaagctgggaagtcttgggtcaaggacagctcctcaacaaagaattgactaagaaggcactggaactaagaagaagaacttgggagattttccagtctcttcttacaatatttataattattcttgtttatctggtagtccttcagcatctgttgttcggaactttacatgcttctgcagagctctgtcctgacagatgattcaacagatgatctaaaaaatagcataaactcatgttgatcaacgtgcaatgtgaacatcacatctccacagatgaaacttcatcattaagaggaccaaaaacagtggtgacaatctggataatcacggagatctctcctgcagctttggctgaatgaggaccaacacagacagactgagaagaaaatgttcccacgcacttaggaaaagactgagtgctctttagcccggaacaagttttagacttagtctactgatcaagggcaactcatctcaatcaatatattttaaaattttcttctcttaggatttgtaaccaagtatgttctcatataaggtcacaaggctgaggtgtttgtgtcaagtaactagatctttgattaagagacctaccattagggaattgtcttagatctgtgtaaaaggcttcaaacctcttgacatgaaggtgtactgtttggcaaatggtgtcatgctattcatctacgtatcctactgatgcttgctttgcttttgctgttgtttgtctacatgtatagagtctttttgcataggtttctcttctaggtgtaggtcgctgcaaggatcatacaggaatcaaatatatgaatagcttcagtatcattggtagcctataattttgagagtcagaggattattaattttgttaattatatatagaatgaataaggatgggagggcaattagggttagaataatagaaggtaaaatagttcacactgtctctacctcctggatgtctatagtacctgtgtagattattggtgttagcccctcagttctgaaagtcaggccaccagagatggactcatttcagtaaatacgcattggaggaacaaccaatcagcaatagcttctcatacagagggtgtcatctacccacatctcaaaaatccaccaatccgtgaggctccatacctcccaaaagcgcagtttcaggtcagcattctgctcttcttaggcaaactgtgcctagacagcacagcccccgctcactctagtaaggaaggcatttttctttgtcattttatttcagatctctagcagtggcttcctcttcctttgacaagggcaagtcttatctatcttgtgttgccagatcccagctcaatgtctgacctaggttaggatttcatggcatgtatttgaataaaactcagcagataaagaaacaagagagaagtgttgtggtttccccagggaacagctagctagtggtagaactcatttagaaactttgacacccactcccattatcacagaacaatcaggaggcctggtttgtaattaacccttcaacataacataaggacagaggcagccccatattatatttagagtactggattattttgggtccttttgctaagccaaggggcccatttaaaaaactgatctgggaaaagtagagagagaagagagtatatatatatacatatatatatatatatatatatatatacatatatatatacatatatatatacacacacacacatatgtatatatatgtgtgtgtgtatctatataaaaagcacaaagatgttataatgctttgcttctgctatcaccaaagcagagaaatgagagtgcccttcatccttttacaggaagccttgggatggaattgtaattaactttctccttctaaagctgtgtttagggctgactgtaaattatatttgcctgaataaacatcaggggagaggaagattcataaaaggagggcccttggaggtgaccagtcttcttgttcctggtctggaatttgagtggaccctcatacacatggaacctcacttcaggtagtttgatggaagcttcagtgttcttacccatcagcactctttgttcagcttagaaatctaatagatcagagttacccaaattcagtacgattgacattttggtctgaacaattctctgttgaggggctgtcctgtgcattgtgcaatatttagcagcatttctgacctctctatactacatgccattaacaccccatcctcaattcttttttttttttttcttgagacagagtctcactctgtcgcccaggctggagtgcagtggcgcaatctcggctagctgccagctccgcctcccgggttcactccgttctcctgcctcagcctcccgagtagctgggactacaggcgcctgccaccacgcctggctaatttttttgtatatttagtagagacggggtttcaccatgttagccagaatggtctcgatctcctgaccttgtgatctgcccgcctcggcctcccaaagtgctgggattacaggcgtgagccaccgcacctggccctcaattcttaatcatccaaaatgtctccagacagcccaaatgtttcctggagggcagtattacccttcgctgagaaatgctgatataggtaaaagaacaggtagcctctgacccctcgttttcttctttcctctaggatgatgccctctcccctttttccctagctacacctctggtccctctaagtttgactgactggggatggttagagttagctactgactctagaaagcatatacagagctcagggtggatgtctatttccctccctagaccacactcttcatgggcaaagacaacatctctatcattcgcttacctcttgcaccaaacccatagtatgcactccatatgcttccttaaactactttcttgtttcagagccaacaacagaaaatggggactgtgtagacttctggtctaacctaaatgtgtgaattagattcaaggaatcttccttggtaatgaagggggagcagcctgcagaatcatgagtcgtagggtcagattattaagagttaacaaaaaaacaggagtgggagaagatgagaaaagctccctcgctgttgctatagtggttgtcatgcagtaaatacctctcatagagagctagggaattctctttcctggatttttaatttccttccgcagctttactcatgttcaggaaggcagacaagtggtcctcagtcacacctacaacctaatagggctgtgggggatagacccataaagtaacaccctaaggcagtggaagcagataacaaatgcaggctccgggactagtgcagtcaacatcttcagtcttacgtcaggacgggaggatgccacagaatgacagtaacctaggtgataccatatttttaataaaccggctgctgtaatttgcaaagaaaaagaatagactaggatgaaatgctaacctgcatcacctgactcatggcagtcttcttatcaaatcatgctcccatccctgcctcccctcctcctggaacacccccattctaagtgctggaagctgctagttttttccagtgtactgaatcagcgtaccccagataccagcttattcagatgttctaaagggtgttatagatccatagaatttgggggccaaaggggaccctgcagaatgacgcagtctgaactcctcgtgttctgtatatttaacaaacaacccattagagaaggaacatgatatgattagccctgtgagagggaacatgtcagagcaaagtacatctctgatgctttcttccactctcccagtttactccccccactcccaaacacaaaaagttccattttctacaagtgtgggggtggggcaggtggcctggggatatagcctgtacagatgcaagtcgagtatttttaaggattgctgagatacccacctccacagcttcggatatgggtgagacgctattggtcttcctggagcccacgcggaacttggcagccttgtagatcttccagtacacgaagagcaccacacagagcggcaggtagaaggcgcctacggtggagaacacggcgtaggaaggctcgcggcttacctggcactcctcgctgccctcagagtacgtctctccccagccaaaaagcagcggggccagagagatgacagcggagagtgcccaggtgagcgcgatcatgacgttggagacgcacttgcgggtgcggagcgtgtattccatgtggcgcgtgatggaccagtagcggtccagggctatggccgtcacgttccagatgctggccgtgcagcaaagcacgtcgcacgcgatccaaagctggcacagcctccgacctagctgccagcggcgcccggacagctcgtgcaccaggctcagcggcatgaccagcgcggccaccaggacatccgagacggccatggatgccaccaggttgtggggcacgcggtggaaggtgcgtacacggaggatggtcgccagcaccagcaggttccaggcgaacgtcgccgccaccagaaagcccagcaaggtgagaataagcactccgaagaccgagagcaggggcgagctggggcgcaggtcgtctttgccgaggctgtggttggtctccaaaggggagggggtggagagggaaaaggaggttaggttcacaggtaaatccatctctgggtcaggagaccgccctggggtacttgcagaaggggtgttcaggaggacttaaggcggccactgtgcccagagccaatccggatgtttgcaacctctggccagtgggggagtttctggaaagtgcctgtgaatttggccccaatttcctgctagtgagcatccgttggagatggtgtggctgcaagcgcggcaggtctgaagccctcagaggctaaggaagcagaggcgaggggctgcgtgtcgcagccagggcccgcctaagctgtcaggagcccagggctcctcgccttggtggaaaggctgtttggccgcccagagccgagcatctcccagatcggggagaagctgggcggccagcagcgtgtgggtgcaggagaggggctggtgcgtcagagcagtcgctctcaccgcgttgtctccctgcccacccttctctctaggcagccggctgcagccttaactccgtgctagggaagccagttttgggggaacctgctttctgggacctgccttctgtccctgttgcccccgccaccccttcggaggctgcagctccggagagcgaatgctggcgcgcccaccgagacctgccttatccaagtggagat

SEQ ID NO: 11711 - DNA, 6000 bp, Homo sapiens
tggggagagaagagaaggcatttcagggtacagagccggaggcagccctggggtgggtgtcagaggtgagtggtgtcagagggagccaagtgaccctggagagcacgagcacagtgggtggtgcacaggcgcaccagtcccacagccagctgggaccctggacaactgactaaccaatgagacgcagtttccctcatctgtcaaatgggaataatacccacctcaaagaactgtcagaaggatgaaaaggaaaagcacatggcacgctacgtgcctcagagtgagcacttgagaaatggccactgtatatgaaagcaatggcgttttgcaggccttttaacagacgtgaattataaccacaatactcaaatcaacgacatccaccatggggagtataatcacagtgcccaagtcaataagctctaagatgtgtatactgcactcttgtgcagtgtacaaccttcacaaccaaaggtggcatccctgggcccggcgcggcagctcatgcctgtaatcctagcactttgggaggccgaggcgggcggattcctagaggctaggagttggagaccagcctggccaacatggtaaaactgcatctctactaaaaatacaaaaattagctgggcgtagcaggtgcctgtaatcccagctactcaggaggctgaggcaggagaatcgcttaaacccaggaggcagaggttgcagtgagctgagatcacaccactgcactccatcctgggcaacagagcgagactgtctcaaacaacaacaaaacaacagtggcaaccctgaggcttgagattacagctggtctgagaggtaggggcagggtcgtgtgggaagttgatggaagagcatgaagcagagcatggtacctcatggggcttgtggggggcccggggtcgggcccgaggtgtggggccaggctcccgcccttctcggccactctgtgtggaacctttggcattcttccgcaccaagtgccgccgcaccccaggaacgtcctcaaaccggtgacctgtgggggcagaggaccaaggttgggctccccctttctctcactcctttgcccaccagtgccgggcttggccaaggcccagcacttactcttcatgaggtctaggtcggccgtggccagcgtctgggcctcaatctcatccgtggggacccggggcagcagtgcctgctcagccccagtcatgctcccgatgcgcctcctctcctgaaggttgtagctgcggtgcccaggctgggctttgggcagggggcgccccgaggcacccccgtcgtcaccccctgcagtgccactggccaccgccaccgcctccgcctccgcctcctccacctgggttctaggcagacagaatggccgtgagcccgagaaacctggcctcctcccccacgcccagcacccacgcaggcggtagccagggaggggacccacatcggactccaggccctcctagctcccactcccgggaggtgcgggcacggggagggggaggattctggatgcagactgccagcatccgaaccccagctccacccttttctggctgtgcagccccaaacggtcaccccgaggcccctctgaacggccactgcgaacgtcaactgctcctcagcagccagggctgagaccagcctttggcggtgccatgaggggtgagattttggaaaagtcccagtgcaggtcctggtgcagaaaaggagctcaggacgctgcttcctgacagtcagcattcatccccctgccccctcaccccctggcacatccctagacatgggactcagaggttcacaggggcctatgtttaatcaagaggaataaagtccgtggcaccgggccttggagatggcagacagcttcctgccctgggaggaggggtaagcctcaggcttcacagacgccagcttctgctctctcccttctctctgccacactgggtggccagggccctgccacgtggtcctacccctctctctcaacatcaagagcccccagagctccaagctctgactcaacatcagagtcccctcccatgaccaggctctcctagcccccacgtgccctggcccacaaacccgaccctttcctgatgccaggctttctcggaagccccagcctcctccctgccatcctggcgcccctaaggccgctgtaacccgccgcccgcatctgtgccacggtcccagcaggttatgcgctcccagaggggacaacatgcccttcacttcccgcagcccttcacgctgcctggcacccagaaaacaacaggtccgtgatagtagtgaccttgagacctagttcaaagtcattttctccaggaagccttcccccaaatgccaatcatccactggtactgacactttgcctgaaccagccactgggtgcagtgacaacatgctgatgccatctcacatgataacatctggtttccaaccagcgtgtgttggcagtgccccaaggagagggggtctcctttgcctcttgaaccctggggcctccagcaagtgctgggaggtcaccagtccagtacctgagccagtgctggctattgctcccactacaccacaggcaggggtgggagacgggcaggggtgggaggcagcttaggcagcgcgtgttctttgccaggctaaaccatacttagaactttaattcacaccacccttaatccctacagccgcccagtgagaaacgttctgttatgcttggtttctgatgaggaacctggggcttggagagcttaattaagttacttgcccagccagtgagtgcgggcctgggatttgaaccctggcctggtgattccaaggctcatgctttgttccagcatcacctcactatcctagcaggggaagtgtctgttggggacactgttgattggggtgtacttacccagcctgggcccctttggaggcccgaggagtcgcctcctggtggggcagtggtgcaggggaagatggactggtcctctctgccttccggtcagcactgtcatcctcttggagaaagaactgtaacagggacccacatgggcaggagtgaccaggccagggccctgccgacatgccctaggagcccgcacccagcgcacctgcaccgaggagggtgtggagacaggggacggctgagtgagagcccgggccccctcagcctcgctggcctcatcctcatcttcctccccctcctcaatggtcggggtttctccagtcggggaggctcccgggcgccttcgaggcttccgtcctgggccctggggtgtcttgcggcggcgtgcatccggaggcaggtgggtggacagtgggtgatggatgtggtgggaggactggcggtggtctgcagggaggagggggacttggctgtggcaggcacagtgtccctcccctgccatcctgccccctagccccactcctcccactaggaccccagtcccttctttgctggacagtcaaacctgatccccccacctccccctcccctgcctgccccctcacactcaaagtcttcctccccatagctgcggcctggctcctcccctccacgagacccggcctcctgtaggatctcctcaaaccgctccacgcccagggtgcggtgaagttcgtcttcctcctgctcggggaacccaggcgtcccagggcccaagctctctggctctggctgtgaggaagaaggcagagagaaaacacacagggctcactgggaattgtaccccgaaacctcacccttcccagtgccagagacccaggaaccctcccccgccagcagctatctcctctaatgctggtggctctatatgcccccagcagctgtcccttaaatatagggacccaggccaggcacagtggctcacacctgtaatcccagcactttgggaggctgaggtgggtggattgctggaggtcaggagttcaagaccagcctgaccaacatggtgaaaccccatctctactaaaaacacaaaaattagccaggcgtggtggcggacaccagtaatcccagctactcaggaggctgaggcaggagaattacttgaacctgggaggcggaggttgcagtgagccaagatcgtgccactgcactccagcctgggtgacagagtgagactccgtctcaaaacaaaaacaaaaaaaaaggaaacaaatatagggacccagtcctcccaagcagtctgccccctcaaatgcaggaagccagtcaccctaccagtagacatcccttcaaacacagtgacccagtgtccccccagcagtctgccccctcagatgcagagacccagtccccccagcagctgtcccctgggttctgagctaccctcatcccagcccagcccccttggctgtgtagtcagttcagggcaggtggaagaaatcccgtgtgtccagcccatctgcagcctggagggagggcgtgtgaaccgggaagttcacatgacagatagtgaagaaactccagttggcctgaggacaactgctgagcccaaaaagtaacttctggcggcgcccaagctaaccgacccagagcctgtccgagtcaaacaaacccagccccgcagggaccggaatggatgcccttcagcccccaggagagctcccccagcccccaggcccccggcccgagccctgggccaggtccctagccccacccctcaccccacccccacagcccccacctgagtcatcctgcgggcgcggagcagcggccggccggcacagccggcagggaatgcggcgcttgtaagagctcagcccagctaagcggcagccgcctggccaggcagccttggtccagccccccacccacccacggtctcagctccaggcgccgccaaatatttgctcaagagcttctggacctgaagggcatcgggatctccaagggcgggggtatgcagccccctccatagcggtgccagcagccagaacaaggaagagcgcggggagggctggggtgaagggcgggtcttaggggcgaggtggggactggagcagctgggactggcagaacaccggataagagaaggtgagcgggccagggggctggcttctcccctctgtgaggaaggctcctgtccatctcctggctcccctaagcgcccagccccactcccaccagaagcagccccgtgggacgaggggacggggagaggcgcagggagcttgccgccatggggagagagggtcgcagacccctcgcacctgaggccgcaggaggaagtccatggccggcaggggtgaacctgagaaggagggggaggggaccagcctgtgccccttcccagtcacgtgcccctctgggccagtgtgaccaatagcggagctgattgtggcacggggttaatcattaagactccttaggaaaatccaaagggggccatgtggagcggtggccacgtgggggcagggaggggcgggcctgggtggcacgtgggcagggggcgtggccagtcgtggcaggcgagctccgcccagaaccctggcccgcgtgcagacttgacctgcgcctctaaggccagccgggtctgagacgggttgctgggtgagagacccagggttctcaaagttcctcaaccgctgaggctaagctacctaggtcttcaggtaacagcctcaactccctccccaggactggaagacgtctgatacccccactacccatccccccctacgaccatcatgcaaagtcagggtagggatggcagcatcctcccagtctccacactcacacacgctcacacccctggttggcgaggacccttggccggagcacccaaggctgcccagggagggaaggttgggctggcgacctgggggccacactcaccgtacagaaagaatctgcgcccttggcggggcgccgaggggcgctgctcatggccgaatcttagcccttttcgctgtcgctgcggctttcagggcaacgaggcggaggcataacctggatgggggagaggcctgatcaccatcgagagccctgggagggcaggagcc

SEQ ID NO: 11712 - DNA, 6000 bp, Homo sapiens
atattttgttttggtcaaaataggtacttaataaatatttattgactaattgtttccctattagctaccttttctttctgatgatagactctttcttagaggaatcttctcaaattttatactcctaatattcccatgctacatatataggttgtaagtttttttcaaactatgtatctagcatcatggttttgattttttttaatctgtttagatatctataccctttcaactgaatttactcaaatatgtgtgtgtgtagttatacagtcaatgatagtgaagtagtgaagtaaattctgataagaaattaaagatcagagttactttgggctttttgtggaggtgccttctctatatatggctttattttcaaactggtgccttaatctatgcctacgtagattatatcagaatgttttccaagtttatttctctccttaaagtacagtgtacaatttccagttcaataaaaagattgttcaatatgatgaagaaatacttactctgtgtaggcacagattctttggatgccttgctgttccagagagaagctataggtatattaatggcctacattttctataccaagaaaattgattttccttttgtttctaaggaaaatcatttggagggtgctcaccactatgtgatgaatagcactataaaaatactttgggacctcaggagggagagtacttgtttaaaaattatttcgtgcagtctaattttatttgtttaaaaataagttttggaaagatgtctcctccttgatttcttaacctaatccacgtgagtgtttccatgtaccgtcgaatgcttaacaagcagtaagatagcactaaatggtgtttttagatgctgattcacctccctctggttttatattttcttgacttgctaagtgtaacctaggaacttatttcctgatttatatcatttactcctctactgtctagcagaacttgtatttcaatgcctggaacttggagaaacaattgagtgggatggtgagtctaccaagatatttgcttaagaatcttaaagaagcctacacacggatgtcttggaacaagatttcaagtgaacaaagtgaaaacctgtttttttatgttttttttttcaggcttttctatttttaaagtaaccttcacatatggtacctccatatatatcgaaatacattccacattgatatatgcatgatgtaagcttacttttcataatgcagcacggtgaataatttggccttaattccactgggttttttagattgtttcagtataaaggggctactgccaatcctaacagaattactatgttttgttaacatacacatctaaactatatacactattacattcctagcacattctattaattatggacatcactttcatttcaatagtggaatttacatgacaacagcttctggggctcagaggagcatcagaccagcatgtcacaaaattcccttgtagtgtgggcgttgacagggttctgttgcaaacaaatttgcaatgaaaatgtctcataatgtgcatccacatagaacattcctcagaaagtaccaccttaatattcacataggtcattaacatcagaaaaggtaatttcttaattcttacattagtaaattaaattattaggaacatatagttatacacatatataagtgtgcaaaaaatgtcttaaacatttagcaaagatgtctggacatagaattgccatctttgtattctctcctgtaactgtgtgaagcttttgtattttataagtcctagagaaatgttggatgaagaatctgaatcagacaagaggatgaactagtccagaaggtttataataggaattaagtaacaagataaaatataatcaggagaaaattaagctgaatatcacaacaaagttcttaatagggagaaccattagactgaaatagtctttcaaagactctggaagaagtcattacgtgatccatttaaagtcagactggactgaagtactccaaaatacagtaggctatggggaccaagcctacattagaagtagaaggaggggtatgagctaatagtttttgccgtctcagtgattactatgatgatactcattttatgtgttcagacttggtagataatcttctatcattttatgctcctccttgggagcaatttcaacaaattcatctaatgcagtattggatccatttagtggagtctcaaaagatgtgagaatgcacaataaactcagtttaaaatagcaaagtgagacaactgtgagtaaacacgtactcctttttttgagaattactcctggagaaaacaagtctcacgctggaactttggccacattccagtgtgcgtaactgaatcctgccctccttgttttacaatagtgattaggtattcattttcatttcttttgtttagtagaatattgggatgatgtttagtgcaggaaaacaattggaaaattcacccccaagccaatgtgctacattttggcaggaggtagctagtatcctggaaaaacctcatgcttcattttgcgactgatcactattagaagaatggacaagaaagacaacagttttatttggcaaaaagatagttcgacatgaaataaaagtgaggaaaatgtacccagggaagttgtaaaatgttattgctgagaatctttcaaaataagaacatcttcaattgtgtgattccagctaatcacctgtcatagagaagtgaagcagtgagcttttgacaattatccccattcttttattcaatacaaatattaatttcaacttaaacataaagctcaatcaatttcgttatatttgcatttgttcaacttaccaattttaattacagtgatataaaattaaagatgagctcatcattttgatatgtgtagttgtgggttaaatcatcggatttatactccttttcacatgtataccacaactttttaaaaagcccattgtgcaaaaataagtaggtcacagagtatattttaattataagatttttttgtgtgtgtggctttccacacattttcttgttactgatcatatattcctgaagtttgaaaaataccattcaatttaaataaatagaaagacatctgtttcaagctccaaagtgtggcctattcattgtactggcataattttctatgatttaggtttcacatttcactggtaagggcctaactcataaaaccacagttttatacctagatatatagtatctaggggcaggaggggtttcaatgctaaaaggtattgttgccatattctttttcatctaataaaggtagatattctggaatttcattgttttatttgttaaggtataggtttcaagacttcctttcctcattttccatcctgagctcctgtgttactctgaacataagatagcctttgggcatgtatattcaaaatatctatgtactcctgctgggtgatcaaaacccaataagattgacagctaaagtctacaggtgtaagaaatctttgtaaatataaaacactacccattgtgaaaggaaaagtattacaataatttctggcatacaatagcttccaaatatattcaaattctattgggctgattttagaaacaaggtacgtaggaatatagaatcatatttattcattagagtgtcctaagcatctttgttaggaactgttatccatagtttagcatagtggcaatctagattactttagtaatgcctatattgaatatacttctgcaaacaattagaattcagagaggaatcttaaagtgtgtgatcagataaaccaaagcagactccaccccctaaactccctcccacccccccccacccccccacccccacccccccgcccaccacaaagaaacatactgtagctgtgctggacagttctaagaaattcaagcaaagaaactctaaggaactattgttggtacttaactcacacctacctcaactcacattaacctcaactttgaatattccaatatgtacctacatatagaccccaaacatatctattactattcaaatagtagaaatatttttataagcaaattagttgagtccttaaccaaagatctttagaggtgtatagttttgtttttcaaaatttacaatatctaaaatacttaaagtgggagaatccttccttaatatatttacctaaaagtgttgtaccttagagaattgtccacctttgataacccaaggaataactagaaagaaatttaaatgaaatccttaagaaacaagcttattggatatatcacctagtctatttttggatcgcaaatctcccgccctctctgagttatctcactgtcagataagaaaatggaacagggtcgatgaaaagatatgctccctgtctggcttttcgatttttcactcaagccaaaaggagcaaagggcagtgagttaaggctcctttccaaccctgcttgcgggagggcaaacctctggccgcctccggcttcggagcttatctgggctgcatggaccaggtctcgctgaccgttgcccacctctgcctgcaacctccacacccacatgaaaccgcccgtatccacggattcctgtgcacaaagccttagggagcccccaaatagaaacaaattctgagcccagagctgagatggaggtggttggctgatgagactggtctctctggggtctgcgagtgctagttcgtcccttcacctctcgcaccctggccgcagatctatgccctgaaatctccctcctcccagacacagacgtgggcgcacacacacaaactctcactcatgcacacccacatcgcctctgccctccacccttcccactccagtcaggactgtagggactggtccatgctctacctcaactttcccggctgcgcctgccccacgcggcacccgagcttccgcgccctggctgggcgccctccagagggacacgtcctcctctgggacccttacctcgcaccgacaactcctggcaggaactggagctgaccgcggtggcagcggcggcggtgagcctgcacccgggctctggctcatggttggtcctcctcatccgacacaaaagaggtagcttactggctttgtcctttccaaatccaagggagaacttattttgccctcgaaatggccaacttgtgcgcgcagcttcctgtcacagtgccccctgcccctgccccctcccggctgcacgctggaccactgcccggtggcagaacatccaggcatccgagtcagtggggagtgggaaaacggaggggtggagtagaagagagggaggaggttggggaaagaggggacccagtggtcttccgcggaggggaggggagctcttcccagccgagtcccctcctccttctcttatcaggcaaacccacttcctaggcgcggaagcaactttccttcaccttgaccaggctgaagccgtcgcatctaattgggactcttggcagaagcacggacctcctggcatcctctccttttcattctttcctccctctctcgttcttttccctcccccaccctccctcttataagggtatatctgcagagtcttcagtgagccagggtacctagacgagaggatttttatacgaaaagccagggtagatttgccgactgctttgcctcactctgaaatccttaggcagtgcatgcaaaggtcggtgaatttcggagtggggtgaaggggcatggggcggtagggagggtggcggctccaactttaaagctctgctagagcgcttggctttcaggtaagcagggactaacagtccttacaagaactctcctgtggtccctgggcagggggctgaccgcatgccagaggagattaggagagcgggagcagagagggagtgtgagagccagggaggccggtacgcagctcagccgtactcgcgactcaactgcacactgcgagcccctggagagggtttgtgcagaacaatctctgggtcaggcgggaggcagacgc

SEQ ID NO: 11713 - DNA, 6000 bp, Homo sapiens
ttatgtagcacagaaattcgtacctgtaggaaaagtgcattaaaatatcttgtcttcataatgcacagattcgtgaacagtaacagggcagtggttcttgatacatgttagctaggactgtttgttttctttgtttgtttgtttgcgagagtctcactctgtcacccaggctggagtgcaatggaacaatcttggctcactgcaacctccgcctcctgggttcaagcgatcctcctgcctcagcctcccaagtagctgggactacaggtgtacgccaccatgcccagctaatttttgttttttttttagtagagacggggtttccccgtgttggccagactggtctcgaactcctgaccttaggtgatccacccaccttggcctcccaaagtgctgggattacaggcgtgagccacgtgcccggctgttttgtttgtttttttaaagataggctctgtcgcccaggctagagtgcagtggcgtgaccttagctcaagcgatccttctgctgactgagcacctcctgggctcaagcaatcctcctgcctcagcctccctcccaagtagctgggattacatacaagtgtacacccccagacctggctaatttttatattttttttgtagagacagggtttccctatgttgccaggctggcagactgtttttatcctcccccactctaaaagatgactggtagttattgagtgtttaccatgtgccagataccacactaagcattttataagttttaattcatttaattttcataatgttatgataaggcctgtaattattaatgatttaccagtgagatgctgtgtgatggcaaagcctaagctgttgcctacagacacacaccattaacaattttctccttttattaatcaaagacataacttttaactagaattccaaccagcatgataaaaccaatgttaccatattgaaatgataaattccatttttttttctaaatagtcatccaaaatttaacacttttatttggaatgctctatttaaggtattaataactaattatgaataaggtgatttttagtttttgcagatgtgtgtatatatgtacttttttaagtatcatgtttaaaaggtcctaccaaatatcgccactttacaacttgaatgacgtagcatactgtttccgtaatgtcctcatataccaattatattattcattcaggatctagctgtgcatatagatattacattatgtaaataaaccatgcaggatcattcaatatagtataacaagagcttttttttttttttgagacggagtcgcactctgtcacccaggctggagtgcagtgacacaatcttggctcactgcaacctctgcctcccagttcgagcaattctcctgcctcagcctcccgagtagctgggattacaggcatgtgccaccatgcccggctaatttttgtatttttagtagatacagggattcgttatgttggccaggctggtctcgaactcctgacctcaggtgatccgcctgccctgacctcccaaagtgctgggattataggcgtgagccacactgtgcccggccaagagccttcttctttgatagctttttgatacaatctaggtataagtgcccagcagtaaaactgattaaaacaagatttgaaggccggacacggtggcttatgcctgtaatcccagcattttgggaggccgaggcaggcggatcacctgaggtcgggagttcgagaccaccctgaccaacgtggaaaaacctcgtctctactaaaaatacaaaattagctgggcatggtggtacatgcatgtaatcccagctactcaggaggctgaagcaggagaatcacttgaacctgggagacagaggatgtggtgagctgagatcgtgccattgcactccagcctgggcaacaagagcgaaattctgtatcaaaaaaacaaaaaagatctgagtaatgccgatgccagcattatagttcaaacccatcttagcagctccccacgcttcgttattgctagagtgacatgttgttttaatcataacctgaagtagggactgcaaaatggaaaccttttggaacaaagatttgaaagtctgcaattatatcacaggaacaatgacaaggattgccatgattaaggaatgcaaagactcaacacctaattcacaatgttatgttccaaaccaggttgtgaactgcattgtggcaaactagataccctgaacaaccctccaaattaacaactctgctgctagatgagatttttaagatttttacaaacatcactgaccaggcacaaaaggaaggaatccaccaagagcaaaattcaagtaaaaacaaggcctggaagctaagcaatcaatcactgaagctgccttcaccgggagcccttgaacctccaccaggatagctacatgaggtgtggggaaagagacgcagcctggggcccacccaaggtgggaaggctaatgacgaggtcactgaataaagctgcaaccccatatggtaaaagggtgaacaagaaataaaccttccatggacaagggaacaagaatttgttatcagaagccagtcctcaggtagatttgcacccaaattcacattacctgcgttggacctgtgtggaccaaaaaccccaagccgagaatttaatgtgagcctgaattggggtggcaccctcaagagactaagagaagcacgatctcaaagaaattccagggaaaacaagctcaagatcaaaaaacataaggaagtaagacactatcagcaagtcctgtaagaaggaaagagaatggggaagaaacaacatccaaggaaataatggctgttccaacttcaaatgtttgagagtcaagtttaaaaacaaaaatgcaccataactctattagttacatttttatttttatttttttgagacggggtctcactctgtcacccaggctggaatgcagtggcacgatctcggctcactgcaacctctgcctcctgggctcaagcaattctcctgcctcagcctccccagtagctgggattacaggcgcacactaccatgcccagctaatttttgtgtttttagtagagatggggtttcaccgtgttggccaggctggtctcgaactcctgacctcaggtgatccgcccgcctcagcctctcaaagtgctgggattacaggtgtgagccaccgcgcctggacaaagttacatttttaaaaaataaatcagaccacattactttcctgctttaaaactccaatggctccctgtgattcttagaataaaattccgagtcctccaaagccccctctaatccggcccccacacttgtccctgtgacctggtctctcccactcttcccctacgctccactccagcctggcctcctgccaaccctgcgggctctggcctctccacctgatgcctcctctgccctcttatgtccaccgggctcttcccttgaggtctctgcatggctgacttctcatccctcaggtcccgcttcaaatcacactcccaggcattcccacgccatccccaaatacaatatcccttctactcccacaccacgcattctccatattaatccccagctgtattctcttcataacccttaacagtactcaaaaaaggtctttcttttctactggtctctcctctccagaatgtacacttcattctctctcgtattctgctatatcctcagcacctagaaaggagcagccatatagaagatgctccataaacatttatgcacttaattatcacacactctgaaacaagtgtgtgttacgaacaagccagcacctcagggaagatcggcattcccccatctcctcatgcaggaccaagggctgtcgctcatggctctccatcactgtctttgcccaagtcacacagggctttgccttctgcccaccccacacctgccccagctccagattcttcatccatgtgggacttcaggcaagtcactcctttcatttcctgggcctcagttccttaataacaacaacagttaaagaatacttgtacggtccttagcaggcaccagcaattgttttaaacactttagtgagaccaagcgcagtggctcgcctgtattcccaacactttgggaggccgaggctggagaatcacttgagcccaggagttagaggctgcagtgagctaggatcgcgccactgcactccagcctgcctgacagagttagaccccatctcctaaaacacacaaacacgctttagataacagtaactcatttagttccttgcaaatggacgccaaatgggtgaggaaactgaggcattaagagaataagaaacttttccaaggtcccacagctggagtgtggcagaggtgggatttgaacccagccactgtgcggccagaatcccgcttggaatcacgaccccacactgcctcttggtaaagtgtagctgatgatctaagggacctggaatcatccatgactcttttccagtcctgctcttacggaatctctgcacaccactaactcggcttcggcagctgctccctacctcgcacccgctccctacctcgcacccccagccctccgccctccggtctgcgtctcgggccacctcgcgggcggctctgcctgtcactctcctaaacgccacggctgccccagcgttggcttccggctttctgctcctctcacccgacggcgctctctctgggcgacagcctccactccctgcagccagagtgatttttcagcattaaaaagcggccacgtgacgtctccgattaaaggctgccgaacagactctaccctaaattccgcagccaggcaccgggaccctggaccgcgccctccctaggcctcaccgccgccgccccccgcctcgctccaggagcgtccacacccgccgcgcacgctgcttcctccgcctggaccgcccgcgccggcgccgactggctcagcccgctccgcattcacgcgtgcgtctcccgagggcaggcggcccctactaccatgacggccctgcacacggtgtcccatctgcccagcgaagtctctccctctccctccggccagcggggtccctctcctcgagtcgcggcttcaggagacacgcggactacaggtcccagcatgcctcgggacgcggcctcttcaggcgccccagtcaaggtgagagcgtcccagggacccgcgctgtccgctacaggccggcgaggcccccatccccagccccacactcactgacggactccaccatctccagcagtccgtgcgcagccgcttctgaaaaggcggcctccaacgcgagcgaaagacgccagccgagtcagagcggacatactcgctcccgtccgccccgcggtccccagccgcctcgcccctgcctacttcgcttccccggcgctccgcccgcgcctcccgtgacgtcacagagtcgctcatctccaggagtgggggagccggcagccgctcctgacccagattagctgtgagtccttcggctgcaggaaacctctctcccgagagcaaagcccacgcataacttatggttgctgagctgccccatgccttctgaaacagcttgttggttgcccctctgatcctgtagggctctccccgtgttctgcccctcctaaaactgagtggtgtataattcttttttttttttttttttctttttgagacaaggccttgctctgtcacccaggctggagtgcagtgacaccatctcggctcactgcaacctctgcctcccaggctcaagcgattctcctgcctcaacttcccgagtagctgggattacaggcattgtgccaggctaagttcgtacgcagcaatagataatgccacaaatggcttgattcgatccactggctttaaggctgggttggcataggctcagggaagagactgccgtctttttgtccctttcccgcctccacactgtacctgatgcgcactggcacgaggggctgcgtgaccagctggtgttctccctcccagcca

SEQ ID NO: 11714 - DNA, 6000 bp, Homo sapiens
gactctgtctcaaaaaaaaaaaaaaagaaagaaaatatccccctcaccaagttaatacttttatggttgctggtggagcttatattctctaaatgtagaatttttttgggggcgggggggagtatcttctctctgaattctatatcattattggggtataataaaatgtacctacatgctctggtcagtcaaggttcatcaagtcagaaatcacaaatgaattcacaaattctttgctctaaagtcatataacaatgcagatattaaattgcttgtctaactataccattagattcctttttcactccattatcggcacacacacacacttctctcggcatccaggcattcacaggtatccagttcctaaagcgcccagcacgactgctttgtccaggtaagcaacagtgggacataaggagaggctgtggggcccctcttcaaatagcttcgacaaaacgaatggctataagtgaaaagtgtccctgggctttgctataaaaagactcaaacatgggattccaagaattccacctgtttccaattagataccagaattgcttgagtgtttaagctacactcgcttgctacttacacaaaacaattcttccgggttttgtgaacattttaaatatgttaaaataagattaagggtctggtttaaacaatcggaggcagggaaatttcggtggaaaccaaaactctctctctgcagcgataacgcggggcttcagacaaaacaaaaggacaagacagacaaatttctgtctttgacaattataataaaagtcacttttcatagagcaattacattttttaaagttatgtattcaataattttaaataggtcttaagtaatttctacaataactcacgatcctggatcctgtatatttgaataatggttagagttgccttttacataccatttgtgttacaattcgtcagatatacctgtctgtgaaatttacatgtgacaaatgtgtaaactatttgaaatggaagcacgggtaggaatttaacctacctctgtaggattcttcatatgatgaatttctctgcttacgaaatgtatgagttttcccctaacaaacgtgtccttccttcatttcactaaaaacagacgttcctggggcattacagaggagctgaaacaaatgtggattttctacttctagtcttgtgttctctcctaagacacagaaagtgagtacagcctcaggagtggttttgattgtttactgctacaggtagacccagaagggaatcagagagcacaaactactgttccttcacagctcccatataaaccctgatgggtttgtcttaattgtacaaaaacaggagactttttaaatagccattaaaggtttcaggctcagcacagttcaccagactgcatttttaaggttagctcagtggatttaggagagaatcattcctgaaggtattggactatttggccctttcagctttcttaggttggctaactaccgacagaagatacacgaagccgaggatgtagtcaaagggctctctgtggactcaactgtaccaggagttgttgcattaactcaccacttgcacctttaaggaaaaaaagagtttcacataggaaaaaacttaaatcaactgccaatgaccccttcccacatccaacctcaaagacacccatattaaaagaaccaagaaaacaaaagcaggagcagcagtggtgtaatttcttgaactgctcttttataaagggtactagatgggacattttaattaaaataatatacttattatggcaaacagtactggacagccagtaacatacacacttccacaacagggggaaaaaaagccatcagaaaatggactttcagcaaaactgaaattgttttttgattctgaaaaagaaggcaacttttcaagtttacttttgcagaagctgcttaaaggggaaggctggtcaccatgtgggaataatgtcccaaagggaaggcagtcattggcgggccccgtcccaaagagttcaaagctccactaacatacagagtgccatgagctttgtcttagaaagtgtcctcctttcaaatatgtatttaaaagacaaatttatacaacagtgcttttcttatttaaaaagaaaagaaaacctggtttttacaagtctgagataggataaaaaacttgtccaactagtcttagcaataccaaagcactgaaacttccataccacaagcctttgggactaaaaaggaaacggaataaaacacaatcttcagaaattctcttcctgagcacacactcctgtgccaaggcagcagcttcaagacccaggaagccgagggacaagaacccagtgagccagggttgcagaactgcggaacggcccaacctcacctggacccgctgacgtctccaacctggatttctctctgcaaagaccgatcagcctctttacccccaggtggcaacccaatctcagtataaagaggtctggaaaaatgagaaaaatctggaactaatgaattctctcccaaactcgttctattgactcactgactatcggtgggaattaaccagacaccaactccaaaggcctcctcaccgcccagagaaagaaccagattggcctgagacttgaactttgacattccgtattcgactaaagtttgcaaacccataggaaatcatctaaggccaaatcgttagcaaccaccaaaagcaaaggagtaaagaggaatgaagttcaaataagggactttgttttggggtttggttttgatttcttcttaatatccacataaagtgcaagtaaactgacatggaaactttcgatggaaccctggagccctgatcccctgaagaagtagctaatatgggggacaggaaggtttagagttcttaaaatctagtaactctagaaaccaaatccattttccaggcaattttgccaggatgctttaaaaaagacacttcattgatattaagctaggatgtcacatttaggaagacaagagagaaaaataataataatgtttgtccttaaaactccacaacgggttttacagtaagcacaggaattaaattatggtaaaagggagctatttttactaaaacagggtagaccaatttatcaaaaatgccattcggctgtgttcattacatccaggaatctaatttacacaatagacactttggagtaatctattttagtcaataaatacttaaactcctttaagttttaatcttatcggaaatacatatttcgcatagtcttcttcctagttaagcgagaaatttcaggaaatttcataacgactatgactcggctttatcgttcttagtaggcaagagcagaaaacaagcatatacaattaaagttgtcagattccatttaaatatgttttaatccaacccgcttcgtttgatacaagcctgcatctcgagctttgctcccaaaggtattgcggtaggtcactgtcaccagtcctccaggttaggaaagttcagccaagtttatcttcacgcacaccttagcagttgggagtagctgcagttccccaggggccctgaggaaccctcctatcccctcccagagcaccaggccgccctagagcattctaagccgcgggacccgggcaccccccgacatccccggttccctccgcgcctgcaacctcgggacttctggcccacacgccgctcaccttcaacctggctccggctacgcacaacatccacctggcagagtcccggggctgtcccggcgccgcgggcgccgagctggcacgtgcggggcggaccctaagggtgcgccgctcctccgggcggggggtggcaggcaggcactcgccccttgggcacggcggcgactcgggcgcgggccggggagccccggcacggtccccccgcggcgccggggactccgcgcgcggaccaccgcccggcatgccacggtcccaacgggcccccggggctctgctttcgagaacccggcccgagaaggcatctccgagcgcacccgccgcgcgctccatggcgggccctgcagagagggcagaagccccgaggggacgcaaggaagggacccggcgccgcaggtcaccgggggccgccggagcccccaggcgcgcggcgatcgcggctcggaccggcggcggggaggcagcgtacactgcccgggcacccgggggaacagcttggggcctgcctaggggaaagttgcagcctcctcctcccgcgcccgcacccggcggtccgggacaccgggacccagcgacactgcgcgcggggcacccccgccgcccctcgccaagtttccccaaagagcccccgcgggggtccgccacggaggaacaggtccgcgtcaccgacacaggcacacaaaagagcgcggcggccgcgaggtgcgcgggtggccccggggcgctccccgggacgtaaacaaacccgggggtccgcgccgggagccacacgcggggtgccggagcggcggcgcggcccgggccggtgacagccgggggcggcggccggggccggccgggggtagcgagcgcgggcgcctgcccggccacccgcccgcctggccggagccgggccgcgccgccgccgccgccgccggtggccgctctgaccctcccccgagccggcggcaccacagcgccaccagccccagctccgccgcgccggcggcagtggcggcggctcctcctggagaggcaggcgcttcaccccccgcagcaactccccacaaactttccccgggaatacggcgggccgggggcgcggggcgagcgggcgggcgggcgccaccgccgggccgcggccccctcccggcgcccgccgccgcccgccccccgccgcccgctccccgctccccgctcgcgcgcgcaccccgcgggccgccggggccgccccctccccggtcccgcggcggcaacggcggcggcggcgctggcggcggcggcggcgcggggcccgggggggcgcccggggtgggggcagacaccgggggcagtggtggcggcggcggctcccggcgccatcttgggctgatcgatgaattgaacaaagaggatcaatttccgatcaagcgagtgatcaatgggggccggggagcgggagggactcggccccgactcggccccgcggtgcccggcacccccctcctccccgccgccgcgggccccccggcggctgggccagcccggggcccccggcggaggccgcgaccgcccgcagcccccacccccgggcgcgaggccgagcgcggaggagcctgacctgcagctgctgtaaatcaaagcgcttccaatattgaaacatcgatcccacattggccgccatcttgagacatattgagacggagtgagcggctgatagagagggggctggagttcaggagccgccaggaggcagcaggcgggcggcgccaaaacccggcctggagccggccgccgccgccgccaccgaggacgcggactcctcctcacggcaccgccgcagccatggcgagcccgagccggagccggagtcgcagccccagggcgcggcggccgcggcccggcctcgcgcgcgcggccccggcccctgctcccccaacccccccaccgccgccctccccctcccctccgcgggccgaccggcgacccccgcccctcgggacaaccccccccaaagtccgcggtcgcgccggccacagacccggccccgagggggcgctggagggcagcgcccggggtcccccggcaccgcgcacctggggagggctgcgggggtggggggggtctcccgctgggatcgcgatcgcccgcggtggccgagcgcagcgccttcaagactccggttggggggaacgtcggagcgcccctgtagtggttagtgtacagagcgcggagacgccgctaccacctgcccgggaccccccacacccgacccctgcgtggcccaggccccccgcagcagcgtgcgtgggaggcgccccgacggtggacggcaacactctgatcc

SEQ ID NO: 11715 - DNA, 6000 bp, Homo sapiens
aaaaggcctatcaaggcgctgtggctcacacctctaatcccagcactttgggaggccaaggcctgaggtggggtgtggggtgaaaagggggtgggggtggggatcacttgaaaccagccctggcaacatggcagaaccccatctctacaaaaaatacaaaaactagctgggcatggtagcatgtacttgtagtccctgctactagggaggctgaggtgggaggatcacttgagccggggaagtagaggttgcaatgagctataattgcatcactgcactccagcctgagtgacagagtgagactctgactcaaaaaaaaaagaagcctacaggcagggcacagtggcttacacctgtaatcccagcactttgggaggccgaaacaggaggatcacttgaggtcaggaactcaacaccagcctgaccaacatggcgaaaacccgtctctactaaaaacacaaaaattagccgggcatggtggcgggtgcctgtagtcccagctactcgggagctgaggcaggaaagtcacttgaacccaggaagcggagactgcagcgagcggagatcgcaccactgcactccagcctggcgacacagcgagactccatctcaaaaaaaaagaagaggaagccaggaggaggtagagccctccataaatcccacctgcttggacttcacaggagtccacgggaaagatttaagaaacttgagcaacctttaaaatgcctggctcccactctgtaccaagtggctttggccctcttacatgcacagtgcactggctctagcagcctctccattaattccaagggaataaagaacattaaggtcaaggtttccttctccaccctcgggagcaatgaatgaagaccggctgcagagcaagagagcacgtgtctccccaggcactaggagccctttgccttctcggagcagcctcccactgcagcaggcggagggcatcaacagatgggacacgcattacccaaaacaagcaccggcagaggatgaaggtgcttgaggggccaggtggagagagaggaagagccccctatatttcacaatttttccctgctctttttctgcaggcttcatgtcactgcaaatgacactaggcagtcaggatggtaacatctgcctagtcgcagcttgcattcttagcttgcccaggaaaagctctcaacttggccttgctgccaacttgcaagtcaggaaaactcagccttcccaccccacagcacctgactccaccagtccgggaactgtttacagggcagaaggccacagagaaggaagccagacgccagttgatctgaagcaagctctcagcttaagtccccaaaatgagctggctttggaggttggatgggttttctacctttactctgcttgatgtaggcagcagactgttgggcagtgggtcgagggccctgtcccaagtttgttagagaggcaaattctcaggcttcacctgagacctgggcgggaggcccagaaatctgtcttaaagggctcttcagtgattctgatgcacatgctgaagatcaagacactggtgcaggagctaagaacctccattctggagcctgacattccaggttcgattcccagctctgacactcactagctgggtgactgtgagcaagttgttcaggcgggtgtcagagcacccatctcgcaagtcattgtaaagattcagtgggttcatgtatgtctgtggcaagtagaaagtagcctcctaacctcccttcacctagttttctcatttctcaactggggatgggtggagcctctctggacagatgtgaacatacagtgagataatgcacttgtaatgtctctgcacacatctggcacacagcaagaattccatcagttattattatagaattttattattcctatgagggaagttagggtacagctatataatatttaatgctcctaattgaaactaatactggggccaggcatggtggctcacgcctgtcatcccaacactttgggaggcccaggcaggaggattgcttgaagccaggaattcgagaccagcctggacaacctagcaagaccctgtgtctacaaaaaattaaaaaattagaagggcatggtgatgcacacttgtagacccagctacttgggaggctaaggccagagaatgacttgagcccaggagtttgaagcttcagtgagctatgattgcaccactgcactccagccagggggacagagcgagaagaccctgtctcaaaaaaaaaaaaaaaaaaaaaaaaaaaaaaaccataaaacaaagaaactgatactaaactaacctgtgtccctgagaaaagcctgatgagggaaaccaggttaacctttgaagttcctatgggtatgtctacagcaggaatctatcccaaattataaggccaccccgtaagtttctgattcctccagaaatgaactatgggtttttgtcgcattctgtgccatatttctgacacctgagagaagagcttctgcataacttccgtgggctaccctgacagtcaggccatataccctgcaagttcaaggcatcccctggatatctgtcaaatggcttcgagaagaccgcagcgtcctttcacctgctcagagatctgaccacccctctccctccatcccatccctcccccagtacccagcagggacctttggtgagcctgaaaagaaccatttgccatcctccttctccctgccccttgccaccacagtgaagacagttgagatcctccaatgtgagaaggtatatgtctgtatttgcaattccacatatttctgttttcaacaaacctaatactcctttcacttaggggaaaaccatggatagaagtttgagcctaagaggtcaagcgcacaggctctgtggtcaaccagacacagggttctgactccagactctattattattccgattacagaggtttggggcgcagttatatcttatttaacacagggcaacttagttaacctcccctcgcttagtcttctcatttcccctctgtggatgggtggagcctcgctggacagatgtgaacatacagtgagataatgtacttgtaatgtctttgcacgcatctggcacagagcaagaattccatcagttattattatcacgatcttcgtgattatctgcagttcgtttgagaacatgagttacaagctcagaaagggaggaggtagtctgtacctaagtacgtatctgccttggataaccccacgcatcctggaaacctgcctgtactcaggtaggtaacactcactctgacgttggggacagctagtgtccaatgacctggcccaggtgtgacaagagcacataaaaagtctccctcttctcctgaagtactgagcacaacattttagatgggacagattcagacaactgtcactaatgggatgccacatctctctgtgctacattctggaaacttcgcaggcccaccctgagctttaacaatcgcccctccgcagcccccaaggagaaacacaggcggcaggaagggaggagtcctcattcttagctgagcagctcgcctcatagacagatgacatattcctcccatatactacctaagcgcattagctccgcgacctggggccttgactttgtctgcagacatccaagccctccaatctcccaggttccctactggtaccccaccaaacgctgggctctaagactatttcctcctacacgtctgcccgcgcgcctccagtcccatgtggcccctccactagtttctgcgctcgggctggagtcgccagggaatgatttccagtccgcacgcggggaccgggagccaactgtactgacatgtttccaggataaaaccaaatttgcaggtggggcacagaaaagaatcaggcaagttgttctttccagcagccccggccatctgcccgaaacggggcaggaagggtaagaaggagcgcgcgggagccagggtgtgccggctcccaggcacagggcgcagcgcgcaaggaccctggggctcaccctgtgcccggcccgcccgcgtcgagccccggaggcgccggcgtgcgtccttaccattcagctgccggtacacgatgtcctccagcagcgacaggcgcttcaggaccgcatcctggatggggctggcgctgtgcgcgctgaggttggccacctcggcgcgcggccggatctcgtggaaggcgtctccgctgcgcaccgcgatgggccggcacttggccaggaagagcacgaagccggctaccgcgatcaagttcaacaccaacagcactttgactcttctcagtgaagccatcaaacagcccggccggccctcgccccggacctgcgccccctcgggctccggcgaggcgcggggcagccaggggccgtgcaagcctcacacaccagacggccggcagggatccaagcccctgctcgtcccacctcaaggatgctcgggcggcggagacggctgggaggtcggattggtggtggggagaacggaatcgctcacatggaagtcctcgctctgcagaagtgctccccgagacgcctgctcagtccacggcgcacggccccgtccaggcgtctccgcgaaaggccagggatttgagggtttctcttctgcaccagcaagtggttcgcctctggacctctagccgccggcgccgcggactccgaggccggcaggcggggctgcccgggaggcacagagggagcggcgcacaggtgccggactcagggatcgccgcccgcccacggcggagcgcgccgcgcctggggccgcacagcctcccaccttggcccgcaggcggccgtcgcggcgcgccacccgcgctcttcagcggaagacccgctcccccgggcaggcgcctttgttccgctcaccgacccgctccatcgcgccgggcagaggggaagcccgctcggggagcccgcatcctccaggctccgcagtcacgctcaagtctcaattactctcaaagtgggggcagcactagggggcgggcgccgggccgagcgctacgtcctctccgccccccgcgcggagtccaccccaccccgccggcaaactcaccagcgctcacagcgccgccggctcccggacacgttccaagcccccaaaccgcgccgagagccttcggggccttcagggcacaccggcctgtctcggagctggcgcgtcgcgaggctggccggaaggagtcggacctcaaaagtcacagcagttctctaccccctcccaaaacgtcgcgggcagcgcggcggggaggtacgcgtgccgaatcaccctccgctcgccagatccggccgcgcggctcgtcccgcgcccccgggagccaaaacgccgagtctcccaattggcggacgcggtgacaccgccgctgcggcaccgagagccacacagccccggagctgaggagcccggaggggacgcgcaggtggcggcggagggcggggcgcggcccgaggggagcggcggcggcgccagctcctcctccgccgctcttcgccaccctgtccccgagaggctgtcggcggccgccgccgccgcccgcaggctgccgagcgcacagctccccggttcgccgactcgtgcgcgcgcgcacccgggcagggcgggggcttctggagagtggggaccgcgcgggatggaggcagtcaaggcatgctggctgcggccggcgctggagggaccctttagttctcagtactccctgagcgggcgggttcgttccatcccggttggcgatgaagacatccttttctgtgtgctcgcggctccgcgctgcgtggccaggaatggctagagggaaaatctggcctggaggctcggattctgagaccttcggagccaggccgggcgtgagcgggcttgggggggttctctgcgtgcaagaattctaacctccccagtcactgcttctaggcccacccgctgctctgttcaaattttattataagaagcatattcatttggctcctggttttccactacc

SEQ ID NO: 11716 - DNA, 6000 bp, Homo sapiens
aacaaatttttcaaagaaaacaataacaagcagaaatcacactctacttagttttaagacaactatttacctcatcatgcaaaggcagttttgtctgcaaccaaactggattttgcagtccctctgcatagcaaacggtcttttaggacctttcctgaataaaggtatatttatatattaccatgatgtatatgtcaagaggaggttttgggcagaggtttcagacagaggcctccacataactgatgcaggccagcagctccgtgtaaaagagagaagtgctttaagtttcctttctaagcagaaggatgtctgtcagaagcaaccagaggagctactcctaggtcagtgtcagcctgtctctgactggcagctgctgtctaaacgatgcactgaaactgaagtaatcatcacagtgaacattgaaccactgtccactgtgtgccaggccctatgcctggggctcagtatccagaatctcacttaatcctcacaacaatcccaagagaagagctttactacccatttcagagatgaggagcctgaggttcagaaggatcaaggcaggttctcaagcaaatgactaaagggcaattctaattcatacctgcccatctcaagcctatgctctggcctccaccctgtactgcctcctgcaccatagtaaatggtaggtttggagatatggatgggctttgctcaaatcaatatgtgtacattaatgttaaatttctttatatgtaggttaagggccaaaagtgatttctacaagaatcctaaagagaagctatcatctctcctgtctcgtccttgcaaaggatagtggtcaggaatggggctggatctgccacattctggggaacagagatgacctcaaccttcagcaccagagcagttccagggagcaccaactggccaaagtcacaggtgaatcagtcaagagttttaagacagctttcccttgagataacacactcccgtgctggctgttctgacccagtcagaatgcaaatgtttgtgtagttatatttattaatagagtccacggttagccaggcctggcacatggctagggctctgtattgaaaccaataagtaaaagcctggaatttctattttcgttcccactcctgttgctactgggggccttttatccagtcctgtttttaatccagcagcctgcaaggggcaggaaagaggcaggtaaagttgtctagcaaggcagagtagaaggcacacctgccctccagatgccgagagcttttataaaaggtaacaatgtaggtaacaaatttcccccaaattataattctcagggagaaagggttagggaaataaatttagagagaagagtggcagatgggacagatggattcaattaaggcaaagaacatcaaataattccagggatgcctcattctaatggaacatgtcattttctcctcattgcctccaggtaactcccaacagtctaggtaggaagtagggtgctcacaccgtgcctcaaccacggcaggagtttaatatcctcaaatgagagagctaacattccctcttctcttcttttcagtaatgtggtgaaacagcacatgaatcagactaagtgaatgcaggatacataatagatgcacatttctacagaaccaggtgttattcaagttaaataggtattttccattgtcattaaaacagaacagatttctttatttggtctatgggagactctcccttttaattaaaccaaccacactgtcattttcctaagaaagataataaaacaataaaaatatttacatccttttttcttcctaaacattaatcatgaggggaagagggtgttttgcctttgctagatagttttatcacatagacattatactaatatgctttaaattactgttttacaggtcactttatccttattaaggatgtattagattcttgttgcctctaacagcatttgtaattatttactaccaaaaggaattcaattctgtaataaatcgatcaccatatatagttgatatatgagtattgatatgtatataatacatacacagcatgtaaacctgaacactacttccaactgacctcaattttcatccaaagtcaagtgtaaatgtctagtagtttgatgagcgatgctttctttattctctgcctctcagttatgcaatttgattgacagtcatgttatccaacacagtcatagatgggttatagtttcaacaagtcagtattattatgtctatagtcaatggagagactggagaaggcttagagtaaagcaactctacaattatactccataactaactgcaacaatgtagacatactctgttatcaattaaatgtggcaatgcctgtgaagtcttcttttgtagagatgctaaatcacttttagattctagcccacaatttaccgtactgtggagtaaaatcatcccaaatagaaggaaataatatttgggctgtcagactctcttcaaggtcctgtgtagtaacctccacttgacagactctgctgggaaagtaagctcatgttaaaatatggaaccactgatttgcttcactataactgaggtgtcctgacttctgatgataagccacctttgatttttttgagtggtttacagtagctcccagaagaggagacagcattctggaagctcaagtcactgactcccagcaagtggcccactcacatggctactagcaggattaagctcctcactggctgttgtattgagggcctcagttccccactggctgatgaccagaggcctccctcagttacctgccacacagtcctctccataaggcagcttacaacatggaagtgggcttcccttagagcaagacagggcatgcaagagagagtgagagcaacagaagtgacagcagttttgtaccctaacctcagaaatgacatcccaccacttttgctatattctctttgttatcagcaagtgactaagtctagcccacactaaagaaaagaggattacacaagggcatgaacaccaggaggtacagacctttggggccacattagctgctgcctacaccttccttgcatgcacaacaacacaggaataaacatcaaaatagataataaatagagggaaaatagggaagcagaagggaaagggaaagtgttccagcatctaattactcatgcctcagagctctcgcattctctctccccacctctaaatctagcccaacagcacaccctctgatcaggtgctctcttcacagtctcacacctgtctcctcttctctacctgcatagcaccaccaaagttcaggctttcatctcttcacaccatgaatattgcagcactacttttctaaccaggctccgtactccaatctttctaactcacacttttaacttatctttatggtacagaaagcccttcagtagctccccattgtcaaacaaaatccagactctttaggctgccgtttggtgccttccataatttgatccaggcctgggtatcaaaatgcatcacccccaagcccccagtaacaattctccatcccaggcaaaccatgctcaacacccaaacacaccatgtttatactcagcttgaagcctctgctaataccattattccccctccctccgcaagaccagtcttcaccttaccattacaaatctttggcaatttccaagatgcagagcagagcccatcttctgttacgcagtttctgttcactcctaactagatttcggttcctctatgaactggcacagctgagagaccaccccacccactgcacaggccagtccctgtgtacctgcctgttttcccaaggaatcggtaagtttcacaacttccttcttccagagaccaccagactgcatctctgtgagggtgaggatgggtctcactcatctttccctcctgacaggagggcacagctgttccatgacaggcaatattggttgacttaagatggacagatggaaggaaggaaggaaggaaggaaatgtcaagcccagggtctagcatataacaagaggtcaacaagtaatacatatttgttaacaccaccaattcttacaatgggaattcttcacccagcgacaccttagctatgtaggagcccttcgaaagagagcaaaggcaaatgcagtttatctgagtctgacacaaacaagccgactcacacaaacatcacaactaaaggcaaatccgcagctcctccttcatcgcccatcctaacactggcttagcgatacagggtgccaagctcagggaaattattagatggttcagccagggcagaactcagtcagtacaaagcaacttccaatcagtgcgcttcagctgtgacaacttgggaaacagcagtggtgagagctaaaagggtgctggcgaaagagaaaaaaaaatatgtcgcttgtggggtgagggcggtgtccatatagtttagataattctagtaaacaaaaggatttgttaaaaagaagtaacagaagactttttaaagccttctttaaagggtgaaaatctcaactaaagcacccaacgtccaaaatccagaggaaatctagcgctccctttctagctggctagagcagttaagcctgaagtgaattctcccaggaatcagattcctggccaaaggttgcctgcgcaaacccgggccaccctcgtctcacggcagggagcgctggaaacggctcaggggctaggcccgttagcgtcgtcttccaagagccgtaaattcgccctcccgctctgctgaccctggagcaaagtccatgcagtggttctctgagagccggagatacgcaccgcgcggggaacccgggggtccgggggccctaacttttgagttttgcacgccccgcagcctgagatgggaaggtagctcgtagcgctccaaactcacctgcgtttcagaacgacatctacccactggtttcagctcctagagcaacaactgcagaatctccatggtccaaagtcctccaggaaagagaagaaaggggtgacgggggtgagggctgggaggcgaggtcaccagggtcccttccctggctcgggtgggggtggggggcgcaacccctcacggctcctccccaccaagccgtcgggaccccagcgggggcgcctcgcgttgggcgacagggacgcggggagagagcgacaagctggaagcaagggctgcctgcaaaactttcggtcctccagcggcaactctgcgggaaagaccacccttccttcggccccgcgtcgggcctatccccgtgtgccccgacccctgcgccccaggcttgggcggcgccgctgcatcccggctgccgggcgcgctgcagccttcgctctcccgcacgcggcgctcgcccgtccgcgctgcccctccccggcaggcgggcggccccggcgggcgggcgggcgcggactgcaggtgcctctctgctgcccctggcggccgcgggcgcgcgagccccaccgagccggctccgggagcccgagcgcccgcccctcctccgctccctctcccctcctcctccgccgccctcctcccatcccgcccttcctccctccctccccctttcagaacactcaatgtcggaacgttccgaagatgacgtcggagcgttctcgaatcccgtgtctctcggctgctgctgccgaaggaacagggaaaaagcaacaagaaggaagagcaatggcgacactggatcgcaaagtgcccagtccggaggcgtttctgggcaaaccctggtcctcctggatcgacgccgccaaattacactgctccgacagtaagaaccccaccacctcctcctccttttattatcctgtaacctttccattcacctagagccactgggaaaaagtgtgtgtgtgagagagagagtggcccccggtgtcctccatgcttctccctctctctctaaataaatacacacagagacagatcatcaatgcacagggagaggcccggctgccagggctgtctgtctgtctgtgc

SEQ ID NO: 11717 - DNA, 6000 bp, Homo sapiens
ccaggtcccaggagctgaggctgacccatttcccctgcttttccagggcatagggaatttgattatacccccaacaaagccagggactaacacagttagcttgtagaaggtgcactagaatcggggtgcttttatttaagctaaggaaaggttgacagctttagcattttcccatacttgaaaataatttaacatttgtctttcccccatcatacctgtaccctcccctccccgcttttttattaaatagaaatgattggctcataagaatctataggttcagggtcttactcaatttaaccctttggggacattgaattaaaaattcaacaatatttattaaaatacaaaaatacacttttctcacattacaatcagtgttcttttgttggcaattcccctcccccacccataccaccccctttcaaatctgaaccccttatttccttttaaagctaaaataataactgaaagaagttacatcattagatggaccagaataacagagatctctgccttccccacccacgcccaccctttctcttccaccttctcctgagggggcctgggagagggaagcttcccatcagtgtgctccattcaacagtaccccatgtggaactccatgtgtgcatgcgtgtcacttgtaactgtggatctcacagcttttttgtgaaccatcctggttgggaaaggcttcattactttacgtgagcctgtacccttttcgtctctcccttttctttgctactcatgttctgcccccaccccatcaccacaaccagttgacatccgctgtaataatccctaatgaatcagcatttagaagagtcaccaaatcacaagcatgagaaaagcttccactcccaagctccccaattcaggcttctcctccctctccaccttaaaacaaacaaaatcttttttaaaaatcataaaatgccatcattgtctacaatcatgtgtcagagtccaggaacaacaggtggacatggcacaatgctaatttatggcctcctgtgaatacattctctctgctttaccctcccttcccacccccctgctgccgcaccccttcaggggcctcctcctcctgggaaaccctgaatagacacatgccttgcagagtgggttaagcccaactgcaggaatctggtgcaatgtgaaagcattagactgagagctacgccagctcccgtccttctctgctcctttctaagcaattctgtcaggcaaggcacatgtgtgtccagtgcacagacccccaagacttgtgcacatggacaaagactcagcccctttaagggttcgtttgaattttggtggttttcctgcttaaaatacatgtacaggtctatcttccccttagcctctgaagaaaaatattattgccactatcattttggcacagtacaaattcatggtgctttttttttgtatttttttttaataagataattctgcaaagacagctctcggcttaagaaagatgtctgtagaaatggatagtcctgtgtcctatgaagcatcttctaaaaaatgacagattcagtctatccctcttgccccctcagcagcccacaccctacctctttaaggatgtttgttgttttagtttattttatctcagcaatttcaaccttataccagaaatcccttctggcagcatagcaagttaacttgtggcttgtaccccacaacgttcccaagattcccccccaccccctttaaatagaacttacaagttagaaaatatttttgttttgactttttgtctttaaattttaatataatctgttttttttaaccagcccatagacttaatatataagcatatacaagaaaaagtctctccccactctgtacaaaagttgctgtctttgtgtgcattctattgcattttataagttttttgggggaggggagtcatatttgagtttcctgtaccttgtccttggtatgggtctgaattatataaggttcagagatagtggtgactgtggggtgcagagagttccccaggctgttttctgtccagtgggccccatgtgctggtttgtaggtgttgtagttaatatggtcatgaattgtgggcagcactactgccccctcacctgatacaccggacggagctgctgttgctgctgcggatgttgctgctgggatgtcttcgtccacctggattatctcaacagtccgggcggctgtgactgtactccgctgctggtgccgcttacgaagtttatagaagacaatcaacatggcggcagctagcagagtcactgccacaaagcagccaatgatgatcttggtggtcttcatgacttcatccaggctggtctgcatcttgtcagtggtgtctgtcgcgggtactgccacctgcttgggcacacgggtagtctgaatgagcaccgtggtagaggtggtatatgccggctggtaaccagtggacgtggtaggaacaggcttgtactttcgcgttgtgtcctcaggcgagatctccgtggtctccactgttactgtggtgaagaagctgtagttggaggtgttaagctcagccgtgctcacattgaggtaggccgaggcgttggagttgcctgcaacattggtcaccatgcatgtgtacaccccagtgtctgaaagcagcacgtgggaaaagttcaaggtgccgtcgttgaggacagagatccttgggtggcgggaggcgtggctgagcactgtcccattgggcagcaaccacttcacggaggacatagggggagtccgacacttaagttctgccatccgaccctcagaaatgttgaggtctcgaggtgcgtccatgatgaagggggcagagcactggaaggaggcctggtccacctccacgaggtagcggcctcgcatgtgcatgggagcatgacagcggccacagcaggtggaattggtgggtatatactctcgaagccaccaggctagccacagaatgtcacaatcacagttccaagggttgtggtgtagatgcaactccaccaggtacctcagcggggtaaagaggtcatggggcaaagaagagaggttattgtgggccaagttgagttccacaagtgaagccagcccgtcaaaagcattccgctcaatcaggctgacctgtgagttcatgacccagagcttcttgagggagctcaggccatggaaggagccaggcctgatctcagggaagtggttccctgacatctccagctcctccagccccaccaggggggtgagattgggcatgtctttaatgttgcacatgcccaagttcagatacttgaggttgaacagcccctcaaaagctccctcagagatatactccagcttcttgagctcccccaagtccaggcgcatgagggagggcacccggttgaaggcgtaagaggggatgctttcgatggggttgttgcgaagccagagctcccgcagcttggacaggtattcaaaggccccgctagggatgactgtcagccagttgtcgaacagctccagggtgttgaggctggccaggccgttgaaggcccccacctcaatctgccggatggagttcctgcccaactgcaggacctccaggtggtggaggtggcggaaggtgtcggcctggatcatctggatgttgttctccatgaggttgaggtaccgggtgttcgagggaataccctgcgggacctcggagaggccccggcgcgtgcacaccaccttgctgaactggttactgcacgagcagacggaggggcagttctggggcccggctgaggcggcagcagcgatggctgcacacagaatccacacttgcgccgtgaggtagacgaacgggagcaggatggcattccaggtgtggtggtgcacagttacctgccacaagagcttcatggtgtggcacgttcataattcaccatcgcctgggattttggctcggaaaggagaaccagccctaccccggcttaagtgagctaggagctcctctttccatctggagaaggaggtggggagggggcgattagagagacggagcggatcggccgaaaaaaatcctgccaaactcgagcggcccctggtctcccaacccaccctcaaggcaagccctccgaaagctacgactctcccacactgcaaccgtccccacccagttcgccgtcacctacctcggaaggaaggcaggaaagcactggcgtggtgtccttaagctttctccacgggagctgggcacctcgttcccattccgacttcttagttttaattaacaaaagggggaagtggtgggggcggggagggcagaggggaggggaggggaggggagggaaggggtgggggagacaaaatggcctctagtaaatccggagccggagccggcgaagccgcggagttgaggcgcgcctgggagagccaaggcccggcgggctatgcaggtgcatgcccccccctccgcccaaggagcggcgccaccagcgcttcccggctttgtccttggaccctggcaccggctcgctccagccgcgggggaaggcgcttcatcgccaaagtgcgctccggcggccccggcccgctctgcgggccgccgccggagggagtgcgggggcgccccgaagccgcccaggccgcactcgctggatgctgcgctccctctcccggcgtcggccgctccgggccggcggcagctgattgcggtcgtgagctcgcggagcggcgagagttaagaggaggtgttcgcggcgccttcgccctccccagacacacaccccctttctcctcgcctcttctcggagggtggaagagacaaaaacggggggtcagttctccagtccgccggctgccggcacgcggggcggcgctccgtccggcccccgaggaccagcggcgtggcggctgcgctcggacccggtccgccggccggaggagcgcgcggcgcccgcggtcgcgcccgcaccgcaggccccttcagagagtccgggggcgggcgcgggtccggcggcggcggcggccgcagcccccggcggcgcgcaaccgcccgtcgccgcccgccgctgcccggcccccggcgcgccgccggctccggctttgtgcggagggagcgagttcgcggcttcggctcccggcgccctcagtggccgcgccgccagcggactgctgcagcggcgtgagcagcgggggtcgcggctgcgggaaacgctccggagcccaggaacatagtccccgctggctagcggcggcagcagcagcagcggggcccctgcgcgcggcgcccaccgtctcctcctcgcgccgggctcgcggtgttgcaggcggcagccacgcagactgctctctcatccttttgtccttcagtcagaacgtgaatgtactgctgacgcatactgttctgggagaagattagcgtgatgcagtgctcttatgtattagcgccgctccccctccgtcgcctgcctcgcggggttaacgccggcgccttccagcgccgcgccggccggcgccgcgcagccccgcgcctccggccgcccgtcttcctctttcctccttccttcctcctctcttcctctctccccctcccccctcccccctccccgggccgcttcctccccgccccctctagacgagcggagcggggccagggcgagcgggcgagcgagccggagtgagcgtcaagtgaggggccgcgcgcaagtcgcaggcgttcgcagctattttgggccggtcggagggagcagttgggtggccgctgataggctggagcggcgcggggctgcggcgggagagcccgcgccggcccccgccctccggcccgcacccggggccccctggctctgaagagcggggctcaggggcccggcggcccgcggcggggctgctgcatttggcctgcctctcgcccggcccgcgtcatcctcacccccgctgactgctgacggggcgcggactcgcgttcggagttcggaactgcgtggtggggactcgggggacggcggccggggccacgaggctcccagg

SEQ ID NO: 11718 - DNA, 6000 bp, Homo sapiens
acaatctccctctccatagtcagaatgtaaagtctggtttaagaagtggggttcatatgccacactggtttgttctacttgtaattcccatgagaactaaaagctagtattaaagccttgctcctcagggtgtggcactcagaccagcaacattggcatcacagaggagcttgttagaaatgcactctcagatagaacgcacaacatactaaatccaaatctgcattttaacaagatctccaggtgtgcatgcactctgaggttttagaagcactgttctagagaacttggaatgagcaggtggacagctaatcccttccttctgaggatgtttacttgacttctctcatgcaaataaatccatcactgtttccagcaatttaacttctactacacttggataaaaaacaaaactggactttcaattcctgttctgctacttactagcaagttattgaactactgagtaccagtttctttatctaaaaaaaagagagagagagagagagactaagaaagaaaactattttatgggtctattatgagaactagatgagagtaatgttaacaatggccaggaatgtctccagcacaggctgaaaacaccttctgacttggtaatgataggatctgcaaacattgccttaacactgaagaagtaaaatcagtttccctaaaattagcctattatacatttcatactattctaacaaaaatcccagcagatttttttttttttttttaatttgagacagagtctcactctgtcaccagcctgtagtgcagtggggcaatctctgctaactgcaacctctgcctcccaggttcaagtgattctcctacctcagcctcctgagcagctggaattacaggtgcacgccacgacacccggctaatttttgtatttttagtagagacagggtttcaccatgttggccagtatggtctcaatctcttgacctcattaaccacctgccttggcctcccaaagtgcttgcattacaggtgtgagccactgcacccagcctcaacagatatttttaattggataaaataatcttaaagaacatttttaaaaacaaaccttaaccaagtcaagaaatgcagatatatatatatatatatatatacacacacatatttatatttagacatatatttatatttatttttatacataatatattcgtatttatacatataaaatcctgtagaaaattatattacaggccgggcacagtggctcacacctgtaatcccagcactttgagaggccgaggtgggtggatcatgaggtcaggagttcgagactagcctggccaatatgatgaaaccccatctctactaaaaaatacaaaaattagctgggcatggtggtgcacacctgtagtcccagctactcaggaggctgaggcaggagaatcgcctgaacccgggaggtggaggttgcagtgagctgagattgcgccactggactgcagcctggtgacagagtgagactccgtcccaaaaaaaaaaaaaaaagaaaagaaaagaaagttatattacacagaatatagaaaagtttgtttaactattgtatagaaacagataacataaatgaaattaacacttaaaatatagggcaaacctaaatgataaatatgaaatagttaatgaatatgaaatgaaatgatgtatatgaaaaatatacataaaatgatgctcctgctcactggtagtagggtaggtacaaaataaagtaacaatgagataatactttaaatgtttcagattggcaaagatttagaagtgccatattaccaacaagatggcaacaaatatttttgtacatataatggggtaattactgcttttatttctagggaacagatacccagaacaagattgttgggtcaaaggaattgcagtagtggtagcaatagtagcagtattaatcataacagtaacaattactatgattagtaccataatgatagtagcaatccacctcctggtaatctgctagaacatcatcatcattgtagtagttatagtaataactgcaatactgctattgcagagatagcacttattatgtgccactgttctcagcgctgtatatatgttaactctaatcctcctcacaactctaaaagatagggaactatgattcctattttacaggctaggaaacagacactaaatgtgcctggcaaacatagtaagaagcgttagctattttgtatgttagttagataggttggctacttttgtttttgttgttgttatcacatacttttttacatagcaattccactcctatgactctaacccaaatgagaaactaatttaacagcaaaaaaatcaagaatttacatgtatagcattgtgtatctgttgtggacaggtatgagtaaatctatctttgtatgaaacaaaataaagaaaaacgtatacaagatgcttaacctggattattttgttgaagcgtaggtgatattgggagaagaggagggctggagaaatagggaagcaatctaaataagtcaataaaccagaacacactcacacacacacaccacacacaaacatagaaagttagaaggtttaagtacagggtaacaacaaagaaataacgtttacattctctggggacacaaagagccctggaagagtttcaggaataggtgcttttatgcaaatttcatttccaagaggagtgatatttttgttgaatgatttggttcttttttcccacacaatgtaaagtattaacaaatttttcaaagctttattctttattaaacaacaacaacaacaatcttagtaattctaaggttcaaaactcagtaagggtcaagtgaaagacactgtctaggggcaagaaagctgaattctgttcctggcactgccaccattggactatctgatctttggcaagtcacttaatctgcacttaatttcctcactcacaaaggaaggacgttcaaccaggccatctttaaagctccttttagaagtggaatgtgatgattctataattaaaaagcacaatgtagaaaagtgaaaaactagtaaacaggagtgataattatcatacatcttaaagaaatggagtttaaactcttaataacttttaatgatccaggtaatttaatgattcacttaaaaatcaagcttttaagaagtataaactacaataagatcaacttgtgattttacatttccaaatggtgaatttaactacccaatgctttaattttgagaaattaatgctttaatgttgagaaaaggaatgctgccattttagatattttcagattactcactgaagtaagacttaatttatcctttaaaatggggccatctataaggtgcagttcaacctaaatgtcatcttctagagaccacatgtaatagccctatgaaaaaaaggctgggcaatgccagccagtcagcacgccagccagtcagccacataaataaattgcacaataaaatttgtaacagaaaattttgaataaaattattaatagaacacaaaaaaatggaaagaacaatttgcttaagaatggcagcctcctgaagcaacatttactgtttaaattgttacattttcctaagttttataagtaataatacgattattaatcatactttattaagatttaaagcataaaaagtcattaactcatagggcataaagatttccatgagcttgttacattttatgtattttatttccttaaatggttatgggattttccaaaagcatacacacaattccttaaactttgccaacttagaattagttacataaaaatcacccttcagaccgtatggaatcccctagacaaatctactcagcctttctgtgataggttatctgggtgtgaattccaccaccacctccccctcgtccccgcccacaaaaaatatattaagacttggcccaactagattttacaggcgacagagatgtaaagaaacaatttatggcttgcacaattatctaaaattcccgcaaacaagcagttccctaagtagtatgtcataattttcttatctatgagtagaagcacgtgcatttatttatatccctagattaacttcaagtctaattttactgccagtagtatccaggggtggatttctttgttctaattacaaatggaacttgagctagatcaaaggcattttaagaaggtcaaattttacttctctgaaaaataaagggtgttatcccatgtaattaattaatgcttagccatgccctttggcgcattatccggtggctgcagaaaaccagagccagccgttcccacctgttggtgcagtgaaacttacttacccaaaagagcagattgagggcgtagagcaggcagcgcagacacttcacggaatcttctctggccattgtgagccccgtaagggagaagccccatcctttcaccacatcctactcccaagggcaaaacggcagcgatctgcagggggcgggggagagagaacacgggacatctcaccatcacgcttcccacagcctgcccgtccctcctccacccgccctcagcagggtccagagggtcccgaggcccagtgcattcgagacatcgcctcatcaaaaatcatttgttaaaatcataatggtaactaaactcccaaaagttccaaaccggcttcagataacacctgctgggaaaagaaaagagcaactatccggatgaatgaagtcgcacagtaaactcgcgttctcaggggacacgcggcggagccctgtgcattctgatgagacgctcttgaaaacctccctcactccacgcccctcctcgaggacagctgtgctcggcactgtcctgaaggtgagaaaccacactgccccctaccccggacacgtcagaggcgccaccggcaagcccgagagaatgagcgcccttctagttaggacagttcctgggcactccaactccgcacccctctaccccgtcccgcagctcgggtgtgaatgcaagggactggggcggcggggcgggggcgggggcgggggcgagggggcagcgcggagttgagattccgcccggctactagggtttctctgggagaacgtgagaaatgatgttttcggccccagaatgatggattagcctgggacagtgggcggggggcggggggcgccggggaattagggccgatgcagctgtgcagacgccgggttagtcattcaaaccccgcttcccccgcccgggacgctcccgcgacccctcgctcaaagccgcccgcggagcacaaagcgagcgcggccaccgacccagccatcgcgtccgcgcgcccccggcagggcgcgaggggaagcgccggcggcagggagccccagagccagcccttaagtagtttagcacacagcgcggagggcagccgccggcgggctggcgggacagcgggcaggaaaggcgacagacgcgtggccacttaccgtcggcgctgggcccggtgccccacgcccgcctggggatagtcggggacgcacggcgggggctcatcggggcagggaacttcttcgcggagagccggagggctgcattggcttcagctggagacgcttctttctcttcctctccccccgccgccgccgtcgccgcctcctgggaaaaagaaaaaaaaaaaaaaaagtcctgggcagcagttgctggaaagtctctgctaagccacctcccagcgccgctgtccctcccaagtcctctccgagtccggacgaggcagcggcggcagccagggccagctgcacaaactctcagcgcatgctcgagccgctggctgccggggttgggtcctagtgggtgtttcttgtccctctcacccagcgagagtccccaaagggacgcttcacctctgcaggatagggtccagaagataatgcctaggaacttgggagaagtccgtgcagtaaatccctttaaaatggtggcgtcgaaggaatggaggctgggttataagcatagagaagcaggcttttattat

SEQ ID NO: 11719 - DNA, 6000 bp, Homo sapiens
aataatggtcattctgactggtgtaagatagtatctcattgtggttttaatttgcatttatctggtgattagtgatgttgagcatttttcatatgtttcttggccacttgtatgtcttcctttggaaaatgtctgtttatgtcctttacccactttttaatgggattgttttttcttgttgagttgtttgtgttcttgtagattctggatattagtccttggtcagatgcatagtttggcagccccttccccatcgggcaccaccagcagcagttgctatcatggccttgaggactgccgcatggaacttacatgttttaattttgctgctgttaaacattacacactttgcaaattttgcggagtagaatattaaaagaaaaaacaggtaagccattaggttcctagggcctttcttttaattaatgatttcagaaagccaaaggggaccagggagggaagaacttgctttgatgagactctttgatcagtggaaggtgtctgagaaggaatctaactttagtgagaacttattaataattaaaaacagacctcaaaatctcttgagaatttactatatgccaggccctgtgctaagcacttaacaggtattgtcttattaatttcttacaaccatgtagggtagagttactgttttcatcttcattttccagagaagaagacaggcctagtaagggtcagtaacttgcccaagttcacacagccagtgaatgatggagcctgtcaggctgcattgttaatcaccatgaggatctacctctaactgggggcctggccctttacgtgcattaactcatttaatcttcacaacacccttgtgtggatgttattatcactgttcccatttgacgtagtgaagacagtgtggaatactggttctgagcatggaccttgaagctatggcttctgggttcaagactctgctcttccattcaccagctgtgtgaccttagttacttaacatccttctgcctagatttttcatctgtaaaatggctttaattatataacttattttgtagatgttatggaaattaaatgaagtaatttgtgcatggcatttagaacatgacctggtaagtattatttaaattattactacgatagagagaaaactgaggctcagagaagttaagcccaggctaccagcctgacagtggtgagattctaggaagacaaatagtgccagggttcattcccagagatgaactctaggaagctggtctcatttatgtttggttgtgatgactccaggatgcagctgcctgttgagaggtagcacagtgtggtggtaaggagcatgggttttagagccagatgacctgggagcatgtcgtcgttctgtcactcactagtcatatgaccttgggcaagttacatagccagcctgagcctcacatcctcatctgtaatgcatcagttgtcacgttcctcatgggctgttgtgagactgaaggaagttcactcacatatagagggcttggggcctgacacaaactgggtcaatgtgtctgctctggtcatgatgctgaagcaatagctcagtgggagaaacgggaattgacggagagtcaggtagacatggttgggtgtgtcgcctgaatggagagaggagaactgggaagaaaatgttagcagaataaagccggggcaacagagcttgccagggcatagaacaagggcgcaggtttacttgtcagaggccaccagtcctggctaaaatatttctggtggaacacattgaagatcagtgtgctcatggtttaggtgtggctgtcacaaaaataaaaagggaagaagaaagggaaatgtgtcatatttcctttggtagaaacatgagtccaggttctaattcttttcaaaacagggctactgcagtgtttttcaacagtgtgtaggtggtggcagctcctggatttcaccagtgttttctgtggacagccatcccaaccaccaagtttttaatgaatgctgtgatgttttgatttacttaattattccatgtaaataaaacagctttatcagacaaaataggactataccatgagattataacataaagtcagaagcatgagtccaggcacccagatgacaagccattgagatagctgtttaaatggttccattaatattaacttgctatttgtgcaattgttttgttgactattagctctcactagcagataatccaagtgggaacaaagattacaaaaagtttagagggagaagaaaatccttaaaaatgagaaaatgtctacaaatgagccatcttaatttgtttgtttgtttgagacagtcttgctctgtcacccagggtggaatgcagtggcaccatcttggctcactgcaatctctgcctcccgggttcaagaaattcacctgcctcagcctcctgccaccacgtccagctaatctcatttggtttctgttggcaggactccacggtccagtttgtgggcggccaagattcacaagattcagagtttgagaatcagtagtaccagaaactggtgactgcctttggctgtcaatggttagttttcccgcaccagccctctcttccgcaattacaaaggcaatttgccacccacttcgactcgtggggtcagcatttcatcttgtaactctgttagtgacacattttggatgactccctgaatcagaggccctggggaatcagtgccacacaggacaaaccaggtgcctgctctcattgagcttgtactctagttgggaaggcaaacaccaaatgtattttttaaaaggtaattataatttttgaaaaggtttgggaaagaaataaacagggtgagtgagagagagaaactggcaggaggaagtgatgactagattatagggtcagggaaagcctctcttcagaagagatatttgttttgagtcctgaaagggttcttcattaactaatactgaagcaattgatcagctaactagaaaagagaaacaaaactattttaggtcctcatctcactccacatacccaaataaatttcacatggatccaagagtgaaaggtaaaaccagataaaaaaatcaatgatctggaaaaaaggatatatttgatttatgagtgaaaaataaaatttggaacttaagagcaaatggaaactacaaataaagaattgcacaggtttaactattctaaaataaagatttctattcaccaaaaacaacataaatataattaaaagtcaatgagcatggaaaatatctaccacaactatgaaatgattaatgtacttaatgtttaaaatgtttacgcaaactgtcaaaaaacattacacctcattaaaaatggacaaatatgaagagataattcacaaagaatgcaaagtagttaactaacatgaaaaaaaattctgtaacttttctaatgtaattaaagatacgccaagtaaaaaaccagagtttccctatcaacactgtaggtaaaaacacttgatgataccaaaaatatggttaaactggcattctcacacaatgatggtggatgtgaacatttgtacaaactttcagggaggcagattggcaataaacattaaaaaccctaaaaatagtcatatctctttggcccacttttataaatctatcctaagacagcaatcagaaatccagtcaataatttatacataggaatgttcagcacagcattacttttggcacaaaatgggaagcagcttgaaagtccaatatcagaagtaaactatgatgtatcaaggataaaatactatgcatcttttagaaaaagcaggtataaaatcactctacatagtgtgactacatccatataaagaggcataggagaaagagactaaagaagtatttgaaaatgttaatgttagctgtggtagctctgggtggtgacattacaggcaattgttctctatttgcagtaaaatatttttagaattatgtgctacatttatgaaaaaaaaagaaatttataaaacaggcattcaaaacagccttagtaattagataaagcagggactaagctggaaagaaagttgagaaaggggaatatgtgcaagattgaaaaaatatctcatggactgagtctcagacctgagattttggggaatggggtatggtaagtggatactgaaaaatgctcttcagttatcatgagggaagaaggaaatatgtgtcttttccctctttcaaaggagcctttgattttataggcgaagaagcatagtggaagttattagtgaaactaagcccacattaaaaaaaatctcttaaaatatgcatcaagagaactaaaataccaccatggatttccactggggcatgaggagcaatctggtctaatgactaacataagatctaaacatctcttaggtcccattctttgaggcaagaacacaagtttttctgttgatattaatcttcagtgtgtattttaaagttttatgatgtgttcgtaactaccattgaatagtggtttagttagtgttggtcggtgacctgcttttgtttacctatttctgatgaacagtgtattgcacaagccacagccatgtccttgtacacactgcgtgcaagactctgctgtgtgcagtcagccctgcatcgtttctaaccagttatactggccttactttcatcatctttgaggccagagctacacatgttgatgccgaagagtggaaggaaggagagcagagagtaaagggggtagattatgtagattatacagacatgagcgagggagggtcacagatactgaacaaccagtgagttcccctatgtggattgccagaacatgaaatatctgagaagaaaacaaaattgtcttacaaggtagtagacgtctgggtaagctgtgatgcttgcaggatcggtacttacagaaaggaggtgcagagaccacaggaacactcatgaaaaggagaagcaggaaatcagggttggttgtttgaatcttccttctcgctggctttctaatgtcagactccagaaaggaggagtggaagggaaatggcaggcagatgcagtcctgagctggtgcccccttgccttcgcagtcgtgcctagtaaacagctctctgaactttggtacatttgttctgactgatgtcactatcagctgatttcactttcgtttcctaacttgccagtggcccatgacttttcagaaatgaggtatgtaaacaactttttattgtccattatgacatactctttacctacactgtagccggcaaaccaactgatttaaagagccaggtaaatgtcttgattatatcacacaataattccagaaagggaaggagccaaagaactctcgaagctcccagtgatttaaactgcaagataaacacaacccggaattttattcagaagaaacccatcaggatcatctggtccaagctcccagccagtgtggcagtcaggacccaggtcacctcctactcatttccttgggaagcagctatgccgtctgtcccccaaccccttttagagatcaattttgtaatgatgactgggcttctctggacacaaaactttgtgtcctgagcattctcactgcagtgtttaggcccatgttggagcagctggaacatctattttatttcaaaataagagccgaacaaagcttttatttttgtaagcattggggctcctggccagagtttaaaaattgcttccgttgctcacatgaccaactggaaatttcaactgtgggttaaacttggttacatgagactgctacctagtgctattgctgaatccttcagcggttctcttctgcttccttgcccttcctccaaaggaggagttatttgaactgctacattgccctccccctgcccctagttcttttaaacgcaaactctagaaagaggtgatgggatccaggaggaaggaagaacagaggctttgagatcagagagttctgctacatactagcaaattatttaatctctttgagcatcaatttcttatctgtaaaat

SEQ ID NO: 11720 - DNA, 6000 bp, Homo sapiens
cccaaatcttctgaactgagaaacacaatccagattctaggtcaagactccccaagctgcagggcagtcctgtccccagcactggagggcagaaggggaacccctgccccggaacacctgcggtccccacagcctcgagttctcctcccttccaaacccggaagagcccacctgagttggtgaggtgggtttcaaccttctcaaccgctctggtcctgaccggctctctctagccgcccctcccccattcttgtgcaataagccacgcggccagggagggaccatggccactggcgaaattagggaactgactaattccaagagcactcccttaaggcgactccagtcctgcagtgaaagtggccagtcatgccactgtcatccactcagagctgggccctgggacagtagaggccgcggggctcccgcctcaccaaggacagagggggctggcagcagggctctgagctgcccagggagaaggccatcctcgccctccctgtgtccccacaggcactttacaggaggctgaagctgagggtgtgtccagggactcccagccgggaaaggcgtggctgggatctgaacccagatgggctccccagtcacgagcacccatcctgcaggtcccagttctccctcccaggtagcccccaaaggcagtgtcacagggggctggccctagggcaccaagctgccctctgcgcacatggtggcctcaaggcaccatccacgcccaggaacaaccccagaccaccaccccgctggaaggccaggcctcgccaggaaaaggggagacgcagggcttcctcagagggctgagggcctgaagccatgctcagcgcagggcgaggtggccccaaagcagctccagccaggctctggctgtcccagggtgtccactccccacaggggagctgcctggcttagggacagttcaccaggacctcccagggccattcccagcaaacccaatggccagggccagccctcgcctcccctgtggaagaaaggcctgagaaggtgcccggagactctgcctgccaccacacccaccccagcagtgccacttggcccacagctgggggctgagcccaaggtcagagactcaggaggccactgagggagcacttgggcaccgaggtctgcagccctgcccagcaagcagcccaggcccaagctccggcccatccgctgcccccacacctcaggccaagactgtcaggacggggacagcccacaggccatacatatgggcagagccatcccagctaactcagccacttcctcaaccaggggagctctggcttccaggtcacaggtggtaggagggagcagcccctccacctccatcgtctggaagcccaaggctgtcacaggctccttcccctccagcccctcccgggctccacagtcaccaccccgtgccctccacagcccacctctgccccccaagggccgtggcagcctccacgctggccactgagccgcaccctggacctctgagcgacatccgccctccacagctgttcttttcaccttccctaggaaaagtgaaatcctttccaggatttcctctctctctggtcacccccaaaactaaatacccagtgacagcccagccagtactcatgggggcctggtgcaggccaggggccttccccactcctgccttccccgcttgcaggacgcaggctctgctccagcccaggagagcctcccagcgcagctacctcatcctgcacctaggtacaaccacacccccagcaaagaatgactggcctccctgggcaagggagaacctggcttcagggaggcccaggccttgggcagggcaaggcagggcagggcagggcagggcaggggtgaagcaggagggtgggaggagcagggacatatccgccgccaggctgcggaaatgcttcctcataaacggctagaaagggaagatggagtcaggcagcttcagcgaaggcctggccagggcagcagagccacaagggacacgggcttctctggccaagcctcactcagaaggactaacagatgtgtgacttgggcaaattcctgccatgccaccaggcagggagggggacagagcccggcgggctggacctggggcaggaggaagtgtggtcatgtgagtggtatcctgtctcccgggccaagacgccaggcagcggccagacgtgtgtgttgtgtgttcagggaaccgtctccactctcctcgcagagaggagtggcccagggaccacacaccccacccacgccagcagcagagcacccagccccctgctcgccctctggctgccacagggcacaggggcccatcccatgcccaatgcagctgcagaggcaaagcctcggggagccagagccactctccagcatccaaggcaccacgggcagagcgcagggacgtgtgtgctgggagggcctggctgcaacccaaggggtcgccgcaggatccaagagtgctctggtcccaacttaaaggactaaggaccccccaaccttgtccagagaggacccagcctccaccctgcctggtgcagctgcccagaggcagagagcagtgattaagtaaccaaggaccccacacccctacagcctctgagggccgagcccaagatccttcccagcagagcacagtctgaccccgctccaggttctgcataactggagagcacctccaggttagcggaagccatgggcctccgcagggacacagttcccacctagggaaggggaagtggcagggccagtgcccccataccgacagcaactgcgccaccacctcggcgccccccagccctgggatatctggcccatccctcgctgccgctggtctctcacctctccaagttcaggggtttgggcagagaagagctaagagcttcagagacacctcaccagacacccccacgtcccaggtggggaaacaagccccgctgttcctggcaggaccaggaccggaacccggctcctccggcaggctggacaccgggatggcagggcatggacaatgacacgcaggcagaccctctgctcctccatgttctgagtcccctccatgtgccttcacactcacacagctctgccagccccccaacccggtgcagctccgggagagaactatgtcccgaaggcagccagcgccccaccctgccctccctccaccttcactccaaaggctaatgtttctgctgggtggtgaccaactgtgtcaaactgacgtcccagttagggtttgtcacggggtccctgtgcaggcaagcagccacaacctgcccccgaggtcccagcctcttgtccccacctctaggttgcccttccttcccaggaagttgcctgctaaggctctgaaatcactcacttccccgtgactccactctaggccttacacacacacttttgaaatcaagtctaagtccaaaccagggtttcttaattccatctcagtggcttcaacttcctcctccgagacacagctgaaaaccctgtcccggccaactctgcccctactttctaagcaatctgaacacccccagctgccaagggtttatatttaattaatccttatttaaatgtgaatcctcaaaacctccacaaaacaagcctctagctgcacctcggggccctataaaaaccaaaaagcgtgtgcaggtccaatgcgaggatatgaaaaaaataactcctgcctcaaagaaacacggggtttccatcctggtccagctcgtggaagagcgtttcaagccaactttggataaagcagctcttacggccgtcgcttctcccactgaggtctgtcctgctggtgcacttacttccaaatgccccttccgggaaaatgaaaccttccaccaccttcgacgatcaactgcagagtaaacttgcggaaagtgaaggaaaaagcagacacctgattccttgcaagtcccagaacaaagacgaaaggaccacgagtcccgttgttaccatttctacatcccaatcacttggggtgcaatgccccaagatctaggaaaaggaatccacccttttgcccccacaaaatgtgttcagagccaagggtgagcggacccgcactctcccacaccgcattcgggcagcctgtctgtccctcccataaagggctctggtcaagatccaagtcaagccggacccactcccacaagcagagctgtgaggtcctgggggttagggcgggggtcctcagagcttccagggccagtccccaggctgcagacccactcacctgcagacaggacagcctcctacgaccacgatagagttggcaggatagcgggtgacggtccggctgtggatgttgtagaccctgggatggtgggtgggtatccctgtgggcgggaaagcaggtcattagggtgcagggaggagaaatcggaccgccacggggactactcatcctgtcccctcaacctccaccccgctaaaaaagcccccggtcttttccaccctcgggacggccaccgcgggcctgattcggcgctaatctgccaacagcgagcgcctcgtgacacaaagttcatctggggcagggatccggccccgccgggttacgacgggcccgaggactagagccccgggggggaggctggccctcggcggcgccgggtcccgaagccagcccggggacctccagctccaggaaggacccccgggcgggccccacccgcctccggacccacgtcccccgaccgggcttgccacctcggaagccgccggcggggaaagttggttacgggcccacctgtgacgaggtaggggtagggcggcggcgggggcgcggcggggatggcgccgtagccgtgcgggccgcacgcgtagtcgccctggccggcctccaggttgtaggcgggcggccgctcctgcagcagcggcttgtggtccatggcggcccggccgcgcccgccgctccggcccggctcggctcggtcggccccggcgggggacgcggcggcggcggcggggacgcggcggaccgggtggctcgggcccctctgaggcagacgcggggcggggcggggcgggcgcgagccgcgggcttcccccgccctcccgggcccagtcacaagaccggggtcacgtgggcggcgggaggcggggctcgggggcggggccggcggggcgtcttaaaggggccgcgccctcccgaagccgccccgccggcggcgcctctgcactccgccccgccccgccgccgctgctctctagacctcccgtggcggggagacccccccccccgcccatcccccacgacgacccagagacgccccatagggtcatgacctttagggctcgcggatgcacccccacctccccctacgccccgatctcccaggccggccgaggtccccctaccggtggaggagggggagggcggggcctgagagggggcggggccgggtgggtcccaggccgccccaacgccagccctctgcccctatgatcgccagcgcttccagcaatacaaagggcacacccgggtgtgcacctcagctgcggcctgcgcggtgctcagctgcggcgcattccctccgtttgcctttttttggacaattaggtgattgacgggggtagtagccagtgcttacaaataactcccccgtttggggacaaaactataaatactgggcacctgccgcgtctcctcagtttccctaatcttcaggcagccctgccaggtgttttgcttacccctggaggacaacacgggatcgggctcagaagggggagggatttggctgtggcaggtgcgggtcagagcccgtatctaaacctgggtgttttctggcctcggggactgcgtcaggcgccctcgttgaaacatttcctcatacaaggcttcacgggttggccaggacaactttaaaacgaacgattggaacgttcaggattgcttgcgtccttagcgcctctgcaccttttcaggggcacctgtatccgttactgtattctgtctccagttttctcacc

SEQ ID NO: 11721 - DNA, 6000 bp, Homo sapiens
aaggcctgccagccagagatggcattcatgcgacagcggttgaggacttcgggcccaggccttgtccacacggtggtaaggaagaagagagtgtccacagggtgcttcttcgagaccacgtccatgagtcgcacctgggaaggggcctctgctcgcacagcgagccaggccagcctcgtcccagggtaccgtcgctctaactccgctgctgcagccttcaccccaagaaatgggtctggagctccacggccaccttctcgtggcccgtagaccagcaacagggtgagcaatgcatgttctcgtggctccaggacattggctgcaaaggcctcgaggaaagccggggctgcagcagcttcagccaccaggagtggcagcaccagctgcactcgggtggcctcagtgacatagggcataggtaggatttccacccggctcagtggccgcagcaggctgaccctgcgagccagggcccgccggtgcccacgctgtgtcacacattccaacagcaggtccagggtgtactccatgccccgtgctgggtcgaagcgccgatagccgttgagcagtcgctgcttctggaagcgcaggcggggctgatagcgccgattgagctgctccagggcagtctccaacgcatcacccacgtccgccctgctagccccctgtagtgggcacttgggagccccatctgcacaggagaaggtgtgctgctctgtgaagtagtcccagcccagcacctcaaagcgagagtgtggtgtgaaaggagcagggagcccaacgggccagctcagccctgcctccccttcgggggtcagcacggtcaggttccggatctgagcctgggttggagggaatgcacctcacattagtgccagctccaggatcctacccagctccagctgcctgggctctgagattcaaacagctgagctctgtcctaactccatcaacacttagtgaggggtcccttgctaatcactgaatcccttgtacgttattcttcacctctaaaatgcagatggaataggaatcatactcaccttacacaaatgccatgagaaggaggtggaaaatgtgctttttgcacaggtaaaagtatcttgaaatagaagctcaacagcctttctctcctacacccaaaggactcacatcctcttcataatcacacctttgttttcatctacactccacctctgccaagcctgacgttcaacttgagaattctcccttctacccttgggctttcttgggacagttctagaagtaaagaaacttcagagtttttgcctcctcagtggacaggcactattgaggaggagctaaaactattctgtctgaacactgtgcggagcttcctgatcctcagagtctacttgcaaacccctttagctgcattcaagttgtgctgggagcttaccttatgattgctttggacccccaaagacctttgtccctgtagttgctttaaatttaagtatggtcggcctcttcctgccctgccattatacagggcctagcccagccccactgccagctgctcgttcattgcacgcctggacatctcaggctctctctgaccctctgactgcggtcctctgcccacctgctcctcttcagctcacctgcagttgttctatttcactgtaagcccgctccaactccagagcgctgaagcgtttgtggagccggtacatgagggtaccttcggagacagggtgcacggcgaaggcactcaggaaagccgagctcccttccttctcagggtccctatttttggccagttcaaatgagcgatactgctgcccctagagggacaatcagaccaatcaatgacacacacaagagctgccagtcccaaaccgcccttaaccatactcagtgttcacatctgttagcactgctgcgttagaacagaggacagaagaggcaccctttccagcacctcgcttaaccccagttctttcactgcccacattttggaaagtagaaagcaagtaggcaactaaggacactctcggctactctcagtgcattgcttacaggctagccctgctctgcaaggagccatcacagaaataacatattaaaaataataataatgatactttcttcccccaaagattcccattgttcttcaagggaatgaatgacacaagccagaaaatcctcccaatactttggtttgagaggatgagccacctctgggttcttccactcttctccagcacaagaaacagggcagctctctgggctggaaaagtgatcacctcacttctctggagactagccatctctaagacatgcccacactgccataactgaagtgtggatgtcgggggaggtgtggagggcaggggggcaggggagaaggactgctgagtaggagcaccctttggtcttgcttaggggttcctaacaagatactacttttgatagccccaggttctcagattgccaaaggtgagcaacggagggcccacagagcggccagtggccaggaagggggaacaatggcctctaaggtgctgctgggaggaaggccaatcactcatcccccactagcttatcagggactgggactgacttgaaagagctgtcacctggtgctgtgagacacagccgacgcccagagagtcaatgaggcagcgtccaagccactcgtcaggacgggcactgagaatgtctcctcggcagccatccagatgtggccgcagacgaagcaggagactccgtgacaacaggtagccaaagcccccatgacagtaccgggcctgctcgcctgcgccaatgaactcctctgcccggcctaagtacaggtcttggttgatgctgaggtggccagcaagggctgccaggcggggggcctgcacatatgtgtcatcctgcatgatgaagaaccagtcgtagtcggccccaaagtgtgtgtgaaggtggcgcagggtctctgacatgagccaggcgggccgctcatccccatgagacaccacctgcatccctgctggagcccgggccccccgctgcccagtgaagtagagtaaccgagggaagtgatgggccaccgtacggttcacagccacggccaaagtggacagtgtagctcgggaggtcaggacagccaccagcaaccgctcacgggagcccagctctgtctggatgtaccgagtcctgtggaaagaccagtgtgccagaggtcaactccctaatctttaggaacccagcttgttcagaatatacatccccctctaggagtgagttggggctgagaagggagaaacttccttccttgtcaatattaattaggtactgaactgagtatccactaagtagctgacacgaattgatttgggaggggagggagtctaccaaggatagattaggtaggttagatgcaattcctcctctgttcaagaacatcgaaccctggctgggcacggtagctcacgcctgtaatcccagcactttgggaggccgaggcaggtggatcacctgaggtcaggagttcaagaccagcctgaccaacatgaagaaacctcatgtctactaaaaatacaaaattagctgggcgtggtggtgtgcacctgtaataccagctactcgcaaggctgaggcaggaaaatcacttgaacctgggaggcagagattgcagtgagccaatatcgcaccattgcactccagcctgggcgacgagagcaagactccgtctcaaaacaaaacaaaaacaaacaaaaaacatcgaaccctaatttaacaccaatgaatgtgagactttctaagacctgagaaggagggaaaaaacagaaagaaaccatgatggaaaataagccagaattgctccaagtcgcccgacgccgattgccaatggaaaggcagaggcaaggatttacaccagcccaaaacagggccagtgtctggggactatgcacacatgttgctctcacctgagcaccttcttgtagggcttgttggggtccctgtagtaggggacaatccggggtttgaagtcttcatcactttggtctagccgagctctggaatctggattctgtggccctcctcgctcccctacagcctcgacacagggatcttctccctccccctggatccaggaaacccgcaggaggctcaggctgcaccccagagacagccctaagatgaggggaagcgctggccgcagcagagccaacagggagctcagtcgcatggtggtaggccctgccaggtgggtgccccaggggcacagcctcaaggatcaatggattgatgggcaccaggccagtagtaggctttcagttttaaccagagaacctggggtcaatgaggccaaagacagagcgaggcccgctggcttccaggaccagcatccccaagaagattgtcctgtcttcacaactccttctgcctgctcttcaactgtgaaggtgtcggaactaacccccagccaaaacggtaataaatgaaacaatcaatttcactcacactgggattatggtctgtcttccactaaaaagaggaggaagtaaaactcaatactgccaaagctaacccaaaaaggaacactacacacatctgcagactgggcctaagtcaacagatgacagcaagtgataagaggtaagggaaaagcacacgatccatcaaaacaacagccccaaccagaggagccggagcctgcctcagtgggcctttccggaagaatgcctgcctctggcatcggtcctcaggcgggctactgaaggggctgctgagccactgcggcaggcccggtgggcacaagggaaggggccagagcctctttctactctgctccccgtgtttgagaagacgcaacggctacaggaacccctcctcccactcaggagcggtctggagccactcgcatggcacacataagttctgcccacccgaatgaggtagatcggtgactcagcactgacagcctctcaggagcgccatggccgatggagccatcttgcagggcattctcctcggaaccccagctgctgaggagacagcaggcggggactggaactctgtgtgcgagcgattcggtgcctggttttaccagggccccaggggccaaatgaagcaaaccaaaagcaaagagagagcacaagcagcaactagagacaatgccagggtcctgggaacgcaaacagaagcgcggccagcttccgacaggacccctgccgggggcccacagcccctgcgctacctctcggcgatcagagaccaagtctagccctagaacgaagacccgacgcgagtcttcgccgttcgtctcaaaacagaaataaactggccacgtcaccgggctgctgagaagggggctcgggagaccagctcgggtcgttctgcgaggcggggtcggaggtcgcggctgggagactggggcacagacctcgttctcaggccagtcggcgggagcggaggccgcgccagagacagcatcgaggccgcgagcgcaggaccaggagggacgcccaaggccctcggggaggaggcccgggtttcagggccgggggccggcggacaccggataaaggacggccggggtctcccggcgtcccgggagggggcggggcggaggcgtggggaccaagagcggcgtcccgcacgcgcctggcagggagcagggacggggaagggggaacagaccccagtgcccgctgaggcgccggctccgccgctgcagccgctgccacctcacagcccctgtccgcagcttcctcttccgctgcctgtcagtcacccgtctctatggtgaccgcatccggccgctcgctccgcccgcgcgttctctatggtcgctcccacggcctctcagcaccgcgcacctcctcggctgggatccgggctgcctggccccaaccggccgccccccgataagacgcgttcgcccccacatacgcgaatccaggcaaatccagagtggaccaaagctgccccgtaacttgggctgaacaccatctgccctggaaaaagcatacccccaccctc

SEQ ID NO: 11722 - DNA, 6000 bp, Homo sapiens
gtaaataattcaatatattcagcaattctttgggagtaaagatatgcggtatgaagaaaacaaattactatgtaaaaataaactatgtctaaagtataaaataaatataaaatagcagatgtttacacataaagggaggatcagtggaagttatttttaaaaagtgaaaatattttccattgtatttattgatattattcttcaaataaattcttttcaaataaaatatttatttcattctgcaaaaaaaccttaaaatacaacttgcaaaatactctatattaatgtcaatcatttcatatttttcagttaatttgaattgagtaaaatatcttgaaaattaaaaacacctcataatgtcactagctcaaaatgaccaatatgtttgcaatagcatttactaaaatctacataatgcttatcacctgccagacactacacactttaaatacataacttatctaatattcttaaggtgccattactaccccaggttagttatcttgtacatatagctagcactaactgacatactcaggaattaaaactaggtggtctacttaggagactgtacctttaaccattgctctaccccaccttctgaggaaaatgattctgccagggtctgtatgtatttgaaagtcattaattaaactataatcaatcagagatgtcaaatgtgaatatgcttttctcattatgaaagtgaatttgtgagttacaagcaatgaaaaggaaagtgagcataataaacatgccaaaagattaaacagtgtaaatgttaagaatagggacagtacagataaaaagcaaataatcatatttaacattcgaggtcataccatttaaattatctacatgtaccagaaaactacagtggtatcacttataaattatgccccaagagaaccgtctcattaaccttgttcaaaacattaatggtactttatttctaaaataataaactgatcaaaatgtttaaacaatgttttgtttattaaacaacactattcatatacctcacatttctacagaaaaaaagtcaatctttattttcagaaaatttgacataatttgtttttaccttttcagatacaaaggagtatagagatctgactctattattctaagcctgaagtcagtcaagaagaaagtatgactcttaataaatgtggatctactttcctttgaaggtatctttgaaaggagcagtaggagggagagcaatgtagatcttctctaaaactgaatttcaaaggatttatttggcccatcttccacatgggaagaattagaatttttttttttttttgccttttatttcccattgtgagaccctaaatgggaaaataagtccaggttatgtaggtctctatgtggtattagatgcaatagcagccatagtgcaaggaatgtaggccacaaaggcctgtgtaactggctgctgtgaactttagtggcaaaccttaaaaaagggaaaagaaaaaggaaagaagacctttagcacttccatatagatctcaacatcactcaaaaaactttcttcaactgggtctgatgcattaacgagatcatagaattactgctaatttagaattacatactttggtgaggaaagtttattattacaaataaaatgccatagtttataaaaaagaattggatgtgacaataagccatattttaatatgtggtttattattgtgtggattaaaagcagaaagcttaaattaaaaagataattccttgaatttcattaaacagttttaaaaattgttttgcaggtatttaaacagtgtagaaacactgtgagatatatacatatatatatatatatatataatgtcttaaaatcccaacattttaaaaggagctcacctccttttaaaattatgacagatgaaaattatgataactgtaatgtaaaattaggcaaacaagtaaataaaattaagtaaataatgcaattttacctggtgcacttattaacaatattcttattattcaaatcttaccttttctttataaaatcttccttaaactatgataattcttgtagtttctgtataatacccaatgtctgaatgaatattcaaaaatcagtctcattaatgttttaaaaacgcaactgctaaacaaaccatgtttaagtttttcagctatgctagcttttgcatctcttgaaacataactactgggccaagagtttctaaatgattttccagtaaatgacatctgtattgaaacctaagacacacaggcactatagtaaaggttctgaaaaatttcattttttataatcataaataaaattaatctatgatttgacgaggaaaagaattattagaatagcaacatgaatcatatttaaaagaatatacaagagaattaattattccacaaaaggtaaaagaaatattttgttttgttttgtttttggtcagcagtggttcaggagatgaaccaactgtgggctctctggctatcattatacaaatttatcatcaatgaaccagtgaagcacgaaactgagggttaatatagaatgaaaagagactttcccctcaatatatcactttagaagcatatattctgagttctaaaagcaataatcttccacataaaattcaatacaagagtgatctccaaccacattagatcaaattatggcaagattcaaataatatctaatccaggtcctcatcttatataggaatccctggcatatggtcatttcagcctcttcatggatacccacaatgatgggaacttcagccaacagggtgctcacaaatttttggaaaactctgttagaaagctcatgatttaatgaaagtaaagctgcttcatcctttcaaatttctcatagatttatcaccattttgtcctgtgggctatcacaggatagtcagaattccttttcttacctgatagcttttcgctatttaatgatagctttcattctttcacttctccacgttaagtctttccacggcatttcatagaatacatctataatacacaataatcttcctttatttctcttttgaacttactctttgctagcgtgacagtttgccaacgtccgcctcaacaaggagtgctcagaattgaacacaacatttaagatgtgatgatcattgcaaactataatagggcatccgtttgtgggactctattaagtccaatttaacaacgcttaacttttgcagccacgttccatgacaaatatcaagcatttggccaacaaaaccatggtcattagttgtgtagtagacttttcgtacccaaagatctttccatttatgtctattcctataaggtggtattttgacatcgaacatgttaacatgaatctctgtatttgaaccttaggtatcttatcttcaaaaatatcaagttactctattttccttcctaccaaactcatatcccttcagtgttaaatagtatggagctatgttgacttataataacctatctcaatttattacctcttaatactcaagaatacccaaggaaaacattttcttgtatggcaatttacatttaagaaaccttgcccagtacttctttttatcttgtttattttaaaacaagttttttagagaataatttaacagtgcggtacatctccgtaaaagcatttcttagtagttgatcatgattaagcggcaaaatgcaggtaatgacatgctcaattccacctttgagtcaggacaaacagtgtacatcgacgacaacaacaaacccttatgctaatatgcctgtgacgcaaatatccatacataccgcacacgaattgtgcagtgagctaaaaaagaaaacagaaaagaaaaaagctactactttattctacttaaagttgtcctctattcaaacttttatctcactcttctctccttctgcaccataattttctttcgagcaaagacagggagttctggatgattccaatctccccaaatccacatcacagcctccaattgaggttcatttaagtcaggttggagctgagggagcctgggctggaaccggccagggtttcatccagctcctcccccaaaacacgccccccaaatcggagccagaggagagcccaaccacagaggacttccactcaatgagggcaacccctgagtaaagtccatgcggacaaccattcatctcctccgacaaccattcatctcctccgacccccgcccagcactagactgcgctcctagcaccgcgccttcttccggagcctcctcccccgggctggctaggggtgagcgcaggggttagtcagtacgcacgtgacgcgcgatgcccacatgacacgaccgtgagcgggggagggggacacggagtgaagaaggggaaaagttacagaagacccgtcaaagcgcccaaagcaatttgtcccttcttttcttcgccagcggtggctcacggatccctaagggacagctggggacccaggcgcccccagcccagccccagaaacgctggacgcagttctccgctcaccccaccaccttctcttcccagacccgctggtgatgccgctgcaccctgaagttgctccttccttctttccctcccttcctcccattctttctttcttttcttccttcctcccttccccaaaagctcttcatccgcttcgggtgatgccactgacgcacattcaatttgccccagcagctctgaggaggtcagaccaggccgagcaccttccaaaggggagggtctaactgagcaaacaaagttgcacgccacaccacaacctgcccctcccctccctttagcccccaagtcgaatccccggcgaaactcacttgcactgcgggtgctctctggcccccaccccatcatcgcgcaacacacccccttcaacatgcgcggccaccctttcattgccctgcgccccgagcggtcccaccgcccggcaaaacactgagcaagccgctgctctcaccttgcttgacacacttgagccggagggggtccttgcagtgtttgatcacggccagcacgtccctgatggtgagccccgccacgggggtctcgttcacctccagcagcagctcctccgacaccaatttgctgccgctctcataggccaccttgccgggcttcacctcccccaggtaggggaactgtccattctcggcgccccccttcagttcaaagcccagctggccctccgggttcctgccaatgacactctcatggactttgctagtccagtggcttttctttttcaagcttttggacatggcagtggggcgagtcgcctcagttcctgggctccttggggttaggggggctggtggtgagagaatgaggatggaggagcaagggggcccagggggaagaacagcagactttgccttcgcccccctctattcggtgctttccctcttctttggatggagtgtggacgaggaatggggaggatgagagggacggctgggcagaggtaggagagcttggatgaggttgtgctgtcccttgaatgacactcaaggctgtggccccgcagcagaggaagcagtggtggtggcgtcggcggcggcggcggcggcagccggagcgagcagtagccgagctggtgagcgggtgtggtgggggtggggaaggagggtagggatgccgggggccactcctgcgtggtgcgagtgggaacgcgcgcgcgcgcctgggtgtgtgttgttagctgatatccatggcagctgcagtggcagggtgcgtgtgcgtgtgtgtgtgtgtgtgtgtgtgtactagttctactgtactggcagacgggaggaggcaggggaggaggggcgcgcgcgccgggtggggagccacggagggcttcgccgctgcctccctccctccctccgcagcttgacccggtagtgaaggcagagagagaggcaggctgggtccgcctggcagcctacgggaggaggcgggagccgggaaggaggggagcctaggcccggcgtggggaggccggcaggaagggcc

SEQ ID NO: 11723 - DNA, 6000 bp, Homo sapiens
tgcacgccaccacgcccagctaatttttcattttttttgtagagacagggtttcactatgttgcccaggctggtctcaagctcctggcctcaagtgatcctttagctttgacctcccaaagcgctgccaccacacctggccgcactgctattttcatattcaaattcctaactcctagcaagactaagcatcctttcatgcttcattggtctttcgttattcttcagtgaattgccaactttgcccatttttcagctgggtttttatttgtaggagtactttattatagatattaaccttttgtcacttaggtatattacagattatttcactcagtttattgtctttagctttgatactattctgaattaagaaatcaatttggagagatgtcatcttgcttcctcaccagccttcctgggtgctctccaggaccgtagtatgaacatacatgcaggtcatcttctatgtccatcagcaaagtttaatatttattttttatttttatttttttgagacaagagtttcattcttgtcgcccaggctggagtgcagtggtgcgatctcggctcactgcaacctctgcctcctgggttcaagcaattctcctgcctcagcctccctagtggctgggactacaggtgcctgccaccacgcccgggtaacttttttgtaattttagtagagatgggtttcaccatattggccaagctggtcttgaactcctgactcaggtgatccacctacctcggcctcccaaagtgctggaattacaggtgtaagccaccgtgctcggccatcttttgtacattttcctatcatttcaactacattgcagctttcttgagaatagaaacttttctctcttttgtttgtcttttgtttttgagacagtctcactctgtcacccaagctgaagtgcaatggtgtgatcacggctcgctgcaacctcgacttcctgggctccagtaatcctccccactcagccttctgagtagctgggaccacagcgcaccaccacggctggctaacttttgtatttttggtagagacagggtttcaccatgctgcccaagctggttttgaactcctgtgctcaagtgatccacccaccttggcctcctaaagtgctggaattacaggcatgagccactaagaccggccaagaacaaaaactttttttttgtttgtttgtttgattttttgagacggagtctccctctgtcacccaggttggagtgcagtgcacagtctcggctcgctgcaagctccacctctcgggttcatgccattctcctgcctcagcctcccaagtagctgggactacagccgcccgccaccatgcccggctaatttttttgtatttttaatagagatggggtttcaccgtgttagccaggatggtctggatctcctgccctcaagatccgcccgccttggcctcccaaagtcctaggattacaggcgtgagccaccacgcccagccaagaacaaaaacttttaatagctacaagctgctgctctgaattgtgtgccagtgccttgcacatagtgggtggtcaataaatgagagtaatgattactcagagactggcactcaaaagagcacaggccaaacagctacagagggagctgcatatgtgaagcaaaagcttcttggagtactccacatcttacccactatattactccaaaaatatcaactgtcccatatctgaaatgtatggacaccataagatccagtatggggtttggtaggatgaaaagtttacaacctacataacagctaacaacaatctaagcaacaggggaaggagggaaggagacagactagagggggaaggcccggggtcgtggatctcagaaagactcctctagctacagtagatacacactactgataactagctacagtaatacacactactaatagacacagcactacagtagatacagcactaataaccattggcctacaggaaaatttgaataggaagcccttcatctaaaaccaccgcttgttcttccgaggttatgtaggtcagtgtttaggacaaaaataaagtgacaacttgagcataccgtggatcgagctgcaatgataattcagaataggagaaactcacattccatgttgacacccttctgtaatgacaacagcagatacagccacaagagaatgcagcctcaaacatgatcaactcactgcccccactttaaaacggtccttaaaggcagctgttctggaatctgcctatgaggaacacagaatctccagcttccacacgagtcagcctcatccctgatccttatggggtaaaaagcaccatggttccgagactaaaacagcattttcaaaatcagtgctaaaatcctaaaaatgaaccttggtatgagtattttcaaaatgagaaacacaatctggatgcacgtttctcctattccagtcatttgagaaactcatatcaaattcttactctttcaaaagactctaaacaacttttataatttagtatggaaaaataaagcagcttgtcaaagttagcatttaattctgaataaatgatctgggtgatttacttaaaatcaggaaaacacacaaaccaggacagaaatcatcctaagtctgagaacaagaacaatttaataatgtcccgggaatacttggcaaacacacacacacgaagttaactcatctatttcacttccttcgttagcattttagctgaagtatttcatattttccttatatgctcctgaatctctcaaatgaaaacagtgaatagtaaaaaacaaacggccaggcgcagtggcttacgcctgtaatcccagcactttgtgaggccgaagcgggcggatcatgaggtcaggagaccgagaccagcctggccaacatggtgaaactctgtctctactaaaaatacaaaaattagccgagcgtggtggcaagcgcctgtagtcccagctaatcaggaggctgaggagaatcgcttgaacccgggaggcagaggttgcagtgagccgagatcacaccattgcgctccagcctgggacacaagatcaaaagttcatctcaaaaaaaaaaaaaaagaaagaaaaaaaaatcattattctgaagttgcactaaattctcccaaatatcttagtttggataaaagtttaggagacagcacacttcaaggcttaatgatttgccagaggaggggattctgaaaaacatatggaagaaaatgaagagactcacacaaagattttgaagcaaaactaaagattaaaagtaacatcgccgggcactgtggctcacacctgtacccagcaactcaggaggctgaggagggaggatcgcttgagcccaggagtttggggctgtagtgagccgtgacacagccattgcactccagcctgggggacagagtgagacatcggtcccactgttttaaacaaacaaacaaacaaacaaacaaaaaaactaacatcatctgagtgtaacaaaaaaggatctaaacatcgtggtttggtatcaaatgtttatttaggctcccttagacattcatctatccaatcctttgagttactaattgtgcttcaatcctggctctatcactaatttattccactccctaagactcagatcccacctccacagaatgggaacaatagcacctacctcctaaggtcgtttatttatttatttatttatttatttatttatttatttatttatttatttagagacggtttcgctctcgttgcccaggctggagtgcaatggcgcgatctcagctcaccgcaatctccgcctcccaggttcaagcaattctcctgcctcagcctaccgagtagctgggattacaggcatgcaccaccacgcccggctaattttgtatttttagtagagacggggtttctccatgttgaggctggtcttgaactcctgacctcaggtgatccacctgcctcggcctcccaaagtgctgtgattacaggcatgagccatcgcggccggccctcctaaggttattttaatgactacctgggataagccatataaagcactcggctgactacttgatatacagcaagtgcctaaacatcacttacccaaactgcagcagttatttgctgtcactggaaatcatacagttgaacctctcagaactatgtatcaactgagagataacctccaagtcaaacacactggcacatggactttgtaacacccatcttaactgttcaaaggtctttttggttttgcttacttcccggatctcagttatgttccaaggagacaggcgaggcctgcagacagcagattcagagatgtaagtgtgactttagacgccaaaatttttagaaataaatcaggtaaatagagtctctgcacccagataattcaggatcatcttttactgcctctgaaaaaattaagttcttgagttcaacaaaaattattttgccgagcatcaaaaataagtttaagggatttttaagaaagttaaagcctgggcaacatggtgaaaccttgtgtctacaaaaaatagcaaaaaaaaaaaaaaaaaaaaaagttagccaggcatggtggtgcacgcatggagtcccagctattcaggagtctgaggcaggaggattacctgagccaggggaggtagaggctgcagtgagcagtgatcacacactgcactcaagcctgggtgacagagcgagaccctgcctccaaaaaaaaaaaaataagttaaaaactctcaattattatacctttaaaattaacgaaatgtaaaagtccaaaactattatctgggaaagactcgtttcactgccgcctagcagtgcctgcatgaaatctgtactcttgatcagggaaccagccagctcactggtgacgtggagcaacgaattgcaggagcccataggaggcctcggcggtccccgggcgccgcagttttaagagaacccattattagatggaggcacttaaaaaccagatcgtttcccaaagcagcattaattacgccaagaaaatcactgacgacctctcggcaagcccctccccagcggtgtgatcctggacccaagggcttgggtgatgcccacacaacacttaaggacaggtctgacccgaccccactacaccacacctagagcccggtcttgcacgggcagggtggggagccgagtgacctctcccggcgcccgccccacctcccgagctggctgggctgccacgtcaggcgcagccggccacgatcctgcccatcctcctcccgcccgtcccattgattcgcgggtttcctgcaaccccgggacccccacgggagatcccggccggagaagcgcccccattcaagcccagagaggggccacgcctgtcggaccccccgtcccacgccaacttttcagacacagcagggccccgcgcagccgggtgcgctccgacagctcaagttcacgcggggaccgactgcagagcggggtcccgcgctgcgacacccggcccggagcccaccccgagggcccgcaggccgctgccccccgggtccgggcacccgttaggccggccgagggggtgtgtcgggccggcgcaggccccgcgagccgtggggtggccgaggtcggcgggtcctcggcgagacccggcccccacgcccgagcctctccgggccttcccccgccgctcaccggcgcaggagcgcgtcttccagatcttcagcagcaggatgacgatggccgccaggtgggacaggtccccagtcagccggaaaatgttcatggcggcggcggcggtggcggtcggcgcagcgcggcggccccggggctgggcggctcaggaggcggcggcccctgagaggaagcggcgaagatggcgagatcgcccgcgacgtggccagggacgtggccgaactgccggcgcgcgcgcgcgcggggcaccctgggagagcggggccaggccccgccccttaaagggggcgcgccccagcgcaggctcagcaggtcagctcgcag

SEQ ID NO: 11724 - DNA, 6000 bp, Homo sapiens
ggaaggaaataataaagcaagaaaggaagcaatgaaaacccttgttacctttgagattgttgttaaaagtgttcaataaacaggcactggctaagaaatttttaccatttctaattattttgcaaaattgtaatgctttttggaagtaaagatttaaaaagcaaactaataataatcctaaggactagcacaacactattcttattatcttaagaaactagatgtatggaaggatacatttttatttataaacacataaatgggccattgagtttagtaataattaagtttccattagagttgaaattatgacaaatctatcttttcctggtacacttcttcctactttaattcattttaagaagtaggtcaggaataaattatgaaataacaaaacagcaagtgcccaatactactaaatctttgggaacaacgatcagcaataaacatataaaatgactccaatcctagaattttgttttgtttgtttactggcaatgagtacaaccagctctaggtggctggagaggtgggggctgagctagttttgtaggtctgcattggatttttgacatcaggtaaagcctactcctctgagatacagaggtaaagaactttactgccagtagctttccactctaggaaaaaatatgcttcaacctaagctgtgatttagaattaagtcaggccctgggattggccaatgctggattagaccaagtgtgtccaggctgccagttcacccctggagacagcactgcatgcactgtgtatggaaggctgcagggaacatgagggaatcaagggccataagcccacatttgtcaacatggagcaggtgggatatggtgatctgcctgcattttagcaagcttgagaataggcttatagcagagataagactaatcgagaaagaaaagagagaaattaagtgcagctcctggtaaccgacgtgcctcttacccttgtcagtttttcttccttaatgcctttccatttttgctcaactcatgtctgtctctcttaccgatttgacagtcacatatatacactgttttttgtcttctaggtattttgggaaatgaaaggtagtaggagattaaaagaagagtagggtaaacaaatacctttcatggattacaatttagtaagtcctaactctaaatttaagaagaattttccaagtgtgaaaatctacagaatttacaatgtaatggcaacatgattaggtcccaagaaataattaaggtaaacaatgtgctctttttctcctctcccagttctggtaactcaatagtcttcaactacttgagaaggtgtgaggatcattttttatctcagtttggccactaaagttcacatttcagctacgatcaagttgatcatgcttatcccctgctgacaccttcttccccacctcaacaagtcacagatcacttcaaggagaaaatttcaagaggctattaaacactggcatggatactcagagcagagatgttatcgtctctggggacctttaggaacagctgatcatcctggataggcagaattacacctaattcagtccatcaaaaactactgggtgctgcaaagtcagcaaagcattgtgggaatatcaaaaaggtgagcaggcacagcagctccccccgaataacctgaaatggcttcatctggactgcttctgagaaaggcatgtttaggtttggttaccacagaggaggcgcaatgctgggccaggctatgtttaacagggactctgtgggcctgctttccatcctaagatgacacaatcttagaatcagttcttagcaatcacttaacccagtgattctcaatcctgactggacattagtatttgctggggttacttttaaaaaataaagatgcctgggcctatgccagtccattgtctcctccccaccttcatcactcttttttttttaattttctttgagactgagtctcgctcttgttgcccaggctggagtatagtggcgcaatctcggctcactgcaacctccacctcctgggtttgattcttctgtttcagcctcccgagtagttgggattacaggcatgtgccaccacgcctggctaatttttatatttttagtagagacagggttttgctatgttggccaagctggtctcgaactcctggcctcaaatggtacaccctcctcggtctcccaaagtgctgggattacaggtgtgagccactgagcctggcccacactttcactattgaaaacgattgtattctggagggccatgagggaggggacaggtctttttcaaaatctagggaacactaaggactttatcctcagaataaatctgattaataattaatcagaatctctgttgggttttttctaaataaactcccaggcaatgcaaatgcaatggaattatacattggttgctgagaaccattggtcccataaaacaccctcattttatacgtagaaaaattaaggtccaaagaatttaactaacctgtgacttgcccaagatcatatgcctggttagtggcagagcttggcttaaaaccatgatctccattaatttacaaatccagtaagcatctattaagtacattctagggttgttggcccaccacctagttgccactcaagaatactgtaagtcaaagctggttgatagctaaggatatcttaggctgatcctgatccaagttaaaaggtaagtgtaaggtgtgatggttctggcattctgtcttatacttttcttccaaatagtggtgtgtgatttagacctctggaaattttgaggaatcctttgatctggataaaatccattactacctctgacccactctcctatttactagttccagggggccgtctacttacccagatccaatgtgcagcacaaaagtcgggacaggggacaagatcccccgctgggagctccagtgcagttcactgaagccttgatcactgaggctgagagcaggagaagggagagctcgctccttggccctatgtatagaagaagaaaaggaagttaattcagcagttgttggtttgttttttgaaagaagctatgtccaaaatatttcttaacgctctcctttcattcctaataccaacccactcccttccaaggcacagctactgctatcacagtggcttacatgcgatagactaattatatataattatatcttcttcctaagggtgaactgctaggatgtgagaaagatatagttcaatttttgaactcagccattcccatatgtagcaattcatgaatacaagtttgcatatgagaaattgtgtccagaatggggcatcatcagtagtgggagcaaatcctcttagagcagttgccttgaaaagagcaagaaaagtagaaaaatgagagactcataatgttcaagataagagttgatcttgatcaattaaaaacttaattaggctaatctgtcttcagtcttttacaaagaatacaattattccttcccattcacagaatacttactcaaggggccatgtatttattctatttgaaagtaaattaagtcatatccactcagtttgtgaatttacccacattgcttcatttccctttccctccatctacctatcctctgactaattcgctgacccgttctgaagtgagctttcataacctgggcaccaggaatcctctgaaaggtgtacaagattttgaatgggtgagcttttttattttttttctggggtaagtccctagtgtcctccagattttgaaagagtcctgtcccctccttcataatcctctagaatacaattgttttcaagggtgaaggtggggagaagataatgatgttgatagttgttggtacctacaataaaacattttatgaagttggtcctggaactagtcttcaaaagaaggattaaaagagttcatgaaattggatctatcctccaacagaatggacttacataaaatgtactctgagtcacaaaatgattaaatttatccatgctgtgtcttttgtgcaagatttcactagtttgaaaccaaaagaaaggaaaatcatcatcttatttttcttaactttattaacttaatgataatgagaacacctgggaatacggacgtgcttcctatttatcatgatttccctagaaaactgtttcacttgggttactaaaatgcagactacctgcaacggtagaaaaattaagataccagggggcaacacatgatatttagaatgagatgaaaactcaactgactttgatcgtcaattaaataggcagtgcacacctgcatctacacctcacaaggcaatccattgattgttagaaacttcctcagtcttccattcttctgttcttagcaaagcgcctctatgcgaaaagcactcaaatacttgttggattgagtcaattcttttggtttcactcataaattaatgaggaacgtgtaactctgtatagtttcagagtagttaaagagagaaaaaaagaaatgctacataagagaattggggcttcaggtgttacctaatagactagaaagctttccaagagtgcacttaagatatgagctatagcaaccttacctaggcaattcttcaccctaagtttctttctaatgcaaattagtttgaatttctctctcttccctcctgtcctttgcctgaaagtcttctgatacaaagcaatactaccgtaattagaaggaatgcctgacaaaaatacattttaaatttcattttcaaaaaggttgatacttcgtattgcatactccgaattcccctgcatttctatgctgtaaattcctaaactttagataatacatttatatctagtgcacattgttcagttttcagataggaaaaagctaaatctcagtctgtgcccgcaaaaagttgatattttttgttgttttaagagtctccatgaatgttgtttaaattctagaatccacagtactcatcgaagctaggaaaagaattttgcccaccccacagcgtatctgaggctttcttcacagctagctgatcggatccttgcagctgtttcttctgtaggtctcggagctcactgagaacgtccagcacgccttcccggcggggcccggcccaggtgcgcactagatgaggcagtcaaccaagtcaattggttcccgatcaactaaatctctcctaaaaataaacactgccgcgagcttcgagagttcagcgtgtcagagcctctatgatggcagagcacctgccgcgatgcctgattggtagggagaaggatttcccgggagggggccaataccaaattttagggctgttaggctctgagcagtcccttcgtgaccggataagtcagagacccggggtttgagccttgcccggcgctgagcggagggcccagtttcgggaccacagccttgctccctgggagctccgggcggccaatgccgggcaagcccagcccggcacaggaggaggcagggcccgtctccggaaagagggccagaggcagaactgagggcctggttttgtgtaattcgatttggatacaaacaggccagacccaaactggaaacggcgaagggctggattagcaccgaagggattcgaggaggcaaacgggaagtaaaaatgctgtgtggagctgcagagggcaaggggacaggggttgcaaaggaaagagcttcgtgagactttctccttcccggcgtagggaccagcagagtgcgggcaggtcagccctgtcaccggttcgtttagggaaaaagcgcgacatggggcctgggagacaggggcagaggcggtgacagcgagggcccctgctcgggtgggcccgcgggcctcagctcagtcccctcccgagggaccgcgacccccggccccgcggccgcccgcgcgcactcaccagcccgggctgccctgggcggagccgccccgccgcgctccacagccgctgcctcttcgacgcgcgcgctgcctccaggtgcggctctaggaggaggcgccgcgggcag

SEQ ID NO: 11725 - DNA, 6000 bp, Homo sapiens
acactgcttgattcctggaataaacctccatttactcatgatgttttatcctttgtatatagaattggttttcatttgttaaatttttgctaagaatttaaccatctatgtttattagggatgctgatccataattttttgtatcatctttgcctttcttaaaatgcacatgtgagagaattcaccagtgaagctatccagacctggagttttctttagtagatataagaatatttaggttatttcttctcctgtaagctttgacagttagtgtacttcaagtaatttgtccatttcatttaagttgttgaatttatcagcataaggttgttcataatattactttgttgtcattttaacatccattggttctgtagttgtgtacctttcactaatttattaaagatcttaataaatgaagaaatattaccatttcatagactggaagaataaatgctataaagatataaattcttccaaatttatctatagattcacaggaatcataacctcttacttaatcttcttacataatcttcttacttttgtgggtttgacaaactcttttccaaaacttacatggaagtagaaaatggcaagaactacctaaagttttgagatgcagctaaagcagcatttacaatgaaatttatagcattacatgcttgtattagagaaggcctaaaattaactatctaagctaaaaacaaaagagcaaattagaaccaaaagaagaagaaatgaaaataaaaaccaataaaattgaaagctgaaaaacaataggaaaaaacaataaaagctggtcccttgaggcaaaagaataaaaaataaataaacgtccagtcagatgatagaggaagaagaaaacctttgacaacatcccacacccaccatgactgaaaggcttgagcaagcctttcaatccttttcaatgaaagggaaattcctcggtttgataagaaccatttactactctcatcatttctattcaacaaagtactgaagaatttagccagtacaataaagcaagataaacaaattaaatgcaggctgggcacagtggctcacgcttgtaatcctagcactttgggaggtcgaggctggcggatcatctgaggtcaggagttcaagaccagcctggccaacacagtgaaaccctgtctctactaaaaatacaaaaattagctgggcatggtggcaggcgcctgtaatttaaagtgaacacacttaggatgtcttcaagggcctgataatgctgaatttaccctggtttcccagcccacagtcacctgagacattaactacagttccacagccactaaccaatcctatcctttcatgcacttagcctgcaaaactaagaatttaaccttacatataaccttaagccctccaattcaccaggatagtgagactatgaaatgtgaaaattaataaaaatagatcagaacacatttcagaagacgacatatcaatagttggcaaatgaatcaaacaggaatgattatacccaaatgagcaggagataaaggatgaatctaagctaggtttgctatggacaggaaaaaataattgctgagccaggtgaagaggcttaggcaaaagaaagaaaaaaaaagtgataagtactacaaaattaatttgtctagattctagaacaaaaaatttatatttgggtatgtgtgaggtaatctgaaagatcagattaggtctctgataatcacaaaaagttgtggagtagactgaacaatattatcttcatttatagataagtaaattctagcatagaaaggttaactttttttttttttttttttttgagagggagtctcgctctgttgcccacgctggagtgcagtggcgcaatttccgctcactgcaacctccgccttctgggttcaagtgattctcctgcctcagcctcctgagtagctggggttacaggcggggaccaccatgcccagctaatttttgtattgttagtacagccagagtttcaccatgttggccaggctggtctccaacttctgacctcgtgatccgccacctcggcctcccaaagtgctgggattataggcttgagccaccgtgcccagccagaaaggttaacatttgcccatggtcacaaaactagttagggacagggccagcaatgaataaaattcatttctcttgattcacagccacatattcatttaattagatcatgattctgctcaatgttctccaattttgcctaatataactcttgaacaaagtttctcaccataaataaccctgcccccattcacttcttcttaaatgtctacccttcctctgaagaaatgttttcaagcatattttcaagatctactttaagacaaaccctaccctcttaccaacagacctgattactggacaataaaaaggaggtttctatccttactgactacagccatatcctttctgtggctactaacagatttaggttccagtaatattttaaaaactaaccttggataatagattagaaaattactaactattgcataaagcggacttcctgcttatttattgcttggaattaccatcttcagtgcagtcgagggtgagtctaaccgcatagggtgcaactatgttactgtccttcctcttcacggcaaataagacacacaattcatctttcacaagaccataaaatgggacttccttttttaaaaaaaagttcctcaatagaagcatgcttaaaaatctttcccacatcctctaaaccttccaaagatccagtcttcccttcattatactttcctacaataacaaatttttttgaaagagtacactcaacctgtctgaacttcaagattataatttttatctagtactgtacttatctctgccacctactcaaattacccttaaggaaaccaaggatacctgaaacgccaaaatcaaatacttatttttcaagtcttaaccttatctgtcctggggatgaaggaactggtgcagtgttcactagaatgatagtaattatggagctcttaaggagctctactctgtgccaggcactgtactaagcattcaaaaatgttcatttaatcttcacaacatccctgagaagtactacccccttttaatagattaaaattggggctcaaaattacccagaggccaagtagttagtgaagcccatatgattccaatgtttgcagtctcttcccaattctgtggcattttctccatctctttcactatttcatcaacgacgcttataatcaattctcttatttcacatgctctccttggcaatttcatttcctcccaaagctttaactacattctatattagtgcttcccaactttttaaatctttctgtaaatataaacattttgtgctctctgtagcttatattttgaaaataagttttttcccatagaaattacaatattgaatatgtttgttcaaactacacttccttccaccactcaagatctgttaacctctaatgaattgccccatgattgacatcaatagaccttgatgcagaaatattttattggagagatatcaaatcaatctctatttcctcttcccatgtccacttctgctagacatttctctcgagtcataaacatctttaactgtctaataagcatagttccatgactgtcgccccaggcccttcaacataaacctgtctaaaaccaaactctcatttcccttagcaaacctgttctctgcgttctccagctaatcttgtcacaacccacccttgtctattctttaaggtacctacctgcaaaaccgtaacgctgatactctgacttccttgagctaccaggtaaaaaaatcaaccactacaggagtgcctattatggcctggagtagaggaatgcaaaatagttcaaaatatcctcttcctcctgaagaaacagatttttttttttttttggagaggcatgttccaacttataaaattaaaatatattcacaagcattttaatttgatctttaatctctgttttacaggaaaaaaaaatgagatgttactttccactccttcattgttgaaataaacttacactcaactaaaagaaaacaggtctgaatacaataaaagtcaacaggacagcgcaaatagccaactacccaaggacacaaagtgacctggaggcgttctgcggtggcgctgccgtcaaggccggggccgcctggccagaccctccctcagacgccccccggggccgccctcactcccgcacgtccctctgcagctgtcctcagccggtggggtcggcagtgaccgcgggaaaaccccgcttgctgtgcgacccagggcgcgctgagcaggggctgcggctgccgccgctgtccggctccggttccggccccggccccgggcccggccagagctgagtccggactcagccaaagcccctcgccttcagcttcccagacgtccgaccagtggaaaattagcatacctggggcagaaggcagctgcagggccggcagtcctggcaaacctagaaggcgggaataaccctggtgacgggcggggccgggctccggcgctaactgcatccactaggtttggtcaacacagagccgcgccaactctctgaggctgcgccaagacctgaagcggcggaccgagagcccgggtctgagactgagagagcaacggaatggaggcggggtagaggcggaaacacaacctgcagggccagagcgaggcgcgagaaggacggcggcgtgagggggcggggcgcgcagcgcgagaaggcaggcacgaggggcgagcgcgaggcggggcacggcgcgtggcgtgagacggggcggggcgcgcgtatcggcgccgcggccgcgtgacgcgttttcaaatcttcaaccgccgcagcccactcgtttgtgctttgcgccttcctcctccgcgccttggagccggatccggccccggaaacccgacctgcagacgcggtacctctactgcgtagaggccgtagctggcggaaggagagaggcggccgtcctgtcaacaggccgggggaagccgtgctttcgcggctgcccggtgcgacactttctccggacccagcatgtaggtgccgggcgactgccatgaactccggagccatgaggatccacagtaaaggacatttccagggtaagaagcccctcctccgcctgcagtccctttaatcctttcctcccctcgtggttccaccattgattcttcagacttctcccgccgggtcctcagcttcttttcttctgaccggcctctggggtctgaaggaaggagcccccgttcagtgttttgcctaagaaggaacggatcctgacccggcccctcgagcgctctgccgtttacagcggcggtcccagattgattcccggtcgtgccttcggttgaaaactagcaaacaatgtgcagatccgggacctcgccgggactgcggcgctgtctgctcccgggctctcgcatatgctaagcctccgcccgggcccttggaggcgacggactgcatcctcaatttaaagtcagacgcgctcgtggcttttcgcttcaggattagattgagtgattgtgggtggatttttggtcttacccttgaaagtttattttcctttcctcataagttgggggaaagcattgtatttcaaacaccccattgctggtttcaacattacaaacagggaaacaaaagcaaatttccattttcagtcactttatttggtgaaacattccagcacctaagttttttgtacaggtgtttgtgtgtgtgtagtaactaccaatttaagaacagattgcgtttgaaaaattaatttttaaagcagttgcttggatctcagatctgtttctaatgaaaataatgaaaggtttagttcttcgtaatggaccgttaagttcttaatacgtagacaaattgtatgtgaaatggaccgtttagttgttaatatgcagacaaactttatatgaaactaaaacttgagcagtctgaaacccttgagga

SEQ ID NO: 11726 - DNA, 6000 bp, Homo sapiens
ctgtccttgtacctcctgctcagcacgctgccctctcgtgcccctccctggcacccccacctcacctgcccccccgggagtgtcctccggtcctggttgcagaagccacagcctccctcaggagtccagccattggggacgtagtttcccaggtagttgagctgcagctgttggggacagactgaggctgagtggctgaggcctccaggggtggaggtgggggtcaggcacctctgatatgggggctgggaagggccagcttctcagaagggttggaggtgcctgggggttggggcagggcggggcgggggttgagaccactggtggcaccttagtgggaccgtttccatggaccacaatggggagcgtgtcgtaggccacgttccggatacgcacacggttccgatcaaactttaaaaccacttcatctggggaagaaaaaggccaggcttcagaccccctttctctgggagctaccaagcaacacattcttctaaatatggggtcccaaattctccagggaataaagggacaccagggctatcctggagtgtggctcgttgtgggcaggaacctttgggttctgaccaggctgctggcccagagagctccactgcctactacctgcgtgatcacaccgcagctgggcgaggaaggggagggtgagctgagcgggaggccagtaggagcctcagcatccctacccctcctcatattctctctctccttgtttttttttttttttatttttattttttgagatggagtctcactctgtcacccaggctggagtgcaatggcgtggtctcggctcactgcaacctctgcctcctgagttcaaaagattctcttgcctcagcctttcaggtagctgagactatgggcacatgccactacacctggctaatttttgtatttgtattttttgttttttatgctgagatggagtctcactcccaacacgcaggctggagtgcagtggcacgatcttggctcattgcaacttccacctccagggttcaagcgattctccttcctcagcctcccgggtagccaggattacaggcgcgcaccaccatgcccggctaatttttgtgtttttagtagagacagggtttcaccatgtcgaccaggctggccttgaactcctgacctcaggtgatccacctgcctcggcctcccaaagtgctaggattacaagcatgagccaccacacccagcctaatttttgtatatttagtagagactgggtttcactatgtcagccaggctggtctcaaacttctgacttcatgatctgcccgcctcagccttccaaagtgctgggattacagatgtgagctgtcgcacctggccttttttttttttgagaaggaatctcactctgtcacccaggcaggagtgcagtggcgcaatctcggctcactgcaagctctgcctcccgggttccagtgattctcctgcctcagccttctgaatagctgggattacaggcacccgccaccacgcccagctcatttttgtacttttttttagtagagacgggttttcgccatgttggccaggctggtctcaaactcctgacctcaagtgatcctcctgcctgggcctcccaaaatgttgggattacaggcgtgaggcaccgtgcctggcctctctctctccccgttctccccatcccctgaggcaagtcaccaacccctccacaagctgttttcctcatctgtacaagaaggataaccagggaccttccctttgttaaatggaatcacagaagtagaccgggcacagtggctcatgcctgtaatcccagcactttgggaggttgaggcaggcggatcacctgaggttgggagttcgagactagcctggccaccatggtgaaaccctgtctctactaaaaatacaaaatgagctgggcgtggtggcgcatgcctgtaatcccagctactcgggaggctgaggcagaagaatcacttgaacccgggaggtggaggctgcagtgagccaagattggaccactgcactccggcccgggcaacagagcgaaactctgtctcaaaaaaaaaagtccctggcccggtgcccaggcacagcatgtgtgcaacagatgccagacacgtttttgcttcccttgcttctggtagtaccatcagcacagtgcaacttacacaaccagccactcagacgcctgacaaaaccacatagaggtgggcttggatcagcccagctcctccagaagcctctcccagctcaagacccctagctgcagaggctgcgcatcgcccacctgcggctgtcttcctcctcacctaaagccccgttgaggttctgaaagatccgagacttatgatccagattaaggctgagtttctcctaaatggaatgagatgcgatggagtggttaaaatggaaggagtggaaaggacatcatttctcacttttctctctctttttttcttctcttgcttttgttgcttaggctggagtgcaatggcacgatctcagctcactgcaacctctgcctcccggtttaattgattctcttgcttcagccttccaagtaactgggactacaggagagtgtcaccacgcctggctaatttttgtatttttagtagagacggggtttcaccatgttggccaggctggtctcaaactcccaatctcaggtgatccacccgcctcagcctcccaaagtgctgggattataggcatgagccaccatggttttcctttttttgtgagagacagagtctcattctgtcacccaggctggaatgcagtggtgcaaaacatcctcaaactcctgggctcaagtgatggtcccacctcagcctcccaagtagctgggattacaggcgtacaccatgaagcctggctaattttttctttctttttttttgtagagatgaggtctcaactatgttgtccaggctggtcttaaattcctggactcaagcaatcctcctgcctaagcctcccaaaagtcttggatgacaggcgtgagccaccacgcccaggcacacatttttctctttgcaaccccctttgctccccaaatcccattcagcctgaggcctccactcccacagagctgcgggatgcgcccactcctctgccttccctaccctcagtcctgggtccaggtagagccgtgtgtagaacagctggtcgtcgtcatcatccttgtacttccactggcgcacgatttggtggatggtggtggcaaaaccgatgaatcctggcggggagggggagtgttgacctcgagactcccagggtcccagggcctgtcccccaggctgtctccagccctcaggcgcctttaacactctgtgtcccaccgctcttggcccctctgccttgggcactctgccactcaccaccagaattgaggaagcgcttccccgtgcccacctcagggtactgctccgccagcccccactcgggccagcagaagctctctgcagagaagagcaggcggctgccactctggacgaacttcttcagcagctctgtggggctgccggccagaatcacgtcgtagctgggtgaggaaggggaggatgggcaggggtccactgggaacctcagcatccttaccccgctccctatccccagccccgttacctatccacaaacatgatgatcatatcctcccggtcagcgtatttctccatttccttctttaaccaccggaccttctgtcctccaccaactgttcgagccacatcaccccctcgccactcctctcccaggcccagggtctgtggagaagattgccccgtgccaggcaaggggtggggagttgtggggggaactcctgaccaggcttaccgtggggacctgggcatccagacttcagcccacccctcctgctgggaccccctcccaggggcctttccctctcctcacccgcacagtgtagttgaagaactccgcagagcgcaggaaacgcaggtacccctcggtttcagctgtggccacagtgatcaccagcagcttctctgttaccagagggaaatggcacttgagatccaccgcccagctccgggcctcacgtgctttgctgtcctccctctcactcgacttccctccctttcttccttcccattcttaaactcttctcacccaggaacactctgaccccaaggagggcagggtgggagtggtgcccaggaattccgagtccctttgcatagggaggctggaaaccccagttcagggtagtgatgggcgaggggcttggcgcgactcagcctcaagagcacgctgggcgggggacgggccagacacctcctcgagcctccgaccctctccgggccaggctggcaggcacgccagcctctgccccctcggccgtgccgggcctccccgggatctcacctgggttgaccgggtctcggccccggggccggtcggaggctgaggccgcagggggcagcagcagcggcagcagcagcaggaaccggggtccaggccccgaggaggtcatggtggggagcgggcccagacagcacccaggatcctgggatctccgctacgcgcctggatcccagctccggaggggagctctggaaagggggcgctcgggctgctgtgcggccgccgcggggagcagcttggctggggctacgccctgaaaaaaaggcgtatccggaggctacagaaagctccagatgccggcgccacagacaaggcgaggattgtcccgggcgcacgggaggcgggggaggggcggcggctcgggccggcgggcgggagacagggactctgggctgagccagccgcttgacacatgtggaagctgaaacctggacaggggaagtgacccctggcggagggtcgggcgggacgcgggggcgggtcctggccgcagccctgcccagagagtgcgggcggaagacggggagagcgagaggctggcggcgacagggagggaggaagcctaggagtccgccgcgggacggaggcctgggggaactgggagttcagctttctgcagagggccactaggaacctcggattgcccacggaagccagccactttctttgacagtccagcccacctcctcttctgcccggagaagctccaggggctgcctttgtgatcacagcatcttcacaaggaccaaaggaaaataagatttcttgtaagaacaccgtgaccacatctttaaaatgacccatttcgtggctcccacaagatttacacctccacactgaggccggaagtggttttgcccctataaaacatggcgaaaagctttcttgtctccaaggaaacgccacgtaatgagtcaaagctgtggcgcacgcgcagaagtacaagctaccggaagtgatggcgcccctactaaagccttggggttagtacgcgtgcgcagcagtttcttccgacagttgtgttgtgccaatggtggagaagaaaacttcgggtatgtgagcccccgcggttcgcccccttccccttcccaagtcagtcctagaattttcttacctagtcattcctcttttttggtctcgctctttcgcctaggctggagtgcagtggcatagtcatagctcactgcagcctcgatttcctgggatcaaaccatcctcccacctcagcctccggagtggctggaactgcaagcatgaggccccacgcctggttaatttttaatttgttatgtggtgacgggctctcgctatgttgcccaggttggtctccaactcttggcctcaaagcgatcctcctgcgtgggccttccaaagtgctgggattacaggcgtgagctgccgcgcccggccccagctattcctcgtaaatcccttcctcagccctcgggtcctggcgttgacccttcattcacgttttattggtgcctgctccaagccgggcgctggggatgaagaggagaaagacccctcttatccaagcattggctttttctggaaggggggcagaaacgcagacctaacactgtattttactgtgatttgtgatttgtg

SEQ ID NO: 11727 - DNA, 6000 bp, Homo sapiens
ttaatgagtttggctttccaatacactgacccattaaccaatgttaatacataacattggttatgatatgtaaccatatcatatggtatcattggtatgatatgtaacattggttatgatagtaattacataaatactatcatagataccatactttttttaggaattaaaatctaaaatactaactttaatctttgttaattatcacaaacatcaataatcatttaactgggaagaacaaagtaccacttacgtgatacagaatcataatattttaaaagtgggttataggacttcagagatcattttatctaattctcacattttgcaacaggggaaacagacccacatccatacaactaatctgtggtaatgccgtgggtagattcggctctaaattaaagtttctccctacttagactatgtcaataaaaggagaattatcacagagaaaactgtattaaatttagaattgcaacaaatgcagaaaggaaggttttgtttgctcatttacttaaaaaaaaatcggttgtatatggtatatgactcaacatgtctacaactggttctgatttaattaggataagtaaaagactaaccaattacatttaaattccatcctagtcaccatgagttgagagaacattacagatagccaagcattgttttgacaccagccataaattttaccataaatattctcaagaaatgtcatgtatctactccataataaatgtaggaaatcaaatgagatcagtttgaataggataatccaagtaaaagttttagaaagaaataagatatgtggctgggtatggtggcttatgcctataatcccagcactttgggaggctgaggcaggcagatcacttgaggtcaagagttcaagaccagcctggccaacatggtaaaaccctatctctactaaaaacacaaaaaattagctggcttggtggcaggagcctgtaatcccagctacttgggaggctgaggcagaagaatggcttgagcccagaaggcggaggctgcagcgagccgagattgtaccactgcactctagcctgggcaacagagcaagactccgtctcaaaataaataaataaataaataaatgagatggtaaaatgacctccaagttcacaagttgttctaaattacatcatactttgtaaaggacttgtaagttagaatgaacttaagcaggactaatcttagaaagatattcacaatatagtgttatcaacacaaagtggaaaaagcgtaattacccctaggaaggcactctactattatagaaagatgatatatttttaagtgaaataaaatctagggtaatacacagcaaaagagtggctatctatgagtgatagaattgtgggtgatttttcttctttttgctactctgatttaaaaataatgcattatttctttttttaaagaaaatattgtattgtgaaaagatgttacaaaaaaagagaaacaacaaagattgtaggtgaaaaaacataagcaaatggatagtaattttcctgaaaactttcacttacagaagtttcttttcatctttctgctcatcaggactaagtgaagcaaatgggttctcagacaatccaaagccttccttcctgttagttgaagctccagaatcaaaagaactgaaatatggcttttcttgatctctgctgcccccccatggtgtggatttggagaaactggatggctggatgacattggaatatctctggctagttgtattccatccacgtctattattacctaaaataaacaataaaacaaaataattttactagcaacttttctttctattttctttttaattgagatagggtctcactcttttgcccagggtggagtacagtggcatgatcttggctcactgtaacctcaacctcctaagctcaatcgatcctcccacctcagcctcctgagtagctgggaccacaggcgcaaaccaccatgtctggctaatttttgtactttttgtagagataaggtcttgccatattgcccggggttggtctcaaactcctgggctcaagagatccacctgcctcagcctcccaaagtgctggaattataggcatgagctactgtgcccagcaactgttctttaaaatctcaaaaatcttcattatatcttagtatgtctagacaatatagaaagattcaacaagcactacatttaaactcattttaaatgacaatctcttcattttttatttatatacagtagttaggttgtaatatcaacaaatcacatagtggccaattgcatttttgtttgagattgagaagaaaataatatagaaaaatagtgatatattactaaattcagctgacaaagcttattaaatgaacaactgcttgatagttaaaagttgacagaaggcatgcatcataaatcataaactccttcaggataaaaacttgggtttttatcattctttgctcccccaccaggccctatactgtagtaaaggctgaaaaatggacattgaattaaagtttctcgaatatgaaagattacattctaccctctgtttttgtacagatgcttaagtctatttgacgcagtcttttctctgggcaaacacctacacacctattttcacagagagattatacatggtatttacatgtgtacagaatgcatgtagttcctctaccagctttccaatatttcataaatatcaaaatgagccaaaaagattctctcctctctttatatattggttttgttttgttttttaaaatcattttagcaatctcatttactcatcacttcctagttggggccaagattaaggtaattcatcttgtttctgactgaataaagagataagccattaattatattaaaagttagaatgacacacatgcccagttgtgaaagttcatcctgcaactctaaactaccctaaaaaaaaaaaaaaaaaaagtggagattgctagaccagatccctcaagtagaagttaatggtatcttcttcttctaaagttccaaattcactgggggatgatacaactgaagaaactcacttcctccttttttttttttttttttttttttacattgcttttggtcttcatacttataattccagaaacattcatttgtttctgggagctaaatacaatttgtctgccaaattttgtttacactcacattcatcagacatgagtcctaattttcggtctgaaatatttcactagattaattgtggaggaaataaaaggactgtcttccctgaagtgggatcagacgtgaaaccatcacgcaatacaaggtttaaaggttagatgaggcccgccgcggtcgctcacgcctgtaatcccagcactttgaaagacggaagcgggagtatcaccttaggtcacgagttcgagaccggtatggccaaaatggcaaaaccctgtctctactaaaaatacaaaaattatcaagggcatggtggcgggcacccgtaatcccagctactcgggagactgaggcataagaatcgcttgagcctgggaggcggaggtcgcagtgagccgcctgactgagagagcaagactccgtctcaaaataaaataaaaaaataaaggtcagatgaatagccctaaaggaggggaaggaagggagacagcaccgaattattaacccgatctttaaaaatcttgtgttgttctaaggtttcatgtctaatctctcctttccttgaagataaaaagctttgacaatgatctaggcccagggactagatcaacgtggcccccgcatctcctttcctcacctcccggatagcccttaactgggcgtcccacattcccaatttcaccccaaatttatgagcaggtgcatttttgcggtatggctctataggttttattagattttctttttttcttttctttctttctttttttttttttgatagtctcgctctgtcgcccaggctggagtgcagtggcacgatctcggcccactgcaacctccacctcccgggttcaagcgattctcctgtctcagcctcatgagtagctgggattacaggcgcgcgccaccacgcccggctatttttttttttttttttttttttggtatttttagtaaagacggtgtttcactatgttggtcaggctggtctcaaactcctgacctcgtgatccgcccgcctcggcctcccaaagtgctgggattacaggcgtgagccaccgcccggccggttttattagattttttcaaagaagtccacgacttctccaaaatgaagtcctgattctgacccaagctgctagcctcaccctcgaaaaaacaacttagtaaaaattatattcaattccggcatttacctacaaggtagtttcgataggtacttccgatttaaaaactcagtttcgcacaagcatccaggcccaaacccaggtcctcagaagctcaataaaaacggaccacatgaataatatgtagataaaaccctcggtttaaaaacgttgtgcagggcccagtagggccggcaaggccgcgacgcgggcacgttggggtcaccagcagcgggaaacacgcgggacgcccggtccccgccggcggacccttcccggctcggttaccgcggaggattcagaggagagtcacctgaaggctgctgctgcggttgctgccgtcctcctcctgcacccctagcaccgggatgttcgttccagcaccgatctccaaagcggcaccggccttgaaggaagaattgacaaatggccattgcgacggcgtcgctgacggagggcgtcttcagtctgcaccgttcgatgcctgttactgggcagagagccctaaggcaacctcggcgcccggccgggctactgtgacgtcatcttctcgcgcctgggaaggcctttttccgcctctcacccggcagtgccatgagacgcatggacttgagccaataggacttgagaagagcggaccgctctgacgctttgagtgtgtcctgggaaggagggatgcttgaacggttacgtgaagaccggaggcgcgtttgaccccggtgcagggcctcggactacaggaaggctggaggtccaaaatgagaggaaagcggagcaagcaaacgcagaacttcagcaaggccctcagaggagaattagctatgatttgagagactgagtcgttcttgctgagacggtaaaacttagcttgggctgagaaagtaacaaactgcctagcctttcatctggatggataacagagtcaaataaagccagacgacgttaagaggaaacaatgtttcttttaggacatgctgcaacggaaaagtattaccacttaagtacattcttactacacactgagaaaccttgttatttcttcttttttttttttttttttgagacggagtctcgctctgtcgcccaggctggagtacagtggcagagcttggaggcaagctctgcctccaaggttcatgccgttctcgtgcctcagcctcccgagtagctgggactacaggtgcccgccaccacgcccggctaatttttttgtatttttagtagacacggtttcaccgtgttagccaggatggtctctattttctgacctcgtgatccgcccgcgtccgcctcccaaagtgctgcgattacaggtgtgagccaccgcgtctggccgaaaccttgttctttcaagtccacataaacgttgctatttgaaattatatcagaacgagtgaaaagtcccatccttgcctggaggatctaagtctctttgacgcagagaagcagcctcaatttctatccaggtgtagagcttcagataaacggttctgaaaacattctgtattttcttaactttgcagtttccaaggaaacatgccctacattcaattctcgtccagacctgatgttaatgcctttacacacagctatgctttgagatttcatttaaatttcacctaaacttcactctccccgccaaaacatacaataactaccttttattttgtacgg

SEQ ID NO: 11728 - DNA, 6000 bp, Homo sapiens
ggtggcaagcacctgtagtcccagctactctggaggctgaggcaggagaatggcgtgaacccgggaggcggagcttgcagtgagctgagatggcgccactgcactccagcctgggagacagcgagactctgtctcaaaaaaaaaaaaaaaaaaaagggtggggggggaatcggctagtaatgcagccttaaaacaaaaaaagaaaaaagtttaaataaataaaagggtcaaaatctgtgtaagaagcagtagactcctaaatttcctctctgactctgagcaaccaggctactactctcccaccataacagaagactcaaggtttactgtggaaagattgaagtaggtggtctctggactcttagacaacagactcagctaaagacaggagtatcatgctgaaaaacaagagattaaattaaaacctacatacttagttgtgagatccatcccctggcttcattccctgaactggctttagaacactggcagtctagcttataacccccaggctgactagagaactcaaggtaaaagcagcccaagaaaaacagaccaacagaaaagcaatgagagaaaggatgaaggttcccttctcgatgatccattaaatggaagagtaacccaagaaaacatcatggaatccaagaatcagtggatccagcacaacaaagaggcaaagggaattccctaggacagtgtttatggaatcccatgacagtaattatccaacagacctagcgaaccaggccagactggagcagggaaatggagggctcttgggatacatatttcctttagccaaaaaagaaaacaaatcaccagtctgaacaatgaggatatttacagtactgagatttgagggtgacttattgtggatacccagaaaacaaaatgttaaaaaaaaaaagaggtatttgattaccaacaggaaaaaaaaggttccacaaaattttgttttaaaaataaaacttaaatattagtaaaactacataaagatttcaaaaaaaactaggtgacattatttgatatttttgagccagcaaactggaaaacagtgggttatgatcacagcagaatgtctgaatcagtgatttggaggtgtggtgactttttttttttttttgtacaatcttgctgtttcccaggctagagtgcagtagcgaaatcatagctcactcagtcttgaactcctgggctcaagggatcctcctgagtagctgggactataggcaaatgtcaccacacccaactaattttcctatttttttgtagaaatgaggtctcgctatgttgcccaggctggtcttgaactcctgggctcaagggatcctccaccttggactcccaaagtgctgggattacaggcaagagccaatgggcctggcctggctggcaacttttttgttttttttgaaatggagtcgcgctctgtcgcccaggctggagtgcagtgacacaatatcagctcactgcaacctccacctcctgggttcaagagattctcctgcctcagcctcctgagtagcagagactacaggtgcgcaccaccacgcccagctaatttttgtatttttagtagaaacgggttttcaccatgttggccaggctggtctcaaacccctgacctcaagcgatccgcccgcctcagcctcccaaagtgttgggattacaggcgtgagccactgcacgcccagcctgggtggtggctttttagtaaagacaagatccagggtgtgattgtgtgaccaggtggctaaagagaatgaagaggtaaaggaatcagaaggccaaagtgttagctgaactgtcaatccagatgctgaagttgcctaaacgtgatgtgttactgctggatattttccagatccacttttccaccctcctctatcatgttttctgctccaataggctgacctgtatagactttaccaacaggtcactgtgcccctggcttccggttgggtttggccaatggggaatcccagcaagaaattaagagaacagggtcaggatattcattcctccagcttcattctctcaaggtcacctgaaactagctatgtcccttcggctgaaagtcaccattcctctcaaggcagccaactccatacttttcaagtaactattccctcttttatgggatgttaaccgttcagctataggttaccaaactatttcttgtcacaccactatacctaaatctttataatagtatctttataaaataaactcagattatcctgtcaagtgtgccatctgttcctgtctggactctgactattaactgtgatggtgaagatgatgtaaggttgtaatagagtattggaaagtaaggagagaaaagtgactaatacttaaataacaattgctaacattttaatctctatgttccaagaacttttctaacctcttcgtagaatattaactcatttaatcacaactaccttctgtggtaagcagagatttttgtctggttcatttccaaatccaaacacccagcatagttgctggcacatggtaagcactcaaatattgatttaaaatacacacaacaagcaggtttaattagaaagagattacttttttagtatagtgtagcacttctcctaattacactttagaaaactatacaaagatcagggaattgttgactctccagagatcacagaaacactaaatgagaccatatgtgaatgattttcttgtgtagcctacagtgagtcgtattcctttattttctgaagaggacttgggtgccagttttttaggtttaatattcaaagtcaaagttgcagcggggggcgatggctcacatctataatcccagcactttgggaggccgaggcgggcggatcacctgaggtcggagttagagaccagcctggccaacatggcgaaaccccgtttctactaaaaaatacaaaaattagctgggtgtggtggcgtgtgcctgtaatcccagctactcaggaggctgagacaggagaatcacttgaacctgggaggaggaggttgcagtgtgccgagatagcaccactgcactcctccagcctgggcaacagagccagactctgtctcaagaaaaaaaaaaaaaaattagtcgggtgtcagggcaggcacctgtaatcccagctactcgggaggctgaggcaggagaatctcttgaacccgggaggaggaggttgcagtgagctgagatgggaccactgcactccagcctgggcgacaaagcgagactctgtctcaaaaaaaaaaaaaaaaaaaaggcaaagttgctccataccaagaccagatttttaaaaagtcaaagttgcaaatttttaaatattatgcacttgcagcctaggagctgatttaataaggcagagcacctttaagtatcagttatgagttaaaataaagggaagggggccaaaaaaaatatggttgtgagtataaaatgcaaaaataaaggtaaaggtgagtattttgtcagcctgtaaaaaaagcctctttagttttcaaagtacttaatttttaaagtacatcctacattagaacctaagtcagccagataaccaagaatacacatttacacagaaatgaagcacagcaaaggtgtgaaaattagggcaggaagcataaaacatgaatcaaagaatgcagaaatacaacagatataagctacaattaaatatctcaccggatgcacacacagttttatatggaataatcaaagcagcagtgatacccatcttataaataaaaatctaaaagccagagaaataacaaggttagaggattaatatgaaacaaaatgagaactccaaagattttctgaaagcagaattactgttttttcttcatattatgttgccactccaaagcaaggggaaaactcgcatgagtaagaatctagaaacctgagaagtttcgagaagaacagactcaaactggagtgaaaataggcaaaaagagtgaggcataaggctacgactgggagcaaaatgccagatgcaagtcttggacacggaggggagacgaataaagccttcttaagcggaaggtggagaaacactggggttggatttggtgggaggaagacaaaacggaaaagcacggcccaagaagcaacggcaaagggagaacttaaacaagattagattgatgccacaatcgaagagtataagacctacaaatcagattctgccgggtggggaaagggccagttcgcgaccgatcaggtgcgactagtttcccaaaagcggcaaagatgtagcttcgcagccccaccccacgacagcagctcctccccaaggaggacctcacgaggtcaactgccgggctcaggttctcccccggagcctaggttccaccccgccccggccgtgcggcacagaactgcctctctgggcccctcaccgaacgctgcagctccccaagccaaaaagaggcgcgctcctttccgctgggatctgggtcgtggtaaagcgcctgcactgcctggtacacgagctgcaatgtcggctttgctccttccatggtggtggcggtagtggcggtagcgacggctctgattcttctccggaggattcctcggttgctccgccttcgcgcttcctcactgtctgggccacggccgctccctgactggcgccatctcctcctctttggccgttaccagggcagaaggctctccgtggaagttgccccctcggaaacagctattaggtcgtattcaggttcctggccttttttccggtttttccacttgattctagactcttgagtccacagattctggcgctcccgtcttcagtcgctgacttgccctcagaagcctatcttgggaggccacacaccagtgtacctaaggttcgtttacccggaccggaagcgacagcaccgatacctttggcacacttccgcctggtacactacaaacggcctccttcccggcacgcctcctcttgtctccccgccccctcccggaagtaaccctgccgggccaggagccgggaagaagagccggtgttctctctgttcctcgctagcagcttgggacattagcgccgagatgtgccccatatctgagctgccttcagctccttggaaacggatccaggtttttcctaccccttccgactgccccatccctctccagagaatccttttctgccctggtgatcaaggcgcgtcaattcaactctccctagagtggccacagtactggagatccaaagatgacttaagacatggtacctacgctggctctagtggaggagacagacacgtagtcaactgaactattttacaaacctgaaatatgtgccacattgagataaatccaaaatgcctagaatctttgttcagctcccctttacttagttcttaagcccaaaagaggtcttcattctgcttacagctcctggtgctctaactccagagcattttgcatacatctttagggttattctcacattgaactgtatttttgtgaatgcctttctgtccgaatccaataccagtggtctaacaattcacaaaagaaaacagaaatattggaaactgtactatggagaaattagggacaaaaggtaacagtatattgatattaacattgctgctagtcctttgcactagtaaataactgctatttgataaatgatcacaatgtgtaaaacactgtagttacaagatctcatttaatccgcctaacaaccttgccaagtattaataaaacccgttttaggcgctgacactgacctacagcgcctcagctccagcgccatggcgccctccaggaagttcttcgtggggaggaactggaagatgaacgggcggaagaaatgtctgggggagctcatcggcactcagaacgcggccactgtgcctgccgacaccaaggtgatttgtgctctcgccactgcgtataacgagttggcccggcagaagctagctcccaagattgctgtggctccgcagaactgctacaaagtgactaatggggcctttact

SEQ ID NO: 11729 - DNA, 6000 bp, Homo sapiens
agtcttgcccctctctaacctgttctctacaatgctaccagagatcagagtaatttttctgaaaatacacctggggccaggcgcagtgactcacacccataatcccaacactttgggaagtcaaggcagagggttacctgaagccaggagttcaagaccaatctgggcaacatagcaagactcccatctctagaaaaataaataaacataatcaaaatatacctggtcacaatactcattcatgttacctgccagagtaggggatgcagacatgaatcaaaacccatcctgatttcaaagccctacccttagagtagagaaagacatgtaaacaagtaaatgacagtagagatgaagagacatggattgcaggcagatgtgggaatgctttactgcagagataaccagaagcctgtataatctacaggtggctaagtgggaaaacgcattccacggagaaagagaaacataaagccatttaggcatgttcaggtaatagaggtgattttatatggctgaggcaaaaggcaaggcatgcagcaagacacaaagcctgagatgggaacaagccagactttgtaagatctgcccaggaagaaatccttcaaaggttcctcgctatcatcaggattatgtgttaggacacacaaggtcattcatgagcggctcccatataccttcccagcctcattgctcattatgcccattctccagcctttccaaattaccagttctttcccaaaagcaccaggttatcacacatttttcttttttctttaattttgagatggagtctcactctgctgcccaggctggagtcagctcactgtaacctctgcctcccaggttcaagcgattctcctgcctcagcctcctgagtagctgggattacaggcgcccaccaccacgcccggctaatttttgtatttttagtagagatggggtttcaccatgtggccgggctggtcttgatggtcttgatccgtctgcctcagtctcccaaaatgctgggattacaggcgtgagccaccgcgcctagcctaagacacacttttccatatgttaccttctcttccaaactgcccatctccccttacctttccttgtctagattcagctcttctgaaaacttagtttactgagcactatgtacttggcaatttgctagaaactggagatacaatgagatatgacacaactctttctcttaaagggttcactctcaagtcagtgagaaaaataagaaaacagaacattataaatagtaaaaatgggctgggcacagtggctcacgcctgtaatcccagcactttgggaggctgaggcaggcagactgcttgaggtcaggagtttgagaccagcctgtccaacatgatgaaaccctgtctctactaaaaatacaaaaattagctgggtgtggtggcaggcgcctgtaatcccagctactcggaaggctgaggtacgagaatcactcaaaccctggaggcagaggttgcagcgaactaagatgttaccactgcactccagcctgggcaacagaccaagactgtgtcacaaaaaaaaaactaaaaatggtataagtggtaaaaatggagatggaagtatgtacagggtgctgtggaaacacaaagaaaagtcacctaacccaaactaaggaggaggggtagtcagaaaaagtcctaggtgcctgtagacagaaacttgtcctcactctcaccagggtgatgctcccagagcaccctgtagtcatctctgtcacagtcttgattttacggtagtgaatggtctgtttctttactgcttttttctctggatcacaaagggcccaggaaggggatgcgcccatgctacagaaggcttggaaggactggctcaacatgctaagggtttgggagctgatgagaatttttaaagaaaacaagcagcatgatcagattgatagttcagaaatggaaccaattccagcagcaacgtggaggattaagtagactacaggacccagaggttcagaaaaagcataaccaaggtctgaaccagtcttctggcaatgaagagagagaaaaaaaaaagatgttatgaagagaggaaaaaaaaagatctgaggtagcaacaacaataggatctatgctagacttaatgtgaggagaaaagaagatgattttaaggtttctagagtaaagatcttaaaatagtaatgtttgtatatgtgcttaaagggggctatgggtggagagaaagggaaggaaaaggtaaccacatttgaagtaatcaagcatccacatacagctatgcagtaggcagatgaaaattagaacctgaggttcaagagaaacggggactaaatagacgtctttgaaaaccataaatatataggtgctatttgaagccatgaaaggaagtgtaatcacacaaggaaattagagaaaagaacaaaaatgaaaccctaaggaatgccacgttaatctgagaagaataaaaaaagaaaagggaagcatcaagaaaagctttgttttggtctgaatggtggaaacctgaggatgtataccatccaacagaaaaaataataatatgggaagagatcaaagacgttagctttcgaaagtaagacccctcttcttctgagatcagaggaaaggatattagaaatcaggtacagacaggcacagacaaaaatgacctctccttaagagttcagggctgatgcccaccaatttattctgtgaagttaagtggcaaaataagcaatgaagagaaggcaagagtaggacaaagagtcagagaaaaatggtaaagatccataaacagccatttagattttaggacataagaggaatctagaggttaagtcaaaggatctccaggatccagaagtgcagaaacagcacccagcagtttagttatatgatttttgccagtctgccttgggagcccaggagcagaaaaagctgactgattcgtccaggcttgagaccatcagagcaaaggtggcaagaatagtacagggccaatgacaatgcttttatcattttaaaaagtcaaacgtattttactcttttttaaaaatcgactcgctatttcctccaagagcgagtgtttggagagggggagggagaggggtggataattcctctctcactcttagaggacttgtcagaagtttcattcttaagcatatttggtctgtacagcagctgattccaggaaatccaaatcctgattcctcctggatcttaaaagatgaaaattcattgcagctccctggactatccagctaatagataaacacgtaccacattgcttatatactatgccactttagctgggaggtaggggctctttctttcctaaaaagaaagttacccaaacactgcagatggggatggagaggggatggggagtaattacaccgcaaagcctgctgactagcagcctaagaatcctttacaaaggcaattaacataaaacaatacatggcacggatagcagaattgtttcttcttaatgaatgcagtaattgaccatttaatcgctttactggagttcaccaatttctcctgccatctcccataccattcttcaggcagagtcaaatccctgtggacactggacttcttgctaccatcatctggaaagtacaaaacgcctggaaggaggaagaggctaacatgcgtgaccacccaccatgtgccaggcctactgtgtgctagactctgggcaagggactttacatgttatggggtgcagctcatgtaaggacgaatgaagatattacactatggatctgagccaggcgcagtggctcacgcctgtaatcccagcactttggaggccgaggcagaaggatagcttgaggtcaggagttcgaagccagcctgggcaacatagagactccatctctcaaaaaaaaaaaaaaaaaaagcgatgaatccggcattgcagagagtgggaaagtgtctggaggtttaagagtaagagaaggaagaggagattgcgatggtgggtggtcaaagtgaggggagaagaggcgagttgggaaaggaaggtgcttaggagcaaaagggcaagacccagggacacctggagcggggcgggcgactgccatgcagacaggactacgtacaacgggtaggatgatggggcgatgagctcaagaagcgcagccggggtagacgtgggggcaaatgtccgatcccggcgagacgagggtctcatcccaggggactgcggggctaggacgtggtcccagggctgcgagaagggagagaaagggcagaggggagaggccccggcggccggggcgaagccgagcccgggaaatgccggcgatgggggaaggggcgtgggagcaggggccggacgggccagacccggggctccgcgctcgggggcggggttggacaaccgggaggcaccgagcagaaggcgacaaggggccaagggatgccaggacggggcacagggccgggtgtgaggagacgagaggggagcggagccgcagcgagcgccgcgtcccccttacctgggatgagtgaggagccgccgcgccgcctggacggcatcctggcctcagccgctggtcccaccgccttcggtggggggccactcgggagcccgccctcaccgccaagcgccggcagctgccagcctggaccggccccgcagagcagcgccgttccgacccgcaaccgaagccgcctcagcagcgtctcccgcggtcgccaactcagcgacaaccgccagggtccggggaggtggcgggatcacacatctgctacgattggctgagcggacgatgtgtcggctgctctgattcgtgagttccggccggctgcccaccgaaggaggcgcggctgggaatggagctgggtccggcaggcgccgaggggcgggggtctgacgtcgcagccggccagcgcccccacagcccttcccgtgcgcgctcccgagggggcttcccggcagccgcaggcctggccgggtggttgccctagcaacagcgcgcgtggcctggctgcaggggagccgcgggcaggtggcggtcctcaccgcccccacccccaacgtgggtgtcccagaggccttcatcagtgaaaccctaggacaggagaagaaaatgagcttttcctgataattcctctcctctgcttcagagcccacctttgcccgctgctggcagagaagctgtcatctcctcggggagataacgcgcaaatgcaaataacgaactcaaacactatttcatccccacgagagtgtagacgtgcaatagtccctcccaaccacagaggtggggggctgacgccctaaaagaaagaaatgaaaactagggagaaaaaggcaaagaagcaaaagaaaggtggggaaagggcagatatttcacaaaatgatccattcattttacagtttcttcctacagacacatctacaccaggttctgtcaaagcaattatttctactccagtgacatggattagagaaggcatgagtgcagaatctaacagctgtattcaaaattgctctctgctaggccaggtggggtggctcatgcctctaatcacagcactttgggaagccaaagctggtgaatcacctgaggtcaggagttcgagaccagcctggccaacatagtgaaaccccgtccctgctaaaaatacaaaaattagccgggcatggtggcggacgcctgtcgtcccagctactggggaggctgtggcaggagaattgcttgaacccgggaaggtaactaccttcctttgcacacagtataatattttcaaagttcatccatgttgtagcatgtatcggcacttcattccttgttacggccgaataatagtccattatacagacatcaccttttttttttttgaagagtctcactctgtctcccaggctggagtggagttatgtgatcttggctcactgcaacctccacctcctgggctcaagtgattctcatgcctccgcctccaaagtagctagaattacatgcatgtgcca

SEQ ID NO: 11730 - DNA, 6000 bp, Homo sapiens
acaagcaacactgagtttgaattagagaaaaactagaactagaattcagccaacctgaatctggtatctttacttaaacacagcagttgtagttatgtaaaaaagaaaaaagaaatactcatttcccctaactccaaatactaaatatcaaataaggaatttgtcaacataatgaagtgacccaaacaatcagcatcttaaataagacaccaaggaaaagtgaattccctttgtctttcaatctatcttagggaaaacaagataagaacattacaagttgacttccttggcttcctctttttatcacagtgtaattcaaattcctgtacagaatacaggtttcgtatatggtataatttttctttttaaaaatgaacactgattattccttaatgtaaaattattttctatgttacattcttagggtattttaatgatatatatatgtgtgtgtatatatatatatatagagatagatatagatatatatatatctccaactttaaatataaaatagaaacattataacctctaaaagatttatcaacttattctagatgtaggtttgaaagaaaatacaaagaaaaatactaaacaggatcattaaagaagctttaaacacttgataagattaatatactaacatttgtgaggcagataacaaaagaatttccttttctgaaaggaagaaagaggcttgtatattacttgcctaaccatattctcattttgctccactactggaaactggattgcatgcacaactgaaggtatgaagacacccacagtcagctggtcttcctttcgtgatcaaagtacccaacataacacactatataccgtatgtaacagaaaataattcaaggaagaaaataaatgcacaggataagaactattccttcagaataaatgcgatcagggaagtcacataatagatcagtgcaagatctcattcctaaaatcttacgtcctcttgagcaaatttatgaattactgtaagtcttaagtaataaagtgtttttcagttctacatttaagttcagccccaaccatcactcaataatactttctggcttaagttctaaggttttgcttaacagaatgtggatgcttatgaaagtcagctttctgttctcgagtttcatctgtatggtgctgctgttgtggaacgccatgaagtaaacagtaactgaaatcctaactgttaaaaccatacatgaacagatcagaggtaatacacactgtaatttttctttactagatcaatgaagacagtacatccatgttgtcagcgaggagaatctgaaattgtctgaggataggagaacacaaagaaaatctttaaaagaacatgaggtcaaaaatcagagctcgaaaatctactgcttcatagctgtgtgaccacaggcaaattctttttgcctcagttttttcatcctaataatgaagaatatcttatttgctttggagggctataagacatgatgagatataataaacataaggcactgagatacatcatagacacttaattgttgttagctattatattacttatcttagggttttccttcatggtattttgttggaaatgataaaaaaataaaacaaatatgtaagggcttgtaaaacccaagattcagtatacctactgcttctagctttaattctaggctctgccatagttaggatgtttactcatctgtagttcaaaactcacacagctcaagactgacacagctcacaattcagaagtcatgtaggcacctcacagcctcgttccttgcccagtctccaaactcactccttccttgactgtgtttctaatactcaggctagaggacagcaggctctagccttctcattatgtatataatgagaatactgtatttcatttaggccagaggaaagtagacacatataatctgataataatttattcctaggctataggaatctaccatgagcttattcaatggaggacttgaggaaaagcacacccacaaaaatcaatgcattaccttaactttaataagcttctgcggatttcttctcctacaccggttaacttcaatggtgcgtctatttttgggagctgccatccaaaagatactgtccaaaaggctggaattctctttacttccactggtatcatttgctggctctgtaaacatggctgggccctgtactgctaatgctggtcctaggaaataaaacataagagatacagaattagtttctagcttctaaattactatttacagatatcattttccttaacaatcaatggtcaaacatacacacacacaaaaactatatataaaatttagaatgtgaaactcaataatgagaaaccttagctattaaaatacactaaagcttatacaattttaaggaacacagaattttttcttagcggatcctgctgaaaagaagatcagtgaaattccatcaagtttcttatctcataaaatacaggactctgataggcacctaacttgaacaaaacaagcaaagaatcactcaactgtccacattctattaatacttggcgggtagtaagtacctgattaatttacaagtaaatctagacagatttcctgaatacacttctgaccggcactgatgtaactgccaattgccttttcttatattcaaactgagtcaggtcctttatgatacaacctcttaagtcacttagttcctcataacatttaatcttgattcctgtctgctctctaaagaaaagagccagctcaccatttctctgtatggccttatttatgtgactatcaaagtttctctttttctgaattgcttataaaatcaacattcctttaccctttccttgctatttcttagacgtgccatactttttttttttttttttgagactgagtctcactctgtcactcaggctagagtgcagtggcgtgacctcggctcactgcaacctccgcctccctggttcaagtgattctcctgcctcagcctcccaagtagctgggattacaggtgtgcaccaccacgcctggttaattttgtatttttagtagagacagggtttcacaatgttggccaggctggtcttgaactcctgaccttaggtgatggacccaccttggcctcccaaagtgctgagattacaggtgtgagccaccgcgcccagcccacatacttcttttgatcttaagaactcttaaaaatacacaaagttctctaacacttaacaactggcatttattttcagtatgtccacaagtattgccaagcatgccccggtgattaacaacacaggctcaggactgtctgtgaacttgggaccattgtgagcctactgtttcagttggaaagtgtatacacctaatgggactgttgtcaagattatcccaggaagtacatgtagaaagcttggcacattgcttggcatatagtggcatatattttcttggtatatttctggatattatcactttcaggctgcttagaaattgagtagaatgtaaatgccaaagccatgacagtttcaacatccaagatacttccaattaaaattaattccaagtgaaacatgggaaacagaattcagctcctcagagctcaaacaccacagaaaacatgtactgcgcgggagggagggaggaagggaggaaagaagggagggaagggaagggaagaggagaggggggagaggggaagcgggaggggaggtgagggcagggctggaaaggaaagacagatccagagagtggtgagccttgatgccaagtgagacctgcagaactgtcctctcaggacaactctgtacaaatccctgaactccacagacttgaccaaactctagcatagtttctagcagcataaggctgtatcctaggatgacctcggccccccctttaaagtgcctgcctgagaaagctcaacgctgcctggaaaatttcctatttattttggccaacataccccgatagtaggtcccgaactcccttagagcatttcctggaaagggcatataattgtaaatacgtatcccttgcaactaactcggaagcttttctttcaaggccctgagagccattccttcgaaatctaatcattaggaaggatagggcctttgtctcccagtctctgcgggaggatagaattctccctaagacaactgcgagctagcagacacagccggctaatcacatttgcactgacttcactatactacacttctctgactctacagagcccctacactcccgcctcgctcattctccctttaaaacgcccaaagtcacctctgcacaaaccgggatggagctcagctctttacctgcagtagttactgaataaaatctgttttcagcgctttacttactggctggctatgatttatctttgacacaagcttgggttacattctgtgtacgaatggaacaagcagaggaatttttttttttttttttttgcggtggagggagcgcaaaaacagtcgttctgttctcgctaatatgggaatgtcacgaactacgtccccgacatgaggccgcggatcagaaccggggctgagggcgaactgtgtaagctgcgtctgctacgctgcccgaggtcccgtcatcagccccctctcccacggagcccttctttacctaccccacggaggactgggaaagcccggccggctctgcggaagcttccgtagcagtcgctcccagtagtttcgaagcactccccgggccgcagaccacggcgaaaccaccaagaccagcatggccagcgccattttccctgctggaagaccgccccggtcccgcccctgctttcagcatgcgcacaggcacagaatcgggcaagcctcgcttcttagaactacaacaccccgcatgctcttggagcagctctgactctcctccaatcatagagagtaaaggaaaggtgaggggcggggaaatgaaaggaaatcggccacagtgcgcatgtgtgcggctgtgctttggctcttcgggtaaagatggcggagcgcgggtacagcttttcgctgactacattcaggtatggaaggggccctcgaggtcttcagcgtagtcgaggttgctggtactctgtcgatttagtttttcccatcctgacgtcggcattggtgcttctggagggtccagtagggaatggagttggaaatgcggctttgcaaagtcatttgccaggccgacccgggattcctggagcttccttggtcggaggctgctggagggtcggggggatgcggttttgcggggttaacatggggctgcgggacggtgaggcacatagccaaggattcgctttcactttggagaccagaaaagaaggcagttttagcttaaccatctctgggtggcccgttccgaactcaggatttttttcctggctcaagtagacctgatgcggtggtttctgaaacttggaatcttggtcaaatatgtggggttcccttttcttggaaaactctcagctttacagttaagtcggagtcttggtctccatttggcactagtgtctttcaaaacctcccgctttcggtttcttcgatgcacgaattagaaacataaggactaaaaaccgaaagcccctatcacttttttgtgaacccctaacaacgaggcaagtttgagttttggtctttttttggtggactggggggaacgtcggggagggggatgtttactttaaacaagattgtaggtttttctattgtagaaaaggggattagaataataagtttactttccaaaatacagttggggcgaaccatggctctcaacgtgagaaaaccatcgccgaagacttttaaaaattgactggggaagttttctgacttacccattttcttaaggatcagtaatgcccagtttacttaaaatgtactcctgacaactgaaggcaggcgggatctaacttgttgagtactttgttaggtgcaacttaaccttaacctgctccatctctttccactgctataatgaatgttatctc

SEQ ID NO: 11731 - DNA, 6000 bp, Homo sapiens
cttaccaggattggttccacaagtcagggtgaaaaaaaacaggtttacacctagcagcagatagggcagaagaaggtaatgcaaggacaactccagctcctgacagtagccaaatacttcccaggtgtactcagtataaaccatcccttgcaagaccaggtgcaggacaatgaaggtgtggtttctgaaagaaaacaggcatggcttgttcatgggggtttcttcttgaagaaattgtatgatactaaagaaagtaaccaacggccaaccacttcctttgggcttgagataatagtaagaattacatagaaaactatgtgaaacattttgcatgtatttaacagaaattcacaatctgtaaatatcgctttttaaaagtaggcaagttaaaacctccatctcaaaaggcagattaactacgagtagaggctcccaactcaggactcgtgattctttccggccttctttccctcaccatgctggaaaccacaaggagcttcctgaagctagaggatctcaacaattaataatcaaagcagaaaagaggagaatatttaaactctgaaagagaaatacctcgtatggaaaaggtaatgaagcaatccatgcacggctctctgaagacattctggaattatacaggaaaatatctgaaacaaaaggaaagagaaagactcaatttcatttctcacttcctccactcccaaacaaatcagacactccacatacagctggcaatctgggtgatagtaagttttgtttccctatatgggtgaagaagtgatttagcagagaataaagaggggaattctttctactggtctttcctttcacgccaactccatttctagtctgattctgacgaaggcacctgtcagtgtcttcagggaaagagaggtgagcagaggggatgggtcggggaatgtcaatgtgaaggccgctccttccccagcctgggttcaatcccaggttccagcatccacacccagatcactgggcattggcccaggtccctcccaactcaatgccttcccataggctgcttgccccgttttgctcactttgatccctgaaggaggggggccagccaatgctgagctttctgctggcccccagagtcacccattaagtgccccaggcggaccctgctcacatccatgcccaatcacaggcatctaatccagaggaaaacagcaacctcttctctcaaagcaccaccgcaagaggactttcagcaggaacacaaaacccacacagacagaggctgtggaatatcccacaactgccatcaacgaactaaatccatcaatgatgttaagtggcatcttttttgttgttgttgagacagggtctcactctgtagtccaggctggagtgcagtggcgtgatcatagctcatggcaacttcagactcctggctcaagggatcctcctgcctcagcttcctgagtagcgggattacaggtgtgaggcactgcacccggcctggcatctcttttttgtcctgtagcaaaacctgtgagtctcttagactaacacagtattcaaattccagtgccatccaaggatcatccttacctgtgctcctcccctggccaggcctttcaagctatgggttttcgagcagacgcagataagaacaagacccatcagcaccgaagccaggtagaacaagaagaggaccagaaagtccatcctgcagctacaaaggaacagaaagagtgtgactatctgctactgaaaggtttcttccatggcacacattctcagacatcaactcccaaatggctaccaaaacagaattcatctagactttaatgacatctcaaagcaaaaagcagaaagacaaacagaacagaattcaccaattcttaggcacacataacagaggcctgctgcctctcagtggggcctccaaaatggtcctgagctccctcaatcaagataaaaattctgggccaggtgcagtggctcatgcctgtaatcccagcactctgggaagcagaggtgggtggatcgcttgagctcaggagttcgagaccagcctgggcaacatagtgaggccctgtctcaatttaataaaataaaaaataaaaaaagaaagataaactttttttttttgagacagagtttcactcttgttacccaggttgcagtgcggtggcgtgatcttggctcactgcaacctccgcctcccaggttcaagcaattctcctgcctcagcctcctgagtagctgggattataggcacgcaccccatgcctggctaatttttgtatttttagtagagatgaggtttcaccatgttggccaggctggtctcgaactcttgaactcaggtgatccacctgcctcggcctcccaaagtgctgggagtacaggcgtgagccactgcacctgcccaagataaaaactttgaatctaacaccctaagactgtggcctgcctttgaagcatctccaacttgcaaatccaaaataaaccaagaaagaacatgcatcctccttccttgcccccaggcatgaatcattcttttacttccttaaatattcacaaagatacaagatgtgtccccaaagaatctgctgacaatgccttgagaacaagcatctcctagaggcagtcaggagccctgcacccagaatcaggcatcctgtcctaagaagcatccctccaggacactggccacaaccatcaggaattaccctctggaaccagagtcaacacacaggcctgcgttaaaatactggatactgaggccgagcgtggtggctcatgcctgtaatcccaacactttggcatgtcgaggcaggcggatcacgaggtcaggagttcgagaccagtctggccaacatggtgtaatccccatctatactaaaaacacaaaaattaaccgggcgtggtggcacatgcctgtaatcccagcgactcagggggtggaggcaggagaatctcttgaacccaggaagcggaggttgcagtgagccgagatcgcgccactgcactccagcctgggcaacagagcgagactccgtttcaaaaaaaaaaaaagaaaagacactggatactggaactcttttccatagtgtagcggtttaagaaaaaaaaagaagaaaaaaaaggtactggaattggccggccgtagtggctcgtgcctgtactcccagcactttggaaggctgaggtgggaggatcacttgaacccaggagttcaagaccagcctgggcaacaaagcgagacccccatctctacaaaaaatacaaaaattagccaagtgtggttgcgcatgcctgtggaggctgaggcgggaggattgcttgagcacaggagttcaagcctgggcgacagcatgagaccctgtctcaaaaacaaaccaaaaaagataccggaactggtcacttttgaccttagcagataagattctgggctgtaatgccaagtgagataaccaaacaagaagctattcatgacatgataggtgagagtaaacaaacagcagcaattctcacggggtgattcagggtacccagcctacatttctcttggttgggtaattttcagccggcagctctggcattcctcttcccaacattcacagataattcaaacagcagctcctcttgggcagcagtgtgtgcctggcatgaccagtagctgccggacatggttcttccaggagcctggatctggctgcagagacagatcaattcaacacccacataagacgacaagagttgcagtcaaaggcagaatacctgtggaaaaggatttggaagtaggggattttcagcacccccagcatgaatgggtaagactttgggagaaatggcccagactaagttgcttaggcctgctcccaaatctttgggaggcccaggcaggaggatagcttgaggttaagagttcgagaccagcctgggcaacacagtgagatcactgtccctacataaaaatttaaaaatcagtggggcgtggtggcccgcgcctgtggtcccagctacttgggaggctgaggtggaaggatggcttgagcccaggaggtcgaggctgcagtgagctgtgatcgtgccactgccttccagcctgggccatagagctggaccccatctctaaaaacaataaaagaggccgggcgcggtggctcacgcctataatcccagcactttgggaggccgaggcgggtagaacacctgaggtcaggagttcgagaccagcctgaccaacatggtgaaatccgtctctactaaatacaaaaaaaattagctgggcgtgatggcgcatgcctgtaatccaagctactggggaggctgaggcagaattgcttgaatccgggaggcggagggtgcagtaagccgagatcgcgccactgcactacagcctgggaaacaagagcgaaaccccgtctcaaaatacaataataataaagactttgtgagaaacagctagttgggaagaaataagccaagtcggtagccttgggtctctccccgccactccccattagggcctcccgaagccacccccatccaaggcacctcctgggcgggcctggtcggagatttccctgggggctggagccctggtagggggacgtggagtgcagcaggctcggaggggacaccggggccgccccggactcgggcgaggtgggggtgggacggcggccctacacacaaggggaaagggagggtcagaggaggagactgacggtcctgggacagcccaagcttcccacagccccgcggaggcggccttaccgccagccgctgggctccggcgcctcccgggcgcgatacgagacttcctgcgggctcgtgacatcagcacggcgcccctgaggggctgacttccggcggaagtgtgcgagggccgccgcgggttgcggggctggagtaacagtgacctccccggcgccctcgcagccagcctggggacctccgtggccgggtgtaaccgctgggaagtgcgattttattttattttattttattttattttattttattttattttattttattttattttatttattttattttatttattttattttatttattttattttatttattttattttatttattttattttattttattttattttattttattttattttatttattttattttatgtattacctattttcttatttacttatgtattcgttcattcattcagaaacagcctcgctctgtcgcccaagccggagtgcaatggcgctatcctagcacactacaacctccaactcctgggctcaagcaatgcctcctgcctcagcctcccaagtagctgggaccacaggtgcatgccaccacacccgcctaatttttttttttttttttttttttttgtagagacgggtgtctcactatgttgcccaagctgatctcgaactcccgggctcaagtgatcctcccacctcggcctcccagagtgttgagattacaggcgtgagtccctgcactgggctggaagtgggattttagagcagtattgccaggagacttacaggaggaccgacctgggcctggtgggggcgatcattctggggctgtgacagggactaagctgccctgcggcctgcacagagaccagtcatgtccctgctcagagcccagcagggggatccaggtggcccagggcagtcacacttagggggctctcagactatgtctgtgtggtggacagagtttgctttcagccacccacactgttgagatctagcagaacatttccagcatcttccgttgcagaagcgggcagaaagcacaatgtgtacccatcagtcagattccgctccatgtgtgtccttgctcctgatgacaaggacatgttgctctgtacagccctaaatatcctcggggcagtgacaaatacttgaccacaaacgttgaggataaaagggaagggtgtttgatgctaggcaggcttggggtaacaagagctgcttccaaacatagccctgagaaggccctgtggggtgtcc

SEQ ID NO: 11732 - DNA, 6000 bp, Homo sapiens
atggggtttcgccatgttggccaggctggtctcgaactcctgacctcaagtgatctgcccgtcttggcctcccaaagtgctggagttacaggtgtgagccactgcacccggcctccatacctcttttaaaaaccaattttgaaagttcattcaggctgggcatggtggccaaaaattagccaagcatggtggcgggtgcctgtagtcccagctacttggcaggctgaggcaggagaatcgcctgaacccgggaggcggaggtgcagtgagccaagatcgcgtcactgcactccagcctggtgacagagcaagactccgtttcaaataaaaaactaacacactgtacaactgcatgtaaggtggaaaagacaactggaattaaaatgtgctcaggtccttgtagaagataagaaatccagaggaaagtaagcaaagggggaaaaagaaacagaaaagataaaacgaatgtaccaactcaatactaggccataaggctaagtctccataaatgtctttttttttttttttttttgagacagagtatcactctgttacccaggctggagtgccatggcacaatctcagctcactgcaacctccacctcctgggttcaagcaattctcatgcctcagcctcccaagtggctgggattacagacaaatgccaccacatgcagctaatttttgtatttttagtagagatggggtttcgccatgttggccaggctggtctcgaactcctggcctcaagtgatctgcctgcctcagcctccccaagtgctgggatcacagctgtgagccactgcgcccagcccctacataaatttcaaacaccacattccctgactacaacacaataaagttagaaatcaaataacgaaaatataactagcaaaattctgtatgtttgaaaattttaaatattttcccagaaactataaaattacacattaatgtggataaatctcaaacaatgttaactgaaataattaaatcacagaagcctgaataatggattcatttacataattaaagaacacattcatagtggtaacactataatgaaatgacaaagattaacacaaaattcaccctagtgtttacctatgggtaataaggggactgtgaggtagggtagaaagaaggtacacaaaggatctctacagcactattaatgtttcatttcttgagctggggctagagatctgggtgatatctcatttttattttttaaactacatatacgctttgtacactttcagatattagaacttcaataaaattataaaaaaagaaacagagagagggaaaaataattaagtataattgtcaagatggagctaaaaaataacatgggtgaacaaggtgccacccacatctaagcttccttcccatgtcatgcaatgcctctccccatctgctccatcaatcaacaaaggcataatcactcctgtgatacctttaagaaaagaacacgctttaagaaaagaaacgctctctcgaagccgggtgcggtggctcacacctgtaatcccagcactttgggaggccgaggcaggcggatcacctgaggtcaggagttggagaccagcctggccgacatggcgaaaccccatctctactaaaaatacagaaattagctaggcatggtggcacatgcctgtaagcccagctacttgggaggctgaggcataagaatcgcttgaacccaggaggcagaggctgcagtgagctgagactgtgccactgcactccagcctgggcaacagaaagagactctgtctcaaaaaaaaaaaaaaaagaacatgctctcttattcaaggttacccttctatcactccaaggattcaccccataatcttatctttcttgatatgttacactcactaaaatgttcacatcaaatcaagtttgtagacacttgtccttaccaccttacaaaaagtgagatggtatcaacagaggtaagacactgctttacctgcatgtcacttttggcagctttcgcagcattgaaaagatcattggctggtggctctgactgtttccagctatgacgatgtaccacttgggaccctttctttggatgttttgccacctgatacacataaaaagatcagaaatatgaaaaaaaggtaacagtgacattaacacttggtttcatcattatcacacaagtaggcttacgctgccaattccacagcagagtctgagttagactcagtcctaaaataattgatttttatattatgaagtttattaacttttttccctttaaaaaaaaattccttgagtccccttcctgtatctctataaccaaacatccttttcttttcttttctcttcgaaatttctcttcttcctatttccgtcccttaatactttgtaaatcttgtccttttttgaaccatatcacctgaacctcttaggttttctcttttttttgagactgagtctcgctctgtcgcccaggctggcgtgcagtggcgtgatctcggctcactgccagctctgcccccggggttcgtgccattctcctgtctcagcctcccgaatagctgggctgcttccctgacaagattcaaaaacaaaactggctgactcaccggcattgttttcagtggtcgttttgttgctttcttcttcacaccgcgattgaagctgtcctcaaatcattttcttgtcttcttgtctatttgtatgaattactgagttacattctcattgctacttatttaagcaaagtattcttagtttgttaacaacaaagaactacaaattgtgttcattttctgtcctttcctgttcttagactaaattacctgaaatacatcaaaatatatgctgtatgcttacctatatcaaaactatgttgtttaggtgccgggcacggtggctcacacctgtaatcccagcactttgggagttcaaggcgggcggatcgcctgaggtcaggagttcaagaccagcctggtcaacatggcaaaaccccgtctctactaaaaatacaaaaattagccaggtgcagtggacagcgcctgtaatctcagctactcatgaggctgaggcctgagaattccttgaacccaggaggccaaggtggcagtgagccgagatcatgccactgcactccagcctgggtgacagagtgaaactccgtctgaaaaaaacaaacaaacaaaaacaaacaaaaaaccagaccatattgtttagggatacttagctgacaaaataatagagacaagcaggacataattaccataaaaatcgggccctgggatgttggtggggaaggtttaagtggaaagaatggagcggtcacaatgtgtgtcaacctgggaggtggtgaccctggggttcgctttgtaattcctcaaaatgagcatttatgtgctactcacttttcagaggatagaattctgaactaaaatgtttaagcagccatacgcaaaaaaaaagaaaaaatatggatagatttttattttaattaaaacatttaaaaaatagagacaaggcagctgggcgtggtggctcacgcctgtaatcccagcaatttgggaggccgaggcaggcgaatcacgaggtcaggagatcgagaccatcctggctaacacggtgaaaccatgtctctactaaaaatacaaaaaaaagttagccaggcatggtggcgggcgcctgtagtcccatctactggggaggctgaggcaggagaatggcgtgaacccgggaggtggagcttgcagtgagccgagatcaggccactgcattccagcctgggcgacagagcaagactccaactcaaaaaaaaaaaaaaacatagagacaagggtcttgctatgttgctcagggtggtctcaaactctccgggctcaagcaatcctcccgcttcggtctcccaaagcgctgagattccaggcgtgaaccaccgcgctcgaccaggaaagatatatatatatataatatatattttataatatatcatgttatatattacacataatatacaatatgtataatacgcataataaaggtatatttaacatatataaaaatatatatatatataataattttttttttgagacggagtttcactcttgctgcccaggctcgagtgcaatggctcgatctcagctcactgcaagctccgcctccagggttcaaaccattctcctgcctcagcctcccgagtagctgggattacaggcgcccgacacatgcccggctaatttttgcatttttagtagagacgaggtttcaccatgttggccagactggtctcgaactcttgatctcaggtgatccgcccgcctcggcctcccaaagtgccgggattacaggcgtgagccacggcgcccggcctgaataaatcttttaaaacataaaaatctgggtgaccccctggccggccggcacagatgccggggtggggccgcgaatcggttgggacgcactctatccggcctaggggcacctgggccagcaacgggccgccgcgcgtgcgcagtgggcgggggggccccgcgctcctacctgcaagtggccagtgccgagtgctgggccgccgctcctgccgtgcatgttggggagccagtacatgcaggtgggctccacacggagaggggcgccgaccccgtgatagggctttacctggtacatcggggtggcgcgtgccagacaccaacggtcggaaaccgccagacaccaacgctcggaatccacgccaggccacgacggagggcgactacctcccttctgaccctgctgctggcgttcggaaaaaacgcagtccggtgtgctctgattggtccaggctctttgacgtcacggactcgacctttgacagagccactaggcgaaaaggagagacgggaagtattttttccgccccgcccggaaagggtggagcacaacgtcgaaagcagccgttgggagcccaggaggcggggcgcctgtgggagccgtggagggaactttcccagtccccgaggcggatccggtgttgcatccttggagcgagctgagagctcgaggtgagctgggctcgcggtcgcccctctcgcgcgccctctttaagaaccacggcgtccaacctccctggaaatggggggaacatggccgaggcgcgtggcgaggccgcctcgtggaggccccggagcggcatcctcagcgccccagcgatccggtgcccattaggtgcgccttgaagccgaggcaagctccttcggggtgctgggctgcgggcaaagaattcggccctgtgaagagttgggttcggcctgtctcaggccctgcccacatcccatcacagggccgtggacttgaagccggaacgtgaaatccctatagactgaatgcatttccttcctacctgttctctctccccttttatttttatttttatattattttatttttaatttttactttatttttttgtagagacggggatttagctatgttgcccaagctggtctggaactccggagctcaagcagtccgcccgccttggccccccaaagcgctggaattacaggcgtaatgcactgtgcctggcctttaaaaaaaaattgaggttattttggggacagtagagcgtccagacacatcctaatttgcatagctgcgcagttttaaaaaatgcaatgcatttttacctgttagggtatgtgatttctggctagtaagctacaccgaatcttggctagcacagttgaattccatgtcagatttgtaaacgcaaatttgctctctgcatttaaatatattagatatatttaggtaactacatttaaatgtattgagacatttaaataaatttgccgtctgtatctaaatatctgaagtggaccaggtgcggtggctcacacctataatcccatcactttgggaggccaaggcaagtggatcatgaggtcaggagttcacgaccagcctggccaacatggtgaaatcccatttctactaaaaatacaaaaattagctgggcgtggtggcagg

SEQ ID NO: 11733 - DNA, 6000 bp, Homo sapiens
actcaggaggtggaggttgcagtgagccaagattgcaccactgcactccagcctgggcgacagagtgagactccatctcaaaaataaataaatgaataagataaaataaaaatacaaaaattagccgggtgtagtggtgggtgtctgtaatcccagctactcagaagttgaggcagaactgcttgaacccgggaggcagaggttgcagtgagccaagatcatgccactgcactccagcctgggcgacagagcaagactgtctcaaaaaataaaataaataaaaattttaaaaatacataaatatatatataaataggtacatatatggtataggacataagaaataacaaaaggagaagaatttagttctgtaggtcagataatttaataaatatttcaaataaatatataataaaaactgaaataaaatgtcaagaatggggaactaatggtattaagttttatatagaagggcatgagggaagtgtattaaaatttgttcaaatttatgactgagagggctaagaaggtacttaatttcctcagatgatactttgcgaacatgtggtctatttggttgacctttgcaaatagttgaacaaccacaccgtgtattcccataccccctagactgcctgtccaggccaagccttagtaccacgagtccacagtgaagtccactccaggttatctgcataggtagcccaggcacctttcctcttttcctttaggtgcctcccctctacccacaacctcttatttcatctcaaacacagctattacaacatgttttatttcactggaaaattctgtaaagaactaaatctggttcccttgaagaaaacatttagcacagcttaaataaaagttgagaaggagggtaagagtgcattgccccattctagctctgttgctaccttacctctgactctaaggccctgtgggatgaaaagcaggtatccaaaagaactctgcttggccctctgatacggccttgaggtcagccctggtgcctgctttctggcccacagaccgctgaaatcctaggagctgccatgggagttaccaaaaatatgtgaataaactgaatgcagaggctgaggcaggtggatcaactgaggtcaggagtctaagaccagcctggccaacatggtaaaaccccatctctactaaaaatacaaaaattagctgagcgtggtggcgggcacctgtaatcccagctactcaggagactgaggcaggagaatcatttgaacccgggaggcagatgttgccagtgagctgagatcacgccattgcactccagcctgggcgacaagagcaaaactcaaaaaaaaaaaaaaaaaaaaaaaaggaaaaacaaaacccagaatgcagaaactgcattggtattttgagctagttacaggcagtaacacttctactaggaaggaaaatatataatttatccaaaaatagttctaagatttagaaaaacatctcaatcctctagggccaagacctgccccttatttacattcacaaagccattaagtgaacccagaactgaccagcagacagtgaggcagggcctgctctgtggcacatgccagtcacctactgcgtaagtggacaaagagaaagcagaaggtaatggagagagttttcatttgcttatttagtgaaaaacagaggaaaatcactcgaggcaaaagaagcaggactgagtcctgggttagttctgattcctcacaagccctaagacaagattttgaaagattggactaatgtcatgtgtccttaagaaccagggtcagcaagtggctgatctgaatggtttgtggccatggaaccaatgtgacttattctttttcatttttttccctaaaaatccaggtggataaaggactgtgtggggaaagtaccaaataaatgaggtaaaaaggaagggtcatacaaagagggcactacaccagcttcttggcctcaaagaagctcttgaggtgacgcatctgccagatgccagtgaggatgaggatgacagtctgagcaatggaccaccataggaccctctggttggtgctctcgctcgtcagtcggaagcgctcttcacgatactgtgtggggcaacacagggttaagtgagcaggagaaacagtctggctgttgtgaggtccctccctgcgtgtaattactcaactccaggaccaaactccttttggaatactatctgtgactccattaggagtgctatggtctccccactgaggctgccccaagaaagggacaggctgtccctccacaagcatctctgttaggactgaaatcatgatcctaccatttccaacaagagtccaagaaaaacaggtaggcaatggctattactagattgtgaactgtcctttcttcattttattttatagagcttaaaaatgactactgaaagcgaaatgtggcacatgcatacaatggaatattagccttaagaaattctgacacatgctataacatggatgaactgtgagaacattatactcagtgaaataagccagtcacaaaaggacaaatactgaatgattccacttatatgagatagggtagtcaggatcatagagacagaaagtagaatggtgggtgtcaggacaaaaggaaacgggaagttattgtttataataagtacagatttgctgggtgcagtggctcacgcctgtaatcccaacactttgggaggctgcggcagtggattgcctgaggccaggagttcaagaccagcctggccaacatggtgaaacccagtctctactaaaaacacaaaaatgagccacgcatggtggcacttgcctgtaatcccagctacttgggaggctgaggcaggagaatcgcttgaacctgggaggcggagggtgcagtgagccgagatggcgccactgcgctccagcctgggcaacagagcgagactccatctcaaaaacaaaacaaaataagtacagatttttagtttgagaagatgaaaaagttctggagctggatgatggtgttggtagcacaacattatgaaggcacttaataccactgaactatatagacagttaaaatgacacatttggtgttatattttaccacaataaaatgttttgataaaaaagcaaaacaggcagggcgcggtagctcacacctgtaatcccagcactttgggaggctgaggcgggcggatcacttgatgtcgggagttcgagaccagcctgaccaacgtggagaaacccccgtctctactaaaagtacaaaattagccaggcatggtggcgcatgcctgtaatcccagctactcaggaggctgaggcaggagaatcgcttgaacctggggaggcggaggttgcagtgagccaagatcatggcattgcactccagcatgggcaacaagagtgaaactccgtctcaaaaacaacaaacaaacaacctatctaaaccaatacttctcattccattctctgcagagctgatctcccaagcagaaacttgagtaggtatagtgggtataaaggtcaactgccctctcaaattacaaggagatatgcacttgccctttggtaatcctgctccttctgaatctgttccacctgatcaagcaactggcgggcgcggagctgtagctccgtcagcttatcttttgcagcaatctcagggtagttgttggcatgctccccaacctggatgtcgagatgcacccgctacaaggaaacatggaatgtatgagtggtggggcctccagttgtctgttccagggtatggaacccactattgtccctggctgtggagcagaaggcaacatctgtctccccaattctgactgtgctacaaagtttcacaatcttgataaatcaaaatttggaaacaagtgagagattctaagctgaagccaaagagaaaatcctcttaccagtttgccaccagcgaagagagccatcctggtagaattggagtgcagacagatttgatggtcaccgggcgtgtgggaggtgaacgtgaagcggccctccgagccgtactgccgggacagcaccacctgcaacatatgtgagtgaaggccccacctttataccgcaggctctccaagtgcaagttcctgtcccttgaggcctcctccaggcagtgctttacaccccacgggagctccactgaagaacggctgcgtgggccaacgccagccttaccttgccgtcggggtccttcacttccacgtgcatgcccaggccaggggtcgagggcaggaagacctccttctgcttatcccacatctgggtacgatagttgcctgcggggcagacacatagtcacgaccggccctagtgggccgcctctccgcccggccccctccgacgtgcggcccggagctctaggcagggggcctggcgtcctcggggcaccctcaggctaggtactgggggagccagcgacccggctgggctcgggaggagggagcgccgccgagggctgagctgggtacaaagggcctccccaccctcagcccgcctgaccgatgaccatggtctcgtcggggatttcctcgatgaaacagcgcttctcggtctcgccgatgtggaagtagagcccctgggcgcctgtggcgcacagcgcgagaagcagcagggcctgccgccccatcgcccgcagaggcccagccccgacacctgccatcgcgcctcagcccctaagcgcctgcgcacatttgcgcatcgctctgcgcctgcgcgccaccctagcgaccctgagagttaggggaagaggacgcctgcgcagtgatatgtactcgccgtctcctgcaactccatccgtaccgaacactgccgcgccccgccccctcacacagcccggcgcccgcctacccccgcaacgagagtagagggcgcatgcgcaatgacgttcgcccttaatttctcgccccttaccccgcagcttacctccggcatctcgcaggggaggcacgcctgcgcagtcacgcccgccctcggccccagtcagcgatttgggtctcggagcaccaaggagacggtggacggaatctgaccaggcttggtggctacgatggcctgaagcgtgccttttgggttctcagctcgggctcacaagtgttttctgtgctaaatacaaaaagccctgtgatgttttgctttgcgtgtccacctatctgactcgtaagaaccgaggctgaatccagacccacactctgtcacgtcgggagagcctgccgcggcgagcctctgcgagcgggcatttcttgggtggggaccaaaagcccagtgctgccatagtttcggatcattcttttaagaagctggggccgggcgcggtggctggcacctgtaatcccagcactctgggaggctgaggcgggcggatcccttgagcccaggagttcgggaccagcctgggcaacatggtgaaacccccgtctctacaaaaaattaaccggtgtggtggtgtgcgcatgtagtcccagctacttgggaggctgaggcaggagaatcgcttgaacccaggaggtcgaggatgcattaagcagtgatcgcgctccagcctgggcgaccgagggtgataccttgtcttaaaaaaaaggtgggagagtggaacgaaaacttggaataagtagggtcatggagcttgtttacatcccctagttacagcacatccttttgaaagtgaaaaacaaactggaatgttacttagtgggcatggaatcgaagcaacggaaggttaaaactgtttttatcaaggccaggcgggcgcggtggctcacgcctgtaatgctaacactttgggcggccaaggctggtggatcatctgaggttagaaattcgagaccagttgggccaacaaggtgaaacccccgtctctactaaaaatacattttatcaacagaatttcgaaacttttatataatagaataattacaatgaactttcataaagaacttgagcatacctggattttggtatccgtaggggtccaggaattatccccctt

SEQ ID NO: 11734 - DNA, 6000 bp, Homo sapiens
gaggcacaagcttgtggaaatgttcactgagcacctacccggcagggggtgtggtgtggagaggagtagctctgcactgagcgcctttccctttgtgcagacgctggttaagcttcagcctctcctaagtgagcatgagcccagctctgacgtgcgtgtgcccacagcacctggcacaggcaagacacacgagtgcccagaaaacctggatgagcgccccctggatggatttgggaaggtgattccagggtgtcaaggaacacaacaagatatcaggaggtgatgaggtggatgagaaggtggagggctggtgccagtctgtggaagctggagggttgttccaccagacaggggtggggcaatgaagagttctaagcaatggagtggagtgatcagcttctcatttagaaaatatcccttcaaaggctggggagcagagatgaagggggaaagtgcaggcagaaatgtaccctgaggccctttcccggatctagggtagaggtgatgggggactaagctgagcaggaaggcggttgggatggaaagtgggggacagaatccagagacacggaaaaatgagagaggtgtgtctccttggcccacccccaccacaggtggcaggaaggaaatttcaggaggaggcagtagagaaaggaagaaacagaaggcaggacctggttcactacacaagtccacaggccttagatcagcagctgggaagttcagaggtgcctaggaaggatatatatatgtttgtctcagccaaccctctgcagtgcccatcgatcaggagggagaaagatgagggcagctaaggcaatgcatggagtctgcggagagctgggatgagagtgtccagccatcctccaaggccaactcaaacccccaccaccacctccaggaagcccactcaggcagcacccgccctttatgaccttgccctccactgagaagccctagccctgagataaggagcccctctccttggagctgtttcaggtctcatcatgttcattgtgagtttcgagtcttgtctagaaacaaggggcatgcccaggtttccgtgtggcttccccacccatgaggatgggcacagacttggacacaaagggtgaatggtgaagggggctcaggaactgtttggcaagctcaagtgacagcagtcagtttttcagtcctgaatgttgtctccaggtgtctttagagtgggggaatcaatcacagggacaaagcagaggccaatctgggggagggtgctgaggccaggcagggaccctctcctaggcctgacccattaaacagatgggcactctgagctccacgtagaatggagcgaagcatcctaggtaccatcaggcatctgcagctatcagagctaagcccctccctttgtcaacctctctgaccatttatttatctttcctaaccttacatcgcaggagctggcaaccccttccagccagtcagatccagcctgtagcctatttttgtacggccagtgagccaggaatgctttttacatttctaaatggttggaaagaattaaaagaatcatatttcacgacacaggcaaaatgtatgaaattcaaatttcagtgtccataaataaaatgtatcagaacagagccatgctcacttgtttacatatcatctaaggctgcagtaggctacacagtggaattaagtagttgtatatggacacaagcgtaaaataattgctatctggcactttacagaaaaaggttgcctacccttgttctaggcttatgcaacacgcgcgtgcacacacacacacacacacacacacacacactttcctccattcaattcaatactcagctggacttttattaatgaagacctttgtgatctttgggcaaatatctctgagtccccgggtgtgcccagatctgtgtgagagggtgtgtctcaacgtccatttgtctttctggtgttgcttgtcactattgtgccccagctctctggcaggtgtcatagaaagcctatatgccgtcccagctgtgtgtcattccctctctgtgtgtcactgtgggggtggctgtcaccatttgcctctgacggcatccagagctcggtacaaacacgtcgcagctgaggagtttccagtctccatcttgccaggcggctggaccactaagcccaactcattcagaccctggaatcagattcctctcctcagggaaggctgagggtctctgaggcctctaggccttccagggtggaaagccacttggcagctcctgtctggggcatcatccctctgctcacaaacctgcccaggacaggaaactcattgtcacctccagtgtcagccccatggtgggtgggtctcaggcaagcaaggccttcctggcaccgagctaagctccggctctgcacttggcacaccttggttctgccctgtggcagacagcacaagatgtcctccacttaatcagtgccagccccaggtcaatgaaatgcttgtccctgggagggcggcaacctgggacactccagcttaagccctgtccccaagagaaaagccaccctgtggccttagctttcctagcctctcagccacatatactataaactcccatgtgtgtatttatttattcgacacaaattgagggagtgtcccaaagttgacgcacaacagagagaggtggccatgtgaaaagccatgggtcccaaagtgtttctccaatcaatcccctgccagcctgaaccttatacaaaacaggacttaatgcaccccttagcttagatcagtcccgagagtgcaggagagggatcctttcagaggctccccacagacacctcccctcaccacacatggggacaaacagacttttgggggtcttgtcccagacacccaaccacccatgaaccacccatggccaaagaggaaaagtatcaggcccgcctccatcgtcaccccacacacacttgttgatggatcagttggaagagctggcccagggcctgctcagcgtgttccacctccaatctgtatgttcagatttcggcttgtgtccaagctggtgcctctgcctgccctccccaaggtcagtgaggagcagaacttagcttaggactggggactccaccagtgctacttgtacccagcaccaaactcatttaattgggggtctcctgagaaaacctgggtgctgcctgctgcccctgcccccaaaggctcaaacatagttttccatctgcttgggaatcctaccgccactcaaagcttctagcttgaccttcaggatgcttgtctgcctctggccagctgcagtcccagggcaagttgccctccacatgctgcgtccagccccttcccatcccccaactcctccccagggccgctcatgggaagagccaaatgctgtgtcttggagagggccaggggggctttgcgggacattgtaaggctggggaagataaagggagtctgacgcacctgcactcaaaaacataaaaatggtcggaagaattagcaggtgtccaccaccccacccccatcttccaaaaaggggctgagctccatccaggggtgaggctcccctcctcagctccacgtgaaatgcaatcggcttccggctgggttccctcctgagggtctagttgcatccatcggctcccctgtcccttctgagccccctaacctgccaaggtcccgccgaggatgtggcctccgccccccgcagccgccgcaggagcttctgcctctaaagcggcaggcaggggtctcagcgggcccacttcaacctgggaaggccggtgcgtttccccacagaccccgcagggcgtttcttctggggaccactgaagccctggcatccccaaccccagcccctccgcgccacgggaaacgaagacgacactcttttgaacaatcccggatgtgtcaccacagaggggcattctacactggcccctaccccaacccccacctagcacattgcttgcccacccctcaaaccccgtgcggattgcggtacctagccccgggggaccctccagccctgccttcccgatccgcgtaggtgcgtccgtccacctaagggtagggaggcatgtccctccgggtccctccggccgcatggcttgcctgcccccctggtctcccttctccgcatcaggaggggcgtgagatagctaggtcgacccccaccccggcagtctgcggcgatcggccgccccgagcgcagcgccagacacttgggttggggggtgtcagcctgacgcgcaggaagggcgcagcggcgggagggggcttcatttcagatctgggaggcttgcctggcgccggccctcgcccgctctccgtcggtggaggtcgcggctggcggagaccgccaagccagaggaggggatccgaggtcccggctgggcgaaggttctggagggggagaagacggccgaggcgtggaggggcagccgcggcggggcgacccttacctgctcactgcggggcctgtccgtggggccggggcagactccgcaaaggacgcgcagcctgcaagtccgcggcccgcgcggcgcggggatggggagcgtgtgcgccgaggagcgcgcgccgagccgggtctccgcgcctgtgtggccggctggcggccggggtccgtgtgtccctgcgcggcggcgtgtgcgtgtgcgcacgcggggaccacgctcgcccggagccgccgccgccgccgtcactccctgcccggggccgagcgcagcgccccctttgcccgccccgcgcggcgcggcagtccagcttggctccgtcctgcgggagaggcgccgcctccgccgcgaagccaggctgggcgctggagggaggcgaccgaccaccgcctccccctgctcacttcacaggctggggagggggtgctgcaggccaatgagcgcccgggggcggggttagatcgagggcggtgcggtggggggcgcggtggggggcgccgggctgctcaacccgaccccacccgcagcacagactggagcaggagctgcggcgggaaatcccagcggcgggggtcgggggcgctgaggtggagccctcagccccctgtcatccccgtctcctctgactctgggcctcctgggctcaccaccctctttccagtctctccatcatagccaggactagaaagccttctttcttctccctaggtcctcaagatttcctgtgtatcagagcctgtcttccctctcctccaagaagccttccttaccaggcaagtctcagaccctccttgggctcttctttgcccctaccgcccaggcctgggagggtcagctagttttggggtgcctgtcgggatgtcctccaatgtgacccccccgcccccggagaaagaccaggaaggggatggtggtgcttacaggacagaggcaacttaaaatatcagactgcctggctccagtccctgctgtgccacagctctgtgagcttgggtaagtggctcagcctctctgagcttcagcttcttcatctgcacaagggaacaatagtaccggcccccaggtctcttcacagcagcattaaataaaaatggtacactcaccccatagtagtttctccctggtatcattgattcgccgatgctgaataaattactattgctactgttattacagtcctgtccaacctcctcctagtgcaaatggcttaataaggagaactacacaggtaaaggtggcctagcgggttggcagcgaagcccaaacttaactgagagtagttagttacccactcccaggcaagttctcaccctctgcccaccccacccagcccccatcccacagctgctcctgcctgcctctgctctcggtttttggtccctgcctcaggcgtcagtctctgagagctctcagttctgcagccaggctctgttcttgcccattcaagtaaattctcgctcagcttccctttgggtccaagttctaggtatggccaccttgtccaggaggcctcaagaagggggaaggaggagggagagcctt

SEQ ID NO: 11735 - DNA, 6000 bp, Homo sapiens
tgaaaatatctaagcttagtggatgttttaatgaaagttaagtaagctttccaaagccaatatttgaaaacacacacttactgatagacaccattatacacgagaaactgcgtgatcagcgtagctagaaaagctatggtgatccccagcccaaggccacttctggaacgatcaaatgtccaccaaaggcccaaagatagggctgctaaagtcaaggacagctggacattattggcaaaatccaatttctggtgatataaaagttaaggaaaagtttgctgactcttattaagataaaaaaacgtaaaaccacaagggttaaaaacatgggtattttattattgtaccacagataattcactgtccataaaaactgtgtaatgagctaaagaaaggatttgttggatacaggttacagtaatcattaagatcacctgaaatctccctgccatcactgagtcaaaaacttaaccataagaataaacttgctgaaagctatatataaagtgcttatatatatttatataaatatatatttattatgtatattatatatatatttaaaaatatatataatatatataaaaatataaataaatatatatttattttgaccataaaacaatatattttactgtgaagtcatcgatagccccattcttctttctctttttagtaatctgaaatgggtaggtaccaccatcatgtctgtattatgacatggagtcatttgagtatataacaaaacaaaacgcttcaatatataacctaagaagatactctggacgtagcacagaaaattaaggatacagcactggcgtggttaatgccaacaaaaactgctatgcagcgcatgacactggcccattctctcttaaatttgtggggttctccgaggtgactgtcgatacaggggtacagtaggccaacaacagctgttttaaaaaagttgacaatgttagaatacagcagattcaagttccagaatttcaacgtggtcattagtaacacagtacattactcaaaccagtccttttcctagaaaaaattatcagctataacttcagagtgattttatattcttgttctctttgagtaccactcccacaaaattgtactgtttagaaaagttttttaaaaatcactattatttagtgtagttgaacatatctcagtaaacacaggaaggaatcaagcagggattattcatattaatatgagcaatatgtaaccttatatttaatatccacatttgcctaaagcacacagaacttaaatgactatgtagttcaccttgtcttttcatccggtgtgatttctatcttacaataaaaaggttagcatctgtccacaccctgtcacatcacagctctgacactcctgccaccacccagtactggggctgggcacgtgatgagatacatatttgctgatgtgactttgacagtctgggtcacatgctcctagagtggccctggagttgattttcgggagttctagcatgttctgtacgaggcactgagcacctactgtgcacacatgcacatgggcaagtacggggcgagacagccccacataggcttcgcttattctccatctggttcccgcatggtcaagcctcaagctgcggaaagaacaccagaccaagaagagaaaactcagcctcaaatcccagcttgccctctgatgggacgtggctctgcatgtttgttttctcatgtgtaaaattataaggattatgtaactgggacacagagaaagagatcactgtggtctggaatagttattctttatagacatgaacttggaatttggacaggtgggaaggaatggcattccaaaagagaagtaaaatggcaaagatgaaggcaggaatgaatgtctgtaggggggagtggggtgccggcccgtggggttggatgctgggacacaagggtcactgtgtcccagggctcttgagaaccctgcaattgtttcacctcagtctagtatgaaagaaatataccttttaggttcaactgagaaacaagaaacacagtttgcatcaaacattcagataaaaaatgttgttttcaatttattatacttcatcaggttctaattttggagttctgaaaaatggaccccccaaattaactttacttcactatagcttaataaataaataggtaaaaaacatactatgaaaaattttacttatgctcttggctgatggtttaaaaaaaagtagaatatgagagtatgagaaattgtccagatattcctagaaacccttgaggatccaattacaaatactgaaggctaaactatttcatttctaagatcaagtttttggttaaaggaaagaaactattctgccaaatgtatatgaaacatggaattttaaatctagatatagttctcaaaaaatgttcaattagtacagccacataaagtgtttcgaaaaacgaaagaggatcccgtccctccgagaacaaatatgaaaacattctacccactacttaataattacagacacctgtcctagttcttcaacacggagccctctgttaatctgctacaaacctctctgctgcttgctgttttcagtgagtcaactgaggcaatgtgtttccacagtgcaggagacacacctaccaaggcagcaggagcagttaccaacgatggcttggcccctttctacctgcgcacccttggatgtgacttcacctgtgattcagttgccacatctataaatgaagctacacatggtattgctgtaaggaatgaacacagcaaagcatctgaagcctatggtcagcagtaagctgacaaacgtcagccacaaagcaaacaggatgctccctgcactgcactggagtcactgacatactggtttgttttccccaccagactctaagctgcttaaggataggggcttgtggtgctcacttttggattaacatttcaacagcttatagagttgaggttgcagaaagcacccgacaagctcgttaaataaacaaatgctgtgtgactacaggagcagtaagtgatctgctgagccaagatcaactcaacatttctataaaagcggttcaatgatagccaagaaagtctagtacacacacccagcagtccccgtgtccacagttcagactgactcagtgttacgttgtacagcatctatgctactgcttgggtgtacgaaaatctaaacgccgtaagggggttactcttttccttaagaacgtaatctacagagctctaacagttcagggtgtaggcggtttggcttcagaccacagtttactcagcgacccggcaaaaggaagtgctgagaagttgctcccctggcaaccgcctcctgaacccatgtgacgggtttgttttcagttatccagcagggtagcatgtttgctgccgcgaccaatggcctttcagtcccgctgctcaccagttccccaggcggccaatccggggcggctggcgcgggatgacagctggggctgtacccggacgccaggagggaagggccctcagtcagcttggcacagcacctgcttgaacagccaattatctccctgcctcatctccatcactgtgcttcctcaaacttcagagagctgtggcccgaacccgccctcgggggtgccaggtcctctctacccctccttcatttctctaaatcccaagactggagatgcacactttcaatctgtggatagttccagtttcaaatgcatgtttcttataggctgaaaagtactttcaaccgaaaagacaccctttttacttccagaagaaccaggaggggtactcaccagctgctgtcccgcagcagggagggacccaccaggcggaggaaaagatggtggcgatcacctcctcggggaagagagtgacattcctctggatctgcagcaggttgagcaccagggctaggaccaccccaaccgagaagagcacgaggctcctctgcaacaggcgatgatgccaggtgttggggtaggggctgccgggctcggggccgctcatcgcagcactgcggcccctgggcgcggggtcagcgtccggggcaccgtgggccgccagcagggagggcccggacacggaaacgttgatcatctccccaaccttggccgccagccccgcggcgctggctcgcggggggcctcggcgcctcgcgctgtgcgcacaggagcagctccagaagtggtcgtgcaatctgggcatcggtcacacgcgtccaagaggcgcttcctggaagaagggggtcatcaagttcactcagaagagacaaagagcgaggaaggccccgcgggacgcgaaccccggcacccgggccaggcggcagcgccgccccccaaggttagacccccgtgcgcccgcccggggccagcggcggacgggacccgcgctcacagcgagcagcatccccggccccagcgggacccgcgtcccaaagacccaacagggcccgcgcccgcctacctccggggaggaccggctgctgcgcgaccaaagcccgcccgcgacccctatcccagccggccgcgtacctggccgagaggcgcccgcccgccggctctccgaacggaggcggggcgggggaaaggaggagtcacggcccgggacggccgcagcgcctggcgggcgcgcgggtttatatggcgggccgcggggcccgcatcacgtgagcctgcccggcctacccaccgcccgcgcgcaccgcccaggggcgtggcctgagcttgccccgccccgcccgcgagcccgtccgcacgcggtctggtgaggcggccgcaaccaatgggaggccggcggcccatatgacgtgcgcacacgccaccgccggcccgcgcgcactcgggcgggagcctcggcacggactgcggggcgcgtggcggctgcggggcacgcgggcccgagcgggactggccggctgcgagtgggcggccgcggagctggggcctgggaggggacggtcctgccgggaggaggcggaggcaggacagggtggggttgcgggcccggcgccgcccctcccggctcctggctcccctcgcctggtgtcccgcgcctggccgggaggcggcgggtctcgatcgcgcgggcctccctggaggggcgcgggctctggcggcggggaggcccctgctcagcgcaatggcgggcttgcatccttgggtgattttttcgggccccttgtggcctttgctcacgcctagagagcaaaccacccgcaccacccaggagcagataaaatcgagaccacagcctccaagggagcgcgcctccatcctgtttgcccctcgggtcgccgtctgagggcgggcccgtgcccgctcagagcctacatccgagtcgtataaagcgctgacagcagagaaagctgcggctttgctccgtgcagatgagcaggggctgagggaggacgctgtgctctcagtagccgcgcttggcccggggaccctgcaggcttagaaacgtgagtcacgcctgcagcgtggcgaggaaacgccgttgatgtggcatcctcagcctggggttgtggctttaagccagaaggtcaaaaaaagaagtcttcctgagctgagactgccctgagtcgctttaggggcgaaattccgagcatccggttgcatttcctgaggatgacacgcgtggtgggtgtggacggcctacaggggtccatcctcagcggcccctctgcagggcagtctcgctctcactctcccagctgactcctctcaagcctgttaaccattgtacacgttcccaaggactccaagcaggttggacttcagggaacattgcagtttgggtcttggccattgtttacactccaccttgcataagtgcttgaggatcacacaaccagatacgtagatcatccgtagatcatcgcagtcacatcgaagatttgtttataataggaaaaaaaaaagctacccactgtcatgcgctgggaaactagtgagctgaaggatgacccatctgtaaatggggtgctcccta

SEQ ID NO: 11736 - DNA, 6000 bp, Homo sapiens
atcactatacctgaaatcccaaatgcaagaaattgtttttcaaatagaaaaagtgtagctgacttcagcaacaagaattgcaatatactatataagtaaccaacggaaggaaattattgacaaatcaataattcaatttggcacttgacaaatggcagcatcaatgaattagcagtaagatgcttagcctgtgagttggtggtgtgctgaattgatgaatttgtttttttgaccttggatcttggatcacagtttccttaatgaacttcaacatggtttttggtgcaaacatttgtcaatgccattgcaagaacaaaataacttgagtcttatctactttagtgagattaaagtgaggaaaggcactgtttttggccagtccctagtttaatttttgtcagtactaactgggatataaaggtgtgtttcccgaggatataagagacagacttgcattctgagaaataaatttgtgaaacccacatgtaactgatgagaataacaatctagaggtgagaaacacgacactttcaggaaacattgagtggagagtttgaggagcctccagaaggccactgcgggtgctttgatgaaatctctgggaggcacagcagaagaatgtgattcattcagtgagcccaagtgtagtcggttgtatggcgtgcctgtctggaggaagactgtaggaaaaagaaggcaggtgaccaatatggagtgtagtcatcaggccagaggggcagcatttggcaatgcatccttaatgacattcagggtaaggaaaaaggggaaccagctgcaccaggatcctagccatctggtgattctatgtctacagtctggatagatggtttgggtaaatagccctagctagtaaaatctctaattagcccctcttgctctgatttcatattcatcaatcaactgttaggtaacaatttatcttcttgagcagttatttctacaaagaagaaatgtgttgagtactaaacttcttgactccttttgcagtcacattttcaagtttaaataaatgaacatttaggtatcctggcttatgcattttcctcttttgcttttgggttgtatgatgcagttcctgaacaaaattcccaaagctgaatctaaaatgtgaggaccagactctgggtcaaggaaacctcattgaagcaagaactggggaaagagacagattcctttctaacagcaacagatgagatatctattttcttataagcattattgataggtgatcaagttaccttgacacaaaaataatctaaataacaaattaaaaattcctcacttgtgaccaggacttattaaattttaggttgatagtaaaaatttctcagtaggtgccgtcatatgcacctgtagttccagctacttgggaggctgaaagcaggaggatagcttgagcccaggagttccaggacagcctggataacatggcaagccctcatctcataaaataacataaaataaaaaatttctgtgtttatcaaactttctaaatttattttttaagctcataaggcatagaaaaatatttgactgtgaaagatgtattcaaacccacccacttataaaataataatttcctttctcaatttttcatttccctcaaaaggaagacataaaggaaaaaagaaacacagtaaaagccatgattttttgaagccaactgaaagacaggtgtaaaagaaggaaaataaggtacctcatagtctgagtattctttcagaacagtagtcctgtttgattcagccttgatttcttttaaagaaatggagagggcatgttcatttttatatccctttaattgtgtatgttaatacacattttcaaatgacatataaatataagcaaatgaattaataactaagtattgatgtccttatattagatctggtttcttttacggtatagtcaagtataattatgccaaattcagccccttcttcccaaagggaataaaatgctacaattcaggagaatttcatccctaatgatctgaattaaaatgaaattttaaaaatgtgtcaagaacaacgggaagattcataaagtgtttaaacacttgaattttgaatcacttctcttttatctattttttttcttattttatttgatacctatgtgacatacttattgttaattaaagacaatcaagaggaaaccaaacagagtaaatttctagggggttggaaggagtggactgggggattttgctctaccttgacacacgttgtaattccaaatgtacctttcaggcatagagatgtacattaatttatatgtgtacaatttcagaatttaaaaaatgacagattatctggctaatacatggtaaggaaactagaattttaaagtaaatatctaagaaggcatttgttgctgtatatataagcaaaacagcgtaactttatggaacctgcattttaaaaagcaaatctcaaaatttaatgatctgtcaggttcttttttaaaatcttgggcatgggtaaagcagaatcgctgaagtgattacctgtagttaatctgtagctcagctgagctgcagggctgtttacttgtaagtaacaagtgagaaatgaaaagtaagttatctcattgcttacatagttatgagccaagactttgcaaagttgtcttatggagtcagagttgataacgtaagtacgttttctggatataagaactatcgtggaccatgaagaactgagtgtcagtttcatgtaacgaccgtctattcaataatctgctagaggttgataacaattgatcctactcttgagtgcttcctgtgaactgggcactggaggaacacagtgtagcaagttgatggttctgagcttgtgaagatttcattgtgaagatgtgcctcgggaggaaaagcagaaataaataaaaaggtacacattaaacaaaaatcctataaaaagaaaatttaaagtattattaattattacatcgttttctcactttgctcactcggtataaatcaaggaccctctcatacctgggaatgagttttgtattccagcctagaagtagagccagtcccagtttgaactttttgcctttctgtactcccagttcttacccttttgctgagcctaggacacatgcaaggcctgcccttcttaatccagatttttgagtcttaatcccaatttttcctatagtttcccatacactccatggcagcttagagtaggctgaaaactgctgaactgtttaagacttaatccttcagagtaacatggcagaagtagcacacttttttaacataaagctgttcaggactctattacagaagaggctatacttccttaattacattctattctacagccacctcaaaataactagtgaacacgttcaaccaggatcattggcaacagccaatgggcacagtgatctggaaatggtctagccaagctgtttgggctgtagaccatggcattcctaagagctaaataggcaaggagtccattaatatttcacttgacttatgtcaccatggaaacccctggagtagtgaatggctttggggagtggtcagattcaaccaaaaataacagaaatctctgtcccccaggtaaaggattcctactttgtgtgtgtctgtgtgtgcacacaggcacactcgagagacttttggcattctttgaagtcactggaggggcacagagataaacccactcagccttggcctccaagactaacgaacacgtttccctgaaagaataaaaaaaaaatacaggcataagaaaacacacaaacatgggcttagagatttaaatacacacacacacacacacacacacacaggccctagaaggaacatacaccctgagatatgcactcattctaaaataaactcgggaatacagaaggacacgggcatgtcctttcagagaggcacacttctaggccctaagtaggagaaggaagaggggagaggaagaggcagggagagggacagggaggggggaggagggagggagagagagagagaaacgaagaagggggcggaggaggagatggaggagacactctttattctataggaggagacatcacggaagagaaatcaacactgaggccttggccgggcgcggtggctcacgcctgtaatcccagcactttgggaggccgaggcgggtgcatcacctgaggtcaggagtttccagaccagcctggccaacatggcgaaacccggcctctactaaaaaatacaaaaattagccgggcatggtggcgcggacctgtaatcccagctactcgggaggctgaggcaggagaatctcttgaacccggagacggaggttgcagtgagccgagatcgcgccattgcactccagcctgggcaacagggcgagactccgtctcagaaaaaacaacaacaacaacaacaacgaacaaaccaaaaaccaatgaggcctgaagataaagacacatgtacaaccacggatgtcagacttccagaggcacggccaaggcaaaagacaaacacatacagactgcagcaggcagacaggccggttccagagtcaggctccggtgaagctccgaagaaacaaacacgcagggagatttcggaggcgtccgaggacaccgtggggcccggctggctccctctgtctctgtgcgcgccccttccccgggtcaccccgcctgcgcccgacctgcgcccgcgcaccgcgccctcggggctccctgggacagcccgcggcctggcccgtgcgcccgggctcccctccccgccggcccggcacttcccagctctgacgcgggagcttctttcacaccaatggggctcgcgcgcggaggggccctgcccctcctccgggaaggtgtgtccctgtttcctcacctgaaacttcctaggagaacccgatccctccctcccgtcgggcggccaggggcgggtcgcgggtggggcggccgggcctgcgctggggacggctctggggactgcggccggcgccgggacctggaggggacgctggggccgaagcagcatgtgacaccgaccaggtgggtgccctcctcccgtctcggccctgggctcccggcggctgtggagcccggcggaggtggggcagggacaggaaggaagaggaagccaggcctttcccagggatcagcccccgctgggtccggggcgcaggctccggaaatgggggggctgggcccgcaggcagggctcggggtgtgtggctgaggaccctggtggggaagaggagaggaactagaggaaatgttgttgcctacaagtttgcttccggtcgggtcccgcctaggaaatgggcaccctgcccccagacgttccccgggccaataatcagggctctttcttcaaagtaggcgccctggggaaagctaagccatatcagaaggaataactgagattccctttctaggctgttccttacctggagaggttttatcggctccttttccttaaccaggccggggcctttccttatgtatctccataggtatttgcatactgtgtgagtctatgtgtagcttctctccgtgttaaccaaagctccgtaacctggaacagtgaatcctgccctgcccctcaccccagttccctacatatggggagcctcctaaagcttgatgtgaatcacaacgttgcattcttagcaaggtggaaagaagttatttagagttgggggctgaggtaggcgttggggtgctagaatgcggacgcagagctctagaacccctgagcatcttttgcagttgccttccggcaagactaccggaggagagccagttgtgatactacgtcatttccagatctcagtccctttcttcccttcctggatcttgggttccaaagacagatttgccctcctgtctacctagaagtgaactctggccaggactcttgtctggttgagagagaagggtgtgtcaaacagatgagagagggtggttttcctttcgaggttcctccctagcttgctcccctac

SEQ ID NO: 11737 - DNA, 6000 bp, Homo sapiens
tggagatatggatgggctttgctcaaatcaatatgtgtacattaatgttaaatttctttatatgtaggttaagggccaaaagtgatttctacaagaatcctaaagagaagctatcatctctcctgtctcgtccttgcaaaggatagtggtcaggaatggggctggatctgccacattctggggaacagagatgacctcaaccttcagcaccagagcagttccagggagcaccaactggccaaagtcacaggtgaatcagtcaagagttttaagacagctttcccttgagataacacactcccgtgctggctgttctgacccagtcagaatgcaaatgtttgtgtagttatatttattaatagagtccacggttagccaggcctggcacatggctagggctctgtattgaaaccaataagtaaaagcctggaatttctattttcgttcccactcctgttgctactgggggccttttatccagtcctgtttttaatccagcagcctgcaaggggcaggaaagaggcaggtaaagttgtctagcaaggcagagtagaaggcacacctgccctccagatgccgagagcttttataaaaggtaacaatgtaggtaacaaatttcccccaaattataattctcagggagaaagggttagggaaataaatttagagagaagagtggcagatgggacagatggattcaattaaggcaaagaacatcaaataattccagggatgcctcattctaatggaacatgtcattttctcctcattgcctccaggtaactcccaacagtctaggtaggaagtagggtgctcacaccgtgcctcaaccacggcaggagtttaatatcctcaaatgagagagctaacattccctcttctcttcttttcagtaatgtggtgaaacagcacatgaatcagactaagtgaatgcaggatacataatagatgcacatttctacagaaccaggtgttattcaagttaaataggtattttccattgtcattaaaacagaacagatttctttatttggtctatgggagactctcccttttaattaaaccaaccacactgtcattttcctaagaaagataataaaacaataaaaatatttacatccttttttcttcctaaacattaatcatgaggggaagagggtgttttgcctttgctagatagttttatcacatagacattatactaatatgctttaaattactgttttacaggtcactttatccttattaaggatgtattagattcttgttgcctctaacagcatttgtaattatttactaccaaaaggaattcaattctgtaataaatcgatcaccatatatagttgatatatgagtattgatatgtatataatacatacacagcatgtaaacctgaacactacttccaactgacctcaattttcatccaaagtcaagtgtaaatgtctagtagtttgatgagcgatgctttctttattctctgcctctcagttatgcaatttgattgacagtcatgttatccaacacagtcatagatgggttatagtttcaacaagtcagtattattatgtctatagtcaatggagagactggagaaggcttagagtaaagcaactctacaattatactccataactaactgcaacaatgtagacatactctgttatcaattaaatgtggcaatgcctgtgaagtcttcttttgtagagatgctaaatcacttttagattctagcccacaatttaccgtactgtggagtaaaatcatcccaaatagaaggaaataatatttgggctgtcagactctcttcaaggtcctgtgtagtaacctccacttgacagactctgctgggaaagtaagctcatgttaaaatatggaaccactgatttgcttcactataactgaggtgtcctgacttctgatgataagccacctttgatttttttgagtggtttacagtagctcccagaagaggagacagcattctggaagctcaagtcactgactcccagcaagtggcccactcacatggctactagcaggattaagctcctcactggctgttgtattgagggcctcagttccccactggctgatgaccagaggcctccctcagttacctgccacacagtcctctccataaggcagcttacaacatggaagtgggcttcccttagagcaagacagggcatgcaagagagagtgagagcaacagaagtgacagcagttttgtaccctaacctcagaaatgacatcccaccacttttgctatattctctttgttatcagcaagtgactaagtctagcccacactaaagaaaagaggattacacaagggcatgaacaccaggaggtacagacctttggggccacattagctgctgcctacaccttccttgcatgcacaacaacacaggaataaacatcaaaatagataataaatagagggaaaatagggaagcagaagggaaagggaaagtgttccagcatctaattactcatgcctcagagctctcgcattctctctccccacctctaaatctagcccaacagcacaccctctgatcaggtgctctcttcacagtctcacacctgtctcctcttctctacctgcatagcaccaccaaagttcaggctttcatctcttcacaccatgaatattgcagcactacttttctaaccaggctccgtactccaatctttctaactcacacttttaacttatctttatggtacagaaagcccttcagtagctccccattgtcaaacaaaatccagactctttaggctgccgtttggtgccttccataatttgatccaggcctgggtatcaaaatgcatcacccccaagcccccagtaacaattctccatcccaggcaaaccatgctcaacacccaaacacaccatgtttatactcagcttgaagcctctgctaataccattattccccctccctccgcaagaccagtcttcaccttaccattacaaatctttggcaatttccaagatgcagagcagagcccatcttctgttacgcagtttctgttcactcctaactagatttcggttcctctatgaactggcacagctgagagaccaccccacccactgcacaggccagtccctgtgtacctgcctgttttcccaaggaatcggtaagtttcacaacttccttcttccagagaccaccagactgcatctctgtgagggtgaggatgggtctcactcatctttccctcctgacaggagggcacagctgttccatgacaggcaatattggttgacttaagatggacagatggaaggaaggaaggaaggaaggaaatgtcaagcccagggtctagcatataacaagaggtcaacaagtaatacatatttgttaacaccaccaattcttacaatgggaattcttcacccagcgacaccttagctatgtaggagcccttcgaaagagagcaaaggcaaatgcagtttatctgagtctgacacaaacaagccgactcacacaaacatcacaactaaaggcaaatccgcagctcctccttcatcgcccatcctaacactggcttagcgatacagggtgccaagctcagggaaattattagatggttcagccagggcagaactcagtcagtacaaagcaacttccaatcagtgcgcttcagctgtgacaacttgggaaacagcagtggtgagagctaaaagggtgctggcgaaagagaaaaaaaaatatgtcgcttgtggggtgagggcggtgtccatatagtttagataattctagtaaacaaaaggatttgttaaaaagaagtaacagaagactttttaaagccttctttaaagggtgaaaatctcaactaaagcacccaacgtccaaaatccagaggaaatctagcgctccctttctagctggctagagcagttaagcctgaagtgaattctcccaggaatcagattcctggccaaaggttgcctgcgcaaacccgggccaccctcgtctcacggcagggagcgctggaaacggctcaggggctaggcccgttagcgtcgtcttccaagagccgtaaattcgccctcccgctctgctgaccctggagcaaagtccatgcagtggttctctgagagccggagatacgcaccgcgcggggaacccgggggtccgggggccctaacttttgagttttgcacgccccgcagcctgagatgggaaggtagctcgtagcgctccaaactcacctgcgtttcagaacgacatctacccactggtttcagctcctagagcaacaactgcagaatctccatggtccaaagtcctccaggaaagagaagaaaggggtgacgggggtgagggctgggaggcgaggtcaccagggtcccttccctggctcgggtgggggtggggggcgcaacccctcacggctcctccccaccaagccgtcgggaccccagcgggggcgcctcgcgttgggcgacagggacgcggggagagagcgacaagctggaagcaagggctgcctgcaaaactttcggtcctccagcggcaactctgcgggaaagaccacccttccttcggccccgcgtcgggcctatccccgtgtgccccgacccctgcgccccaggcttgggcggcgccgctgcatcccggctgccgggcgcgctgcagccttcgctctcccgcacgcggcgctcgcccgtccgcgctgcccctccccggcaggcgggcggccccggcgggcgggcgggcgcggactgcaggtgcctctctgctgcccctggcggccgcgggcgcgcgagccccaccgagccggctccgggagcccgagcgcccgcccctcctccgctccctctcccctcctcctccgccgccctcctcccatcccgcccttcctccctccctccccctttcagaacactcaatgtcggaacgttccgaagatgacgtcggagcgttctcgaatcccgtgtctctcggctgctgctgccgaaggaacagggaaaaagcaacaagaaggaagagcaatggcgacactggatcgcaaagtgcccagtccggaggcgtttctgggcaaaccctggtcctcctggatcgacgccgccaaattacactgctccgacagtaagaaccccaccacctcctcctccttttattatcctgtaacctttccattcacctagagccactgggaaaaagtgtgtgtgtgagagagagagtggcccccggtgtcctccatgcttctccctctctctctaaataaatacacacagagacagatcatcaatgcacagggagaggcccggctgccagggctgtctgtctgtctgtgcccggctccccgtggcagcccgcggggtgggctcgcagccccacggtgttgtccgtttaaaaggctactttgttgctgcttgcatagttttttgggtacctatctgggccaggtagatggaaacccagacttgggagaaaatgttgcattgtcaatttttgaaagaatttcatatacagtatttatatcgatctgtttgcaaataaacactctccctccccccttgactttggcttttttccccccttttttccttattttctgttttccttttctttttcatctgcagatgtagatttagaagaggctggaaaagagggtggaaaaagcagggaggttatgaggcttaataaagaaggtaagtggagctactggcattttagtgttagcatgtgtggcagaatcttcacaggatttcgaatataatgtgaattgttctgctgggtacagagtgactaaggcttgtcaaaaattgagcacgcccaggtgactactgcttcatgttaacttctttcaaagtataaatacaactggggggggggtaaaggggggtgagactgttgaaggcagaagtttactgcacttcagttggactccacgtttgaaccttctgatgcatatctgccattctccttgggagcatcattgccaaatggtggggcgttaaaatttctgaaa

SEQ ID NO: 11738 - DNA, 6000 bp, Homo sapiens; identical to SEQ ID NO: 2516

SEQ ID NO: 11739 - DNA, 6000 bp, Homo sapiens; identical to SEQ ID NO: 2497

SEQ ID NO: 11740 - DNA, 6000 bp, Homo sapiens
aaaaaagtcaatctttattttcagaaaatttgacataatttgtttttaccttttcagatacaaaggagtatagagatctgactctattattctaagcctgaagtcagtcaagaagaaagtatgactcttaataaatgtggatctactttcctttgaaggtatctttgaaaggagcagtaggagggagagcaatgtagatcttctctaaaactgaatttcaaaggatttatttggcccatcttccacatgggaagaattagaatttttttttttttttgccttttatttcccattgtgagaccctaaatgggaaaataagtccaggttatgtaggtctctatgtggtattagatgcaatagcagccatagtgcaaggaatgtaggccacaaaggcctgtgtaactggctgctgtgaactttagtggcaaaccttaaaaaagggaaaagaaaaaggaaagaagacctttagcacttccatatagatctcaacatcactcaaaaaactttcttcaactgggtctgatgcattaacgagatcatagaattactgctaatttagaattacatactttggtgaggaaagtttattattacaaataaaatgccatagtttataaaaaagaattggatgtgacaataagccatattttaatatgtggtttattattgtgtggattaaaagcagaaagcttaaattaaaaagataattccttgaatttcattaaacagttttaaaaattgttttgcaggtatttaaacagtgtagaaacactgtgagatatatacatatatatatatatatatataatgtcttaaaatcccaacattttaaaaggagctcacctccttttaaaattatgacagatgaaaattatgataactgtaatgtaaaattaggcaaacaagtaaataaaattaagtaaataatgcaattttacctggtgcacttattaacaatattcttattattcaaatcttaccttttctttataaaatcttccttaaactatgataattcttgtagtttctgtataatacccaatgtctgaatgaatattcaaaaatcagtctcattaatgttttaaaaacgcaactgctaaacaaaccatgtttaagtttttcagctatgctagcttttgcatctcttgaaacataactactgggccaagagtttctaaatgattttccagtaaatgacatctgtattgaaacctaagacacacaggcactatagtaaaggttctgaaaaatttcattttttataatcataaataaaattaatctatgatttgacgaggaaaagaattattagaatagcaacatgaatcatatttaaaagaatatacaagagaattaattattccacaaaaggtaaaagaaatattttgttttgttttgtttttggtcagcagtggttcaggagatgaaccaactgtgggctctctggctatcattatacaaatttatcatcaatgaaccagtgaagcacgaaactgagggttaatatagaatgaaaagagactttcccctcaatatatcactttagaagcatatattctgagttctaaaagcaataatcttccacataaaattcaatacaagagtgatctccaaccacattagatcaaattatggcaagattcaaataatatctaatccaggtcctcatcttatataggaatccctggcatatggtcatttcagcctcttcatggatacccacaatgatgggaacttcagccaacagggtgctcacaaatttttggaaaactctgttagaaagctcatgatttaatgaaagtaaagctgcttcatcctttcaaatttctcatagatttatcaccattttgtcctgtgggctatcacaggatagtcagaattccttttcttacctgatagcttttcgctatttaatgatagctttcattctttcacttctccacgttaagtctttccacggcatttcatagaatacatctataatacacaataatcttcctttatttctcttttgaacttactctttgctagcgtgacagtttgccaacgtccgcctcaacaaggagtgctcagaattgaacacaacatttaagatgtgatgatcattgcaaactataatagggcatccgtttgtgggactctattaagtccaatttaacaacgcttaacttttgcagccacgttccatgacaaatatcaagcatttggccaacaaaaccatggtcattagttgtgtagtagacttttcgtacccaaagatctttccatttatgtctattcctataaggtggtattttgacatcgaacatgttaacatgaatctctgtatttgaaccttaggtatcttatcttcaaaaatatcaagttactctattttccttcctaccaaactcatatcccttcagtgttaaatagtatggagctatgttgacttataataacctatctcaatttattacctcttaatactcaagaatacccaaggaaaacattttcttgtatggcaatttacatttaagaaaccttgcccagtacttctttttatcttgtttattttaaaacaagttttttagagaataatttaacagtgcggtacatctccgtaaaagcatttcttagtagttgatcatgattaagcggcaaaatgcaggtaatgacatgctcaattccacctttgagtcaggacaaacagtgtacatcgacgacaacaacaaacccttatgctaatatgcctgtgacgcaaatatccatacataccgcacacgaattgtgcagtgagctaaaaaagaaaacagaaaagaaaaaagctactactttattctacttaaagttgtcctctattcaaacttttatctcactcttctctccttctgcaccataattttctttcgagcaaagacagggagttctggatgattccaatctccccaaatccacatcacagcctccaattgaggttcatttaagtcaggttggagctgagggagcctgggctggaaccggccagggtttcatccagctcctcccccaaaacacgccccccaaatcggagccagaggagagcccaaccacagaggacttccactcaatgagggcaacccctgagtaaagtccatgcggacaaccattcatctcctccgacaaccattcatctcctccgacccccgcccagcactagactgcgctcctagcaccgcgccttcttccggagcctcctcccccgggctggctaggggtgagcgcaggggttagtcagtacgcacgtgacgcgcgatgcccacatgacacgaccgtgagcgggggagggggacacggagtgaagaaggggaaaagttacagaagacccgtcaaagcgcccaaagcaatttgtcccttcttttcttcgccagcggtggctcacggatccctaagggacagctggggacccaggcgcccccagcccagccccagaaacgctggacgcagttctccgctcaccccaccaccttctcttcccagacccgctggtgatgccgctgcaccctgaagttgctccttccttctttccctcccttcctcccattctttctttcttttcttccttcctcccttccccaaaagctcttcatccgcttcgggtgatgccactgacgcacattcaatttgccccagcagctctgaggaggtcagaccaggccgagcaccttccaaaggggagggtctaactgagcaaacaaagttgcacgccacaccacaacctgcccctcccctccctttagcccccaagtcgaatccccggcgaaactcacttgcactgcgggtgctctctggcccccaccccatcatcgcgcaacacacccccttcaacatgcgcggccaccctttcattgccctgcgccccgagcggtcccaccgcccggcaaaacactgagcaagccgctgctctcaccttgcttgacacacttgagccggagggggtccttgcagtgtttgatcacggccagcacgtccctgatggtgagccccgccacgggggtctcgttcacctccagcagcagctcctccgacaccaatttgctgccgctctcataggccaccttgccgggcttcacctcccccaggtaggggaactgtccattctcggcgccccccttcagttcaaagcccagctggccctccgggttcctgccaatgacactctcatggactttgctagtccagtggcttttctttttcaagcttttggacatggcagtggggcgagtcgcctcagttcctgggctccttggggttaggggggctggtggtgagagaatgaggatggaggagcaagggggcccagggggaagaacagcagactttgccttcgcccccctctattcggtgctttccctcttctttggatggagtgtggacgaggaatggggaggatgagagggacggctgggcagaggtaggagagcttggatgaggttgtgctgtcccttgaatgacactcaaggctgtggccccgcagcagaggaagcagtggtggtggcgtcggcggcggcggcggcggcagccggagcgagcagtagccgagctggtgagcgggtgtggtgggggtggggaaggagggtagggatgccgggggccactcctgcgtggtgcgagtgggaacgcgcgcgcgcgcctgggtgtgtgttgttagctgatatccatggcagctgcagtggcagggtgcgtgtgcgtgtgtgtgtgtgtgtgtgtgtgtactagttctactgtactggcagacgggaggaggcaggggaggaggggcgcgcgcgccgggtggggagccacggagggcttcgccgctgcctccctccctccctccgcagcttgacccggtagtgaaggcagagagagaggcaggctgggtccgcctggcagcctacgggaggaggcgggagccgggaaggaggggagcctaggcccggcgtggggaggccggcaggaagggcctcgagcccagtgcggacctttcttcagcctctgtgcgaccgagccgcgcgccaggctcctgtgcgaggaggacgcgctgactccctccgacctgggctccgatggagcagaaatagcgggacctggacttgtggcgcgcctggtgccacatctcgggctctgcgagcgtcctggcgcgggatcctgccgtgagaaggagttggggcgggggacccggcggggcattgcgggagaaggcctgggatccctgggagccttgtagcgtgggggagttcactgtgtagagaggtttcatgtcttcatctatatagtcacttatttgtcttaaagttctcgaaattccctcttagagaaggagaaagttagagaactggaggctgcgtaccctgattacgcagaagggaagcagcctcgcattccccggggcaggcccccgcccgcgcgtcccgccagtaggggaatttagcggacggctgcggttgtctggtgaaaggctatccaaggataaggggcttcacttttcccaagtaggggaaagagaaggggtctacagggctaggggtggagggagcggatgcagtgagcagcctccgcagagaaattgacaatttaaccagggacctgcggcagagacaaggcggagacactcccttgcccaggaaagccgccagagtccggcttgtacctggggaagaatccttaagacggtctggcccaacactcctttgctcacagagaaaggggagaagactcccgagggtgaaaatggtacattcggagctggaactcagctcgctgaccccaagcagtgttcccttcttttcgccaggtttgcatccaagagaggggaggacaggggcaaaaggatgcagggaggctgctgatttccactgaagagctaatttcctgtgagacattaacagtgatttaagaaaaagattcctgtaactggtaaatgaatttcatttgcttaacttttagatgatatgtttcaggcaaaaaaaaagttgtgcacccacttatctctttaaagcg

SEQ ID NO: 11741 - DNA, 6000 bp, Homo sapiens
aatgctttagtcaccattctgtgcgatagatcactaaagcatgttccccctgtctcaccaaaactttgtacactttgatcatcatctccactttccccaaccaccctcttcccccagactctggcaaccatcactttaatctctatatttatgaagtaaacttctttagattgcacatgtaagcaagatcatgcagtacttatctttctgtgccagacttacacttacttcatttactataataccctccacattactgaaaatgacaggattttcccctttttcaagactatataatattccattgtgtatagatactacattctctttacccattcatctgatgatggacacttaggttgctttcatatctcagacattttgagaactgcttcaatgaacatgggatagcagatatttcttcagcatactgatttcaattcctgtgaatatataccaagcagtggaattgttggatcatatggtaattctatttttagttcattgaaggtcctccatgctgttttacataacagctgtattaatttacattcccactaacatgtgcacagcgttcccttttctctgcactctcaccaatacttgttacctttcattgtttttatacagccattctaacagatgggaggtgatatccacagaatggagatacaataaataacaatgcattgtatacttcaaaagtgctagaatggattttaaatgttttttacaccacaaaaatggtaattatatgaggtgtaatttgttaatagcctgattaatcactccaactgtaaacgtacatcaaaatatcacactgtacaccataaatatatacagctgggtgagaaggtgcatgtcagtaatcccagttactcaggaggctgaggtgggagtattgcttgaggcgatcaaccaggagcttgaggctacaggctatagtgcactatgatggcgcctatgaatagccactgcactccagcctgggcaacagagcaaaaccctgtctctaaattaaaaaaaaaaaaatgaaaacttaaaaaatatattattattatttgtcaaggaaaatacatttaaaaaacaaacaaaatgcttcagtcactgcccatggagctcctactagccagagagaatcaaacaaattgagaaagagaggaaccagcacctcagttctggcagcttgccaggtagcgtttgcttacctctgatcttacttaaaaaccaagtgagatatgtcacaacaaaagtgtctctgtcatagcagtctcaacacaatgaagatgtttttctaaccaaagaacacagttagttggaagagctctacaaaattagtaccagggaaggctttagttaacacttgccccagacgctgggacccagaaaggctaagtgatttacctaaggttacacagctggcagcagtgtctagcccagaatcaagagctaactagaatctcctaaggtgaaattgcctatcactgtgcctcttaacatgatttctaaaagacaaggttccctgttcctcagaactataacttcatcactataccttttcctaaaatcagaacacttatgactgacttttcgttgttttaatgaatttaatcattcattaaatgggacggtgcctatacatcagttacgaaaaagaatttccatctccgatacatttaattacagatataaaatttaactaattttacccatgtttacagtatgctgcttaaaatttaatcataagtatataaaagcataattatctcatacataaatgagggtatataaaaagtacctttgcagaaatatataatttatactaaaacgtcacatattctgttacaaagactgatttatttcaaagaatgaagaaactaaattaccactacacttggtaacaaagatctgtgcccataagatcttttctttaacatctgtaagaactacatgagaaaaacacaaacattaaccaaggttaaaagaaaaaacaaacaacttgcaatataagcagctataaacagtgccctccatggtgaaaaataaagtccacacataagtatcctagcaaaaatttcactacacacacacacacacacacacacacacacacacacacacgcctaacagatggattctaaaaaacagctaagcattccacaatccaaatgctcaaaaattaataataaaggttaattaacattctggcacatgtgatattgagaacaacagcagtaatttggggcaaaagaccctctctctgctctcgtccttcatctcattcaacctctttttctcaattgtgagcacacccttctgcctcccctactctgcaatcaaatcacaaccacccaaaaccgaggtgtctgctgcagcccaaaacatttgactgataatatccggtttgccattccaggaaatcccagagtggtttttaagcctctgcccaccgcttgtaaagaaaggcaagagaggaactaatcgataccagcaccccagctgtgacctggcacatgaagaaatcaagaaaataaatcccatccataatctgtataatttaacacttggaagaaagcaacatctgggatcgactccaagcaggacagttttgcctggatggatctgagcttcctgcactgagtgttaaagccgcttaggaggcgatgccctcgggtccctcaccagtccagcaaagggactatctttttccctagcaagggttaatctacctcccaaaaaagagaagagtgaggagaacgaaaataacaactactaacatctactccttgccagtaaagaggctggcaaagactcctctgacactttgaaggagggaaagctggaaacctttcccaaaggtgggttcaggtcaaactattgtcttggtaattagtcacaatccagaatggaagctaacgtgaaatgtgggaatgattttgttgaatcctacagtcctttcaatggaccccaaagtcctatccccaggcaaagttgggaaaaaaaaaaacaaaaatcccctcggactacgactccctgggaaggctttccagatgttttaaattgcaggaaaatgaatttagaacataagcagatatctacacatcacctaaatcactagacctgtcctcaattttaaaacacacacacacacacacacacacacaaagtacaccagtcggcagaacagggcattataggaaataaagagtgttagtaaaatccataatgctttctgttagaccttctgggaggttataattgcatttggccggctgcagccttgtcggagagcctggcttcttaatagtctcaaccctaaaaggagtaactgtcaaggggcgacccagctgaaatcaaacaacaaaaacgggaactgtaacccgcctgaaatgggaggaggaaaaggaagggagactcctgtattcatcagtcaacattaatgtcctttgttgttcacctttacacagaacagcgagagctatcctgttcctttttctccgaacgccagtgtcagggtatgctttcctaaaagctatctccctgcccccaagaaccaggctttccgatccccctccccatttatcactcagcagccctgtaccgccacaccgcccccactgcgctcacccggggtcgagagggtggccagaagtaaaaacactgctgaaatacccgttcttctccaaagaccaaagaaccgagcggcgcagatgttgaaatttaccaatgcccccgccccgcaacatacacaccccataaatccgggatcgcagagagggaggagggtcagagagggctcagcttgtcagagcggctctctccaggaccctgccacattccacactccgggaatgtcgatccgagccagagggaagggtttgcgcctccctactgttttgggggtgttctctctgcccgagtgttgttgtctccctctccacccagaggaaccgttgcagctccctgtcgctttggggaagaagggtaaggaaggagagaaaccccattcgcctcctcttccaacttgacacacacacacacacacacacacacgcccagtcgccactccaaactccgcaggcagagcccgaagctagcgggccggccgcgcgctcccccaagctgtcccggcgcttcgggaaccagtgcggggcgcgccgagcaggcggtgcggggcgagagcctggtgcgcagccctctgcctggagctggctcggcaaagccccgtaccagctgcgcgatgccaggattaggcattttcaaccgggcggagcgagaggggcgcgggggcaaggacgagaaatgcgcactcgctcgggccagagcagaataaaagttcgccccgcggagactcacccacgccgtatttctcgtgctccgtaggtatccacatggctaaaggggctccggggtcttcaggctttgtaatccccgcgccccttctccggctcacaacaatgcacagtccccgagcagcgctgcagtgccggagcccagcggcttcgcgcgggctgcgggcgctgggcaggatctgcgctggaggctcccgagcccagcgttgacactgcgccgcccgcagctctcccggcggcggctgctcacagtcctccgacgcgctcccgggtacccggcggcgcagtcattgttctgattcactgaactaagcgaacacgccggggcactctccggcgcacccccgcccgccagcgcctagtccagccctcccgtcccagggccccgcagcacgctgggaattgtagttcttggcctccccatcccggaagtgggcgcggcaaatgtggttcggggcggggattcagttttactgattgcgtcctattggtccagagcgcggcgtaggtgtggagaaaacattacgtcgacggggagttcgcctccagtagcgtttctactggtgccaccccgcctccgacccgccctgcggccctcccttttcttttctgccgggtaatggctgcttccaagacccagggggctgtcgcccgaatgcaggaagaccgtgatgggagctgcagcacagtcgggggtgtaggttatgggggtgagtacggtgccccggaggcgcggctgatgtgtcttcctttctctatgaccgggtgtgcaacggacctctggtctgaccctaggagcccttcagctctggggccacctgggttcgactgggccccacgggtggtggcccagcgggatgggttggagccggtggcggctacttggttggggctgcccggggatggcggagaaaatgccatgggatggcggagaaaatgccatggaatggccttcccctccgccggggaagctccctgagcgtttgtcttctggtttggagctcccagctttgagctagctgctgagtgggtttggttcagatctggttcgcgcgcgtgtgtttataattttgggattagcagctctttctcctcaccagtacactgccttggtttgcttggtttgacctcgcaggtgtgttttatttagcttccggagtatttccagtcgcagactggtggtcactgctctccactctacagatttgcccagtttgtggctgaggtgacctctgaagggaaagtgtgtgtatctcacaacctccctgtagatggttaactgctctgggtgttcttcagatttgtatgtggagcctgagagatcttcccagtctctgggtccttagagaaagaaaaggaaagtgatagataatttgcactcgtggcttcaaagaacatttgaaaagagttttgaaaaccatcacaactttggctgtacctgactttcaggttgtcctctgatccactgtaggaataaaaaaccaaattttgaaagctgcaggtggattgtgtttaggactcttttacctttagtctatccctcccccattccccccaccccatttttgtcttgatgtgtaatttagcacaagttgtctttttctgatgaacatggtttggggcttaaatatagttctcagactgttgc

SEQ ID NO: 11742 - DNA, 6000 bp, Homo sapiens
ctcaaggatgagcataagtgcttgaaataaaatgctaatacttaagtgtcaaaactatggcttaaggctcttgttaattcattaatgtaatctcagtataataaatagcttcactataatgaaagttataattaagtatctgcactcatatgaaggcagtgcttaggtttttttttttaaattttttttaaggcaacttaggataaaatcattaatttggtttacagaacataaggagagtttataagcataatcattcttaccaacgtgaaagtatagtgggcaattccatgatttaaatggagctcagaagattctaagatttagttaagggcaaaagaaccttattttggagatttttctcagggtccccagttctgttccctaccatcactataacacccatatcttgttttaggtggcaaaagcattaaggagatgaaagatggtaactttggcttcctgtttcaagatgtttatcttggccttgtctaataatctctcttatgggctcttgatatattttgactttggcacactagaaagcggacatagtagcaaaaaggtctttgaagtcaagtctcagctatctcacttactggctgagtgactatgtgaggtaattatctcagggttggttggttggtttgttttttgagacaatctctctgtcacccagggggagtgcagtggcgtgatcttggctcactgcaacctcatcctcccaggctcaggtgatcaatccttttacctcagcctcccgagtggctgggactacaggcgcgtaccaccatgtttggtttatttttgtatttttagtagagacggggtttcaccatgttgcccagactggtctccaactcctcagctcaagcggttcacccgccttggcctcccaaagtgctgagattataggcatgagccgctctgcccggccatatctcagggtttcctaaggactaaatttgataacacaagttaaagcctggtgtggttaatagttactctgttaactgccgttgattttgtttagtccttctataatgtccagtatcaaaagagcaaagcaatgtcaaaattctacaaatcaaagaagggaaaattaaaggcatgttaatatttcagaggtaaggaaaactcatgtaggtttttattgtgtgctaacaaaattaggcctaaagaataaagggaggaaaaatcagctgaaccagatttgatccaggttctgttttccacctcctgcccccattaaatgcaaagcccagttccagttcaagctgcctacaacacttctccctttgttctgtttattctttccacgggccttaaaattaagttgttcctttttgtcccagttcttagagttctttgatgtagcaacccactgcattcctaaacattccaaaactcttgaaccatttccagcctgtggattttagcttaagtatcataatgtttctaatgttcagagcctctgccttttggttcattttgtatcttctaacccttaaaacattttaactccatttgttctacttcctcccagttctactgaaccatgaatttaaatttgcaaagcaattaatagcagtgaaacatggagatgcttaaaattcacatacacaggcaataaagaatactaatacagagccttataattatcaagtgctgataacactcaagcatccctgaaggaaaaaaaaaaaaacccaaccttgagataattaccttgcacagtctctcaggcatcaagtaggtgataagtgaacattgaagggttttcatctattgctcagttttcttcatagaatgaaactgccaactcttagtacttacctcacctttttttcaggagtctactcacccatgtaggcaagctctctgagccccccattgcaaagaagagcaagttgatgttcagcgaattgcccaagaacatataggagttgagagttcccttggattagaatcctgatttcctgaaaaccagtcctggtggttctgtatgaaagtcacattgcttcacacagttccttcaatttagagctcctccctccaccctgttctcaagaaacttatgaaactagcaatatctggctgccaattatctgataacttcctaagcatgagcatatttaaaaagttaagtaaaatgtgagtgctactccctgaaagccatcacttttgacttttttaggtgtttcatgaggtacttgcctccgtatttcaaaatagtaggattatatgcctttttcttggattcccggagttgagctgccagacttcccattgtgcaagatgagaatttagaatcctcatatcacactgacttccttctccctacctcaattaaatcatgttgaagatttttcttatgactaagtgtactacaatttacatttccggaacaactttcctggcagtgataaccgcttttttttcttttttttttttttttgagacagtctcactctgtcacccaggctggagtgaggtggcacaaatcagttcactgtagccttgacgtggggtcaaacgatcctcccaccccagccattgcagtaggtgtgaatacagatgtcagccaccatggccagctagtttttttactttttgtggagacagggatctcactacattgtccaggctggatttgaactcctgtgctcaagtgattctcccgccctggactcacaaagtgttgggattacaaataagccatggcggcgcccagcccacttggttactttgttttctgcgtagctgtcaccaatccttgccagattcccccaacagaaatttaacaccctctgcttaatattttcctcatcagtcagatatcaggcactctgtatcagttctcttccccacacctcagagaagtttctcttagaaccctctgtcttcctgttccaatccaggctaggtgcttgtttgaaactatctttattctccttgctttctctctgaattggctgggtttaaaaactctaagaaataaattatctccacattttgaaagcattactcccttctaaattccagtgttgctgataggaagcctaatactattgcgtatgtgatgccaagtcctttgtaagttttcccctctgcagctcttggtttttctcttatctgctgtgttctgaaacttcacaaccatgttcctttgtgtgggtttcttaatagtcattgtggtgagcactcagtgggcccttgcactgtgaaaaacgtttctgtttgctaaattttctattaagtttttgaaaaattttctcttcattttgtttttgtttctaaactcctgttaattggatactggatccttttgtttttgctccatttttcatctatttctactttctaaatttttccaactcattgatgttttgaaatttgggatatgatttttactacagaagaaccatttcctgtgctctgctgtctccttaaaaaaagaaatcctcttgtttcatagctgaaatatcttttatttgaagatgctagttatagaatactttttgagaccattttgttctgttttccatttccttcaaataacaaaaacgttgggaaatgctgtgttcgtgaggctcacactaggggatgctgaatgttggtattgccgagccatttctctagggtcttttgtctactcatttcttcagagaaaaatagggttatggggagatagtggtagggagcggtagaggggtgcctgcattatgggaggggcagagaagggggctgctagcattgcactattcagtaggaaaacatcatggcacctctcatcctttgttaggctttgtgtctggaatccctctgatgccctgtctttagcatcttaaactagtcttctgcctgaacaatttactgccctcccttctaccttcaaggcacctgaagctttctggggttctgctttgtgaatcagtggctaaatatccccttctacaagcagtttgctcagttctcctgacaccatctgcaaagagggtgcttgggttcaggtaacctccctatggctcacttatctgtaaagcatacttaatatctctaccttttaggttgtttaaaggagtgaacaatgtgtaaaacacttagaacaatgtctgtcacgctgtaaggactgaataagttattgctcttgtcctccaaaaatgtgttggtataaccggtctgcagtcatctcttctcttgttctttttgcctttgtttgttccctttgtcattgctttactgttatttggagaaggagcattgctttactgttaagtttggagaaggagcaggatacacaggattaattataactggaagtcctctttaatattttaaattagctttactttcttacagccctaatctttctgggtgactctggacactctactacagtaatatgaatatggcagcccctcggaagccatgcaatcatttcttctcttcagaaggacagcacactttctttggagggcccaggacaatgcagtggaaagtgctttggcttggaggcagaagtcccagaggcagtacttctcagctgtcacctctgacaagcttctccagcgtttcttctgttaaaatgagcccccaaaatgcctacgacccggttgcgatcgagtggccgacgcccccagtgggagtgaggcccagcacgcgagctcggtccctcttcctggagccaggtgggtgcgcgccttcaggctcacccggcggcgcaagcgggagaagccaggtgccctcaataaacatggccgccacgccagcgtcaacccggctcgggaggccgcgctgccgcttgggaatcgcaggtttggcgtcacccggcccggaaccacgtgatgcaggaggtgcccgaggcggcggggctcgcgcgggtggagccgcctcggcgttcgagcggggtgggggctgcccggttgagatttcccggcgggtcccggcctctgcgtgcacgcgcctgcgtgctcgcgctcgcggttctggcgctgccggtgaggagccggggagcgaggcggggaggctgggagcggggcgcctcttctgaggccagagggggctgggcagggccggcccggcgggaagggggtcggccgcgcgctatcagcgcctggtccctgagccgcggcgctggcggtgggggcttttcggccccggcccctcctggcagggcccggctgtgcaggtggccgggcagggccgagggccccgcagcccaccgagaaggccccgccggcctctggcccgcccacccggcgacctgcgctggggccgcttgcacggccgccgcgggttgcagccttggagtttagtttcatcttcggattttccttcagagtcggagtgggagtgggacgcaagttggtggtcttcttcggtcttttaaaatagtctgggttgacgtcaaatgcagaaatgaggcagtgttgattttttttggcgtaagtaccccaagcctcgggggaaatcatgaggcagccggttgaaggagaccaactcgggaaggaggaaaaggttagggaggctgaagtgctcagtttaggacagacacttgctttggacagtttgctaactagccagtctgtgtgtatttttgttttcggcatttttgtcgcctttattaaaatttctcagcagttaaacaggccgctgatagacataagggaattatttatatagcagattgcccaactcttgcattgtatcctaacctaggaccatgctgtgtccccatggctttcaagctgaagaaatgaaggtctaaagtgtgtcagacgtacctaaagaagagttcaaaagtgtagctgccatcctttccttagctatcagaggaagcagtcactccagaatgagacatacacaagcccgggttcatagactcaccctccataagctgtgttgctagattgaagtttttaatcaccagtgaagaattgattgtcataattttaggagactactgaagtttgccttgtttctttccctaggaaagga

SEQ ID NO: 11743 - DNA, 6000 bp, Homo sapiens
cacacacacaaaaagacttattatatcaggaagcttcagtgttattaatttatttatatcaaaataaattcattaagttaaaaatattaggccaggtgcagtggctcacatgtgtaatctttatactttgggagactgagacaggaggattgtttgagcccagaagttcaaagccagcctgggcaacatggcaagatctacatctctacagaacagttttcataatttaaaatattaaatatcaaattcattcatttacatgcaattttttttttcctgagacaggatctcactgtgttgcccaggctcgagtacagtggcaaaatcacggctcactgcagccttaacctcctgggctcaagtgatcttcccacctcagtctctcaaagtgctgggattacaggcatgagccaacatgcccagtctttatgtttcttgcttttttttttttttttcttgagacggagactcactctgtcacccaggctggagggcagtggcacaatctcggctcactgcaacctccacctcccagattcaagcaattctcctgcctcagcctcccaagtagctgggattacaggcccccaccaaatgcccggctaatttttgtatttttagtagagatggggttttaccatgttggccaggctggtctcgaactcctgacctcaggtgatctgcctgcctcagcctcccaaagtgctgggattacaggcgtgagccaccatagccagcttatgtttctttaaatgagacaaatttcaaacaatgttggagccacttctgggacaatataacgtactggaaattaaccatgttattacaattttatatttaagaaagccatcatcatgtatcacttagttgtgtaatttttctcacaattttcacagaacagtccaactgttctggctgacaaattctttcaactgagtgtattttgcctagatttggaatcaaaagtcttaagttaccatatcagctgtaaccgtgtgagctattacaagaatgaaggtgatcaagccccagatgctttctatgggttttcatcagagtcagcaatacataatccagataaattctacttcatatgaagaaacttaagagatggaaatatgaaagatgccctgaaatatcaaaaaaggaaactctaccagctcactgaaaaaaggaaaaatgaaccttattgaggaggaaaaatacttctaattatttatttggtcaaaaagtagtaaccagctccataaagccacaatatgtgctcagttatattgagcaaactctgcagaccaatgttctaagttaatttttatgtcaaaatacttcacttgaaccacagagccctggctattcaggtaaagagaagaaagagacagctagaaaggagcgtcttttccaggagtcaaatcaaatcaatcaattaattgaccttctttgacccaaactgaggtatcagtattaccaggaaatctgcaggtaaaaccatacatcagaatgccttaggaataatcaggtccaaagcctagggtatctcttgctaacacaagggaaatgaaaattgtgtggccatatccgaatggtgatttaggttcgtttgcattcactgtgtatatgaatcctctccccctgctgcaatcacatcaagttctgagtacagagaagataacttagttgaagcggtggttctcaaccagaggtgattttgtccttcagtagacatctgacaatgtctgaagacctttttggttgtcacagatagggggaggcagtacaggcgtctactggatagaggccaagggtgctgttaaacatcttaaaatgtacaggagagcccccaaaacaaaaaattatccagctcaaaatgtcaacagtgccaaggttgagaaatcctgacttaaagcatctactgggtagtcagtcctgaaataatgacttgagtaaacaagagaatacaatacttgaaacacagtacagagtatatcaaatgtgatgtgtcacataacacaacagagaagtattgaaagggagacaaatgtgggcaacagagaattggaaagctatgtggaggaggtaggattattcctttttaaagacatggaatttgtatggaaggaagaaaaatgactgagggaagaatggcatgagtaagagaacagaagtgggaaggagattggttatagaagaaacagtgagaacggtaggttgggtgatgcagagtgagctatagacaagagggcaaattagctgcatggcaatggtactggcctaggaatgccagtttccttacatgtaaaagtacagaaacgacctagatgcttaaggtctctatcgtcattaaaattctatgattctaggacagtaggtctcaactcttttgtgcatccaagtagcctgaataaattttttaaaattagagatgcctaaagcctattccctaagattttaggtctgatttaataggtctgagggttgatcagaacatctgtattcttaaaagcttcaaggtaagtctgacataggccagaaaaccattgttccaacccttcttcccattactgcatgatctgtattatgcactcaatgcttcaccccaaataaagtaattcaagtattaactcccaacttgtgaatctttctgctttcataattatctatggcctctaacccaagaattctgggaatctatcctagacaaccagaaataaaatgatgttttctaaacaaagatgtgttattttcaacgtctgattaaaatatagtttatcacttctaatgcctaaaaattaagtacaatctaaatggtcaatcatagtaaacaattaaataaattatggcaaatttgtgctagaatactaattaacaacttaaaatgatgaccttttaacaaaataaaacactcataataacattaaataaaaacaccaggacacaaaactgtacgtgtgtatacaggacctcatttatgttaaaaataaagattagaaacaaaactggaagatttgatccaaactgtcaacattagtcacctctaagttctgggattatgggtaacttattttcttgttaataattttccatgctttccaaattttctataaaacataaattctataaatttatataattcatcgaggaataaatgtatagatttatggaatctataaagtaataaacttattacattgataattagaaagtaaagttgacctattctgctaatatgggctgaacagaaacagcaatttgttccagggctaaagacatttacatttcaaaaagatatgcatgaattaattcttataagtacttcccgaaggctcaaaatttaaaacaaagatcaagaccactaaattcttaaacagtgatgaatgtaaggtaacaactacatcttaggatcaaattagagttactgtaagaaagcattcctactattaagtgcagatttgaaaacatgttgaaaaatcccatcgaagctgacagagcactgaaccaacttctacctggaacttggtgacagtgactgatttgtctctagccataaagcccatcaaaaaccaaaagattgtctacttagtggtaaaaaataataacgacgatgataggaggattctgctgaactcatgttttcagtggaccaaaaatatcttcccctaggtatggggaagtaactcaagtggaaagaagggatgcttgaaattattgcaaactctattcattgcatagattagccactggtgggtaccatgcatccaggatttatgaggatttcaaatacgccgtccttttgcccccataagtacactcaaactcgtgagaccatgtgcctctatttttaattatgaaaatatggacgctgtatctccaccagtggttagaactgtgaaacatcctaaccacaacgtccagaagggcgactgatcgcagagcttcaagtgatcttaactacgttatgtgttcctaacacactacagctgtgttccgcgtcagcgacgcagggcagaaccatcattgtattaacctttcccgctcatgggacgcggtgcttagtccccgggaaccgacaggggctccgccaacaactctgcgtcccgctctcgcggcccggacggcagcagcgcaggttaactggaaatggctggcaaggaaaacaccttttaaaataataaaaacaaaccacttctcaggagcttttccagcctggaataaggaatatttataaaaacagtggtagaatattaggacgtttctaggttcagtttcaccaagtgaaaagacctgggataagacgagcccagggctgcactggacttgtgggatccagagactacccagaagggccctgccgtcgagggaccctgatctctgcgcgcttcggcggcgcccgggtggcagccggtgtcccgccgcgtccctgagaggcttcggcctcgtccgaccccaggctgaagatcaggtggctcggggccggcaggttacctgcagcagatgcagctgggccacgagacgccgcggcaggtggaggaagcagtcgcgagcgttggtgaaggccacagtcactgccgccccgcctcccccagcacccgccaggcgatcgctgccccacatcgtcccggagcgtcgctctgggttcgcccaccctagcgccgcaaaggacccgggacccggcaggccgaggacgtcggagccggaggagatcgatcggccccgccccctgcggccccgccccctctccccgctgcgcatcctgccgtaagcctgtagtgggtgggacaagaaagcttctgtcacccaccgcgcctctccgccgagccgctcgggggcggcacctcgttcatcaaatcttcgcacgcaggaaacgatggccgacgctgtcgattctccagccaatcctggcactccttaactcatcccgctctcttattggataaaagggagctcagtagggcggatgttgtcctccctgcgaggatcaaagtaggcaagatggcgtcgagcggcggggagctagggagtttatttgatcaccacgtccagagggcggtatgcgacacacgggccaaatatcgagagggacgacggcctcgtgctgtgaaggtaaagtgattttggtttcattcgctctcctcggtagctttatgtgagtgctagcgccatatgaccagcctacggaaataaaggcacgacaaggcttccgtcagatctgtctctcgttagagctggcgtgaagaaccctcggtcagttaccaaagattctcacgacgcctttggtcaagtattagaacatcaactccacgagaataggccttggttttagtcattggatcttctgtgtttacagtactacttggcacaggtaagcactcagtgaatattcgttgagtgattgttcccagtgacttctaccgactcaatttctggaaaaaaatgtcgactgaaggtagtctgttatatgccttaggtagcctctcacatggactgttattctttatgcagaaggaatggcagaaatttcattttgtgttcttttgctgactgggttgaacagattatttcttgttttcaaagttctctttaaaaaaaaatagaggcagattcgtcctaggcttatttgcgaaatacgtttaataactctgcatttctttcaggtatatacaatcaatttggaatctcagtacttattaatacaaggagttcctgctgtgggagtcatgaaggaattagttgagcgattcgctttatatggtgcaattgaacagtacaatgctctagatgaatacccagcagaagactttactgaagtttatcttattaaatttatgaacttacaaagtgcaaggtaatgtgcaagttaagaaatgactcatttcctcatttcttccattcatatttctgtcattttggccccaagtttccctcattcataactgaattaccccaaaacgtaatctagcatatcttcctccagcctttttaaaagttaactttactgaaacactg

SEQ ID NO: 11744 - DNA, 6000 bp, Homo sapiens; identical to SEQ ID NO: 2523

SEQ ID NO: 11745 - DNA, 6000 bp, Homo sapiens
aaatacaaaaattagccaggtgtggtggaacgtgcctgtaatcccagctacttgggaggctgagacaggagaatcgtttgagccaggggggcggaggttgtagtaagcatgggcgacagcctgcactccgtctccaaaaaaaaaaaaaaaaaaaaaaaaaagatataccacaccacacgctcacacacaccactcacatatatacacatacgccacttgtgtgtatttgtaagaaagtatgtatgtgcaccttcacttgtgcaatcacacaccatacacatcacagccacactcacacatgcacacaccttcactcacacatgcacacatgtactcatatacacatactttcacacaatcacactacacacatcacacgccactcatacattcatgctcacacatgcacatacactcacatacaccatacccacacccacacactaacacacacacacacgccactcatatattcacatatgtgtatatatacacacacacacaccactgacacacagtccttcccttagtcctttaagaccaggctacaccagcagccccacttctcaccacccactctctcctcaactcctcacattgtgttcccaccacagggcacaaacaggccatcccaagaccgctgatgatttcccaacagtctaatctctagccttgagtcctcactccctcaaataccccactgaggagctcagctctcttctccaagtgcaccctgactctcctcctgactcttcttcccgcacctcctggtccccgctgtctgcactccctgggaagctcctccgctccgaccctgaccctccagcgtcacagtgtcactgtgccccactaccatgctagacatctctggccctctcctgaaacctagccctggatttctagctgaatgacggccccagctgaaagtcctcctgggacctgttgctcaaaacgttgacagctggacccctcctcttcccgtccaaaccatttccccttctggacttctctattttgtcagcaatcctgccatccgcccacaccccatctccaaatcgtgctggagacttttttttccctcttcccctcacccttgtcttccaattgctcatcccttgctaagtcctggaggctgtgccttcccaacagctctagcacacagctctcacatgcacggtttaattttcattgcagctaacattactattgcccaagagtgaattcacacccatcactgacctccctcgaatacacatctctgctggtgaaactttccagaaagcttccaaaaacactgctttcaccagccctcctgacccaccccacacctactcaaaaatcatgaatgcctctccagtgctcaagagctccttgggtgagccacttcacctcctacaccctccagccccgcttgcctctccaagtatagctctatcattttcctacaggaaccttccactttctgttctccaaacatccctctcctctctggattcttacgtcctgcccatccttcgaagcctttcctaatttgactccccgagttgactccctggtctgagtgcctgtgactcacaggattctgcaaagctcactggcccttggcatttcttcctatgctgtgtccgagtgtaggtagacatcaacactatcagtggactctggatgcttggactagatgaccatcagggtcatcttcgtcaccagaaattggacgatcttatttcctgaactagaaggcaagaaccattttgtaattacagcttttctattttgagcattcctgtactagatacagaacccaacactctctaggtattagctcacccaatcttcacaaccactgtatggagtagagaatgttaaagattgagaaactgaggctcagggttcacctaacttgcccagtctaaggacttgggagaagctgagccaagaattccattccaggtccatctgacacctgaaggctgagcttcttgcagagatctcttccctcccatgtcctaccctcctgggcacagagcacagtgcctggcacgtggtggatgctggctcaaccagtgtttactggggctgtctcttacctccaagccctcaggcagaaagagtgctcagaggagcagggagattaactcaagacccaagaatgggaaaaaccaaggtggaactggtgatctcatccctccctttaactttctggggtaaaggcacaaggaaaggtccaccagatcctcctaattcagagcccatgctctctgcgccgtcccagccaggccccacccagccccacacccagccaggcctctcctccagaggagcattttcctaccattgttccaccaggctaaccccagaggatgaaaattcctatcccgccaccccgcaacccccgtgtccaccctgactctccaatcaccttatgcttatgctctggctcctgacccagccccgccccagtgccctggtaccaagccttgtcctatcaccatccctcacctggttttggttctgagccggtgggggcacggggtgctgcttctcctgcactcggggcttctccctctgctgggcataggtgaagctgggaggttgaggggagcctgtgccagcagaaagagcttcggggtgccccaatttttgatttggttgtgacccagatccacctggggctccaggactgaacttggaagccacaggagtaaacttaggagtcactggagaaaacttaggggctggagccggagatgaggctgggggccctcggggctgggtgttagccaaagacacaggctgggtctgggactggacatggagttggacctgaggcttgggctggggctggggctgaacatggaactgtgtctggctctgagccggagccggaacctggggcagaggctgggagctggaaggggacttccaaggaggcaggggtgctgtgcccccggctgcaggcttggtactggacttggaactgaatggagtggccactggtgggggcacatatccagatgacacctgcaaggggtgggagagggaagagagatgcagtcaggaggacaccatcctccttagttctatgcccagtctctctggccctgagccctgcttttcctactctccggtcccttacccgggctttgaaaggatcattcttggtcatgtcatccagcagtgaggacagagagtcgatctccaaatcaatactgctcaccttctccctgggctagagggtcagaggtcagagcacctattccatgcctctatccccccacccccaaggcagaggtgcaggggaggtaagaagaaagggccctcttctcctctccttgggggtgtccagtgcagccgcccctcccaggcctccgtacctgtggtgggggcggtatgggggcctcaggccctccctcctcctccggaggaggcggcggggaagggaagatctcctcctccagaggcgcagggggaaatgattcctcgatcgggggagggggcggcgggaaggcacctcccagagcaccctctgcatcgtcgccatccccagcaaggggaggtggaggcaggggaaagtctggggtaggaaggagaaagacgtcggccggggtccctctacccctcacccaagctcccctcagttaaccgctctaacccctaacccaagaactctctcaggggtcccagagcgtgtggggaagcaaaggaggggcgcagggcgccctgggagtaccaggtcaggaaaggccgggcgcactgccgaggagtggtgcagctcccgttacacttcggaaaacggacccggaggggaagattcgtgccccacattcccgactcccactcccaggcgggggacttggaacggtcccaggagccctggctcccagccacgagctccacgatgaggtaagaacatctgctcgggacagggtggctgcgcccagccccctcggcaacaacctttccagacatccccaaattcccgaaacgactgccccccaccccggctcctgccggggtacattccccaagccccgccgcataccttccgggggcggcgggggaatctcgcccacccggcccatctgtgcgcgctgggccccgggtgccgggggaggctcgctgtccccgggccggaagggattcactttgggctttggggccaccacagggccgaacttcttctgcggggcgtaaaaagccggagccgagaccgaaacggagatcgcgggagacgggcggggggccgccatggccgggccgggctgctggggtgggtcgccgggttacgcagcgcggagccgggctcaggagccccaggcggtcccagctccccttggtgacccccactcgccccctcccggcgccccgcgccccctccccgtggggccgccctgccgctccccgcgcctcaccgcaggccggagcgtgcgcgccgcgtctcgggtggccgcctcggcgccgggtccgcagactctgcgtcccggtccggagcagcctccagccgggcggggagggacacacggaaggaggagggagggagaagagagggggcggggagagagcggcgcccagaccatacaaggagcggcccggagagggggcggggagagcggggaagggcggaccaggcaggaaactcccccaggaaggggccctgatcctgcctcaggccggaggctccgccgaggtccgctcgcccccaccccactcactgccgcccccgccgccccagcccggctcagacccccactccctgagcacaggcctctgatgtcatttcctgacctgcctccccctccccgcccgacccgcgggtgcccgagatctgactcaccgtccccctccgggcttagccggcggaggtggggcgggtgccgccgaggtagccacgcagcccctgtgcgcctccggcccggcccagcgacctcctctcgggcctgccgttacccggtcccctcctgccaccacccgctacccggccaccccgagtccgcctggggtggccgaacgtatggagctgggctccagggtgcacggggatggggggtgaggagcggggcgttctccctcccagcaccccccagctgactctgtgcccggagggggtgtgtgagccggaacctccagcattcttggggatacgaacttccaacgctgggcagcctcttaaggcttctaggaattcgcatccccagcgccccagccagcagatcggttgcgagagggaccgttcgggtccgcggggccgggaatggaggtgggagggcggggccgaggcggcggccgcctgcggactggagacccgggaggacggacgcggacgcgggctgctcgtcttttacggcccttcaacgcccaccacgacccactcctcttggagaccccgggcgacggtggggctcttgggcattctgagactgcgcttggtggagaccccgggcgacggtggagctcttgggcattctgagactgcgcttggtggagccccctactggccagactggatttctcagcctgcgactcagccccaggctacacgaaagaagccagacctgggtaattcttctagttctttttttttttttttttaattgcactgggaaacttccccaatctcggccccagttctttctccaaactaaggagtcatggcctttcgcccgctagtccagtatgcacccgtaggcgcttcattttctctcctcttgtcagcttttactgcctcctgaggccttcgtcttgttcacactgagtgtccagtccctccaaatccggctacactctactggcaaggagcacctgggccatgttttagagatcatccgaggactaaccccaaaagtttatgaagagaaagcagaggccgagctgaagagatggacccgggtcacacccaggtaaaggcaggatctaaactgaaactggtgtcagatctggttgccttgcacccctgatatcaggtgaagcaacactgggcaggatagagcagagtgaggtcag

SEQ ID NO: 11746 - DNA, 6000 bp, Homo sapiens
gaggtcaggagatcgagaccatcctggctaacacagtgaaacctcgtctcaactaaaaatagaaaaaattagccgggcgtggtggcgggcgcctgtagtcccagctactccggaggctgaggcaggagaatggcgtgaacccgggaggctcagcttgcagtgagccgagatcgcgccactgcactccagcctgggccacagaaccagactacatctcaaaaaaaaaaaaaaacaaaaaaacaaaaaaactagccaggcatggtggcgggcgcctatcgtcccagctactcgggagactaaggaaggagaatggcctgaaccctggaggcggagcttgcagtgagccgagatcgcaccactgcactccagcctgggcgacagaaccacgtctcaaaaaaaaaaaaaaaaaaaaaaaaaagaaaaaagaaaaaaagaaaagaaaagaaaataggggccgggcacggtggctcacgcctgtaatcccagcacttcgggaggccaaggcgggcggatcactaagtgaggagatcgagaccatccgggctaacacggtgaaaccccgtctctactaaaaatacaaaaaattagccaggcctggtggccagcgcctgtagtcccagctactcgggaggctgaggcaggagaatggtgtgaacccgggaggcggagtttgcagtgagctgagatagtgcctctgcactccggcctgggcgaaagagcgagactctgtctcaaaaaaaaaaaaaaagaaagaaaatatccccctcaccaagttaatacttttatggttgctggtggagcttatattctctaaatgtagaatttttttgggggcgggggggagtatcttctctctgaattctatatcattattggggtataataaaatgtacctacatgctctggtcagtcaaggttcatcaagtcagaaatcacaaatgaattcacaaattctttgctctaaagtcatataacaatgcagatattaaattgcttgtctaactataccattagattcctttttcactccattatcggcacacacacacacttctctcggcatccaggcattcacaggtatccagttcctaaagcgcccagcacgactgctttgtccaggtaagcaacagtgggacataaggagaggctgtggggcccctcttcaaatagcttcgacaaaacgaatggctataagtgaaaagtgtccctgggctttgctataaaaagactcaaacatgggattccaagaattccacctgtttccaattagataccagaattgcttgagtgtttaagctacactcgcttgctacttacacaaaacaattcttccgggttttgtgaacattttaaatatgttaaaataagattaagggtctggtttaaacaatcggaggcagggaaatttcggtggaaaccaaaactctctctctgcagcgataacgcggggcttcagacaaaacaaaaggacaagacagacaaatttctgtctttgacaattataataaaagtcacttttcatagagcaattacattttttaaagttatgtattcaataattttaaataggtcttaagtaatttctacaataactcacgatcctggatcctgtatatttgaataatggttagagttgccttttacataccatttgtgttacaattcgtcagatatacctgtctgtgaaatttacatgtgacaaatgtgtaaactatttgaaatggaagcacgggtaggaatttaacctacctctgtaggattcttcatatgatgaatttctctgcttacgaaatgtatgagttttcccctaacaaacgtgtccttccttcatttcactaaaaacagacgttcctggggcattacagaggagctgaaacaaatgtggattttctacttctagtcttgtgttctctcctaagacacagaaagtgagtacagcctcaggagtggttttgattgtttactgctacaggtagacccagaagggaatcagagagcacaaactactgttccttcacagctcccatataaaccctgatgggtttgtcttaattgtacaaaaacaggagactttttaaatagccattaaaggtttcaggctcagcacagttcaccagactgcatttttaaggttagctcagtggatttaggagagaatcattcctgaaggtattggactatttggccctttcagctttcttaggttggctaactaccgacagaagatacacgaagccgaggatgtagtcaaagggctctctgtggactcaactgtaccaggagttgttgcattaactcaccacttgcacctttaaggaaaaaaagagtttcacataggaaaaaacttaaatcaactgccaatgaccccttcccacatccaacctcaaagacacccatattaaaagaaccaagaaaacaaaagcaggagcagcagtggtgtaatttcttgaactgctcttttataaagggtactagatgggacattttaattaaaataatatacttattatggcaaacagtactggacagccagtaacatacacacttccacaacagggggaaaaaaagccatcagaaaatggactttcagcaaaactgaaattgttttttgattctgaaaaagaaggcaacttttcaagtttacttttgcagaagctgcttaaaggggaaggctggtcaccatgtgggaataatgtcccaaagggaaggcagtcattggcgggccccgtcccaaagagttcaaagctccactaacatacagagtgccatgagctttgtcttagaaagtgtcctcctttcaaatatgtatttaaaagacaaatttatacaacagtgcttttcttatttaaaaagaaaagaaaacctggtttttacaagtctgagataggataaaaaacttgtccaactagtcttagcaataccaaagcactgaaacttccataccacaagcctttgggactaaaaaggaaacggaataaaacacaatcttcagaaattctcttcctgagcacacactcctgtgccaaggcagcagcttcaagacccaggaagccgagggacaagaacccagtgagccagggttgcagaactgcggaacggcccaacctcacctggacccgctgacgtctccaacctggatttctctctgcaaagaccgatcagcctctttacccccaggtggcaacccaatctcagtataaagaggtctggaaaaatgagaaaaatctggaactaatgaattctctcccaaactcgttctattgactcactgactatcggtgggaattaaccagacaccaactccaaaggcctcctcaccgcccagagaaagaaccagattggcctgagacttgaactttgacattccgtattcgactaaagtttgcaaacccataggaaatcatctaaggccaaatcgttagcaaccaccaaaagcaaaggagtaaagaggaatgaagttcaaataagggactttgttttggggtttggttttgatttcttcttaatatccacataaagtgcaagtaaactgacatggaaactttcgatggaaccctggagccctgatcccctgaagaagtagctaatatgggggacaggaaggtttagagttcttaaaatctagtaactctagaaaccaaatccattttccaggcaattttgccaggatgctttaaaaaagacacttcattgatattaagctaggatgtcacatttaggaagacaagagagaaaaataataataatgtttgtccttaaaactccacaacgggttttacagtaagcacaggaattaaattatggtaaaagggagctatttttactaaaacagggtagaccaatttatcaaaaatgccattcggctgtgttcattacatccaggaatctaatttacacaatagacactttggagtaatctattttagtcaataaatacttaaactcctttaagttttaatcttatcggaaatacatatttcgcatagtcttcttcctagttaagcgagaaatttcaggaaatttcataacgactatgactcggctttatcgttcttagtaggcaagagcagaaaacaagcatatacaattaaagttgtcagattccatttaaatatgttttaatccaacccgcttcgtttgatacaagcctgcatctcgagctttgctcccaaaggtattgcggtaggtcactgtcaccagtcctccaggttaggaaagttcagccaagtttatcttcacgcacaccttagcagttgggagtagctgcagttccccaggggccctgaggaaccctcctatcccctcccagagcaccaggccgccctagagcattctaagccgcgggacccgggcaccccccgacatccccggttccctccgcgcctgcaacctcgggacttctggcccacacgccgctcaccttcaacctggctccggctacgcacaacatccacctggcagagtcccggggctgtcccggcgccgcgggcgccgagctggcacgtgcggggcggaccctaagggtgcgccgctcctccgggcggggggtggcaggcaggcactcgccccttgggcacggcggcgactcgggcgcgggccggggagccccggcacggtccccccgcggcgccggggactccgcgcgcggaccaccgcccggcatgccacggtcccaacgggcccccggggctctgctttcgagaacccggcccgagaaggcatctccgagcgcacccgccgcgcgctccatggcgggccctgcagagagggcagaagccccgaggggacgcaaggaagggacccggcgccgcaggtcaccgggggccgccggagcccccaggcgcgcggcgatcgcggctcggaccggcggcggggaggcagcgtacactgcccgggcacccgggggaacagcttggggcctgcctaggggaaagttgcagcctcctcctcccgcgcccgcacccggcggtccgggacaccgggacccagcgacactgcgcgcggggcacccccgccgcccctcgccaagtttccccaaagagcccccgcgggggtccgccacggaggaacaggtccgcgtcaccgacacaggcacacaaaagagcgcggcggccgcgaggtgcgcgggtggccccggggcgctccccgggacgtaaacaaacccgggggtccgcgccgggagccacacgcggggtgccggagcggcggcgcggcccgggccggtgacagccgggggcggcggccggggccggccgggggtagcgagcgcgggcgcctgcccggccacccgcccgcctggccggagccgggccgcgccgccgccgccgccgccggtggccgctctgaccctcccccgagccggcggcaccacagcgccaccagccccagctccgccgcgccggcggcagtggcggcggctcctcctggagaggcaggcgcttcaccccccgcagcaactccccacaaactttccccgggaatacggcgggccgggggcgcggggcgagcgggcgggcgggcgccaccgccgggccgcggccccctcccggcgcccgccgccgcccgccccccgccgcccgctccccgctccccgctcgcgcgcgcaccccgcgggccgccggggccgccccctccccggtcccgcggcggcaacggcggcggcggcgctggcggcggcggcggcgcggggcccgggggggcgcccggggtgggggcagacaccgggggcagtggtggcggcggcggctcccggcgccatcttgggctgatcgatgaattgaacaaagaggatcaatttccgatcaagcgagtgatcaatgggggccggggagcgggagggactcggccccgactcggccccgcggtgcccggcacccccctcctccccgccgccgcgggccccccggcggctgggccagcccggggcccccggcggaggccgcgaccgcccgcagcccccacccccgggcgcgaggccgagcgcggaggagcctgacctgc

SEQ ID NO: 11747 - DNA, 6000 bp, Homo sapiens
ttaatggtaacttgttgaacagcaatagaaaggagatgatgtacttagaagtcagtctctcacaaaaaagacattatatccgagttctgttaaagccccagccagcaaggcccataaaggaatgaagacataggatagattcatggtagtaaactgttccagtttagcacagagtgcgaggcagaaggctaatttaagtaacattgcaatgaggtaccaggctttttttttaatattgtgtgatccatgtcgagggtcaaagccagacttacaccgcccagccattttcacaatcagcaggacaagaaggatagtatcaaatatccagactggaatgaatatgaggaaccagttccaaggtgctttctcatccagtttcaacaccaacatgatcaagaagagtagtgtgaaaagccaggtgagtagtactctctgagccaaggacattctcatttaaacagtttaaagaggctgttgcaggatcggaaaaaaggaaatataccctaagagaaggagaaaaagtcaagattgttttgataccagaaaaaaagtatcacttccattcctaatgaacaaaactggttctttcccaactgacttcctaattttgaaaacattctactattcttcctttcaaatcctctaaaacttagtgatcattgacattatatccaccattccttacagcccatgacaaaatacaatttttattatatctactgtataagctctattcaaaatgtcaggtgattccttttcagtgctatcactcgagtccaggcacttacaactttattcctgcacctcaaagatgttcttaatcttcctatacatttgcaaatctaatttttaattcaatttcaaggggtacaaagaaaaaagcattcaaagtagtgaaaaagtgaaaggtgggtatcaagctgagaagagagagagttttaaaagaagggaatgggaagggtgcgtggctcatgccagtaatcccagtatttggggaggagaaggcaggcatatcatttgagcccaagagctccagaccagccagggcaagagtgaaaccctgcctctacaaaaaataaaaaaattggcaaggcgtggtggtatgcaccttgtagtcgcagctactgagaggctaaagtgggaggattgcttgagtccaggaggtcgaggccgcagtgagtgccccgtgagatcatgccactacactccagcctgggcaaaagagtgagatgctgtctcaatcagtcaatccatcaataaaaggagggaatggttaataaaaatcacaagaatataaagtagaattaatattttagtggctgggtgcagtggctcacacccacagtcccaacactttgggactctaaggcaggtgcatctcttgagcccaggagttcaagactagtctgggcaacatggcgaaaccccgtctctactaaaaatacaaaaaatttaggtgcagtagcacgtgcctgtattccctgctactcgcgaggctgaagtgggagaatcacctgaacccgggaagttgaggctgcagtgagccgttgcacactgcactccaacctgggcgatgggagtgagaccactgtctaaaaaaaaaagattgtaaagaggttgttgggctatataatataaaaggcactgataacactggattttcatataatttgaaacatattcttaaattctcacttattttctcataaaaattcttacaaatatctttcttggtataatagtttttttccttttaacaatagtctcactgattggtggtgtatatatgtatttttttaagctacttgttatccattcaataatcaggaccacctaataaacttttgatgttttgtgattattagatgctaaattttgggggctatttcttatatcactattctgcctcattgatctatatgtttctcttttgcactaatactatatgacttagtgttgctctaggaatgtattaatatctggaaggcctagtatctactcgttgttctcttttctagaattttttttttttttgagacggagtctcactcttgtcactcaggttggagtgcagtggcacgatctcaggtcactgcagcctctgcctctcgggttcaagtgatcctcccacttaagtttcccaagtagctgggattacaagtgtgcgccaccacgcccagctagtttttgtatttttagtagagatggggtttcaccatgttggccaggctgatctcgaactcctgacctcaagtgatccacccacctcagcctcccaaagtgttgggattacaggtttgagccaccacgccggcctcttttctagaatattttctattttgcccttacagtttttcaatgctaaatttgctgattcttgaaaacctagaattttgattatgaatgcataaaacttagcttgggatagcatttattatatttaatcttcacatataggtttatgatatgttcctctacttaagttttttataccaacctttatggccacttggaaaaaggataagtagaatgggaaatcagaagccagactgcatgcagctgggtaaggagttaacagaagaccaagaaatggaaacaattgagaacattttattcctttgaggcatttggagaagagaaaaatgaaagatagggtatatgaaactgaaagaagaaattttcaggaaaggaagaatttatgactataaacagaaataagccaatggggaatgacactgaagatgagagaggatacttgatggaaagagaaaaagatcagaaggtgctagggataggaacaaaagcatgcgtggtaggaggaaagatgcaggaagataacagggaaaaggtgaaggaactggctaattgagccaaataccctagattagcgtgctcaattatattttagaactaactttgatgtactgtgcaacatctctactactttaaatagtgggtggctatcacagtgcaagaggacacatctgttctatttcaacagttaagtattagtctcctaactcacctcttttcccttatacccatctagtggcacttaaacttgtttacttaattggcaaaggcttcatactgcagtaattttgcttctaaggaggcatttttctgtgttggtttcctttcccggccagaggctgccatagagtgggatgtgggactgaatttggaagcagggttggaggggtgtgtgttgattaataaccatggatggatttcatcccgtaaattgcacaatccccacctccaatctatcaggccgtttttgtgaacctctgaaaaacggtttatgattatacacttgcttaaacctaactgttccatctgctatcggataagacaagcttcatttttttcttacatttggctgtacttaccacaggtgctttagggctggaggtgaaaggatgcaagtaacaatcttattgtgcctacaagatttataatgtgggatgcaacaaaattctgttatgttcttgcacggaaataccctcaatggggaagcactgctgatacttaaatgacgattgaaggattgtacgcctgtatgctgagctacaacgatgacatacgatcccagttttacatttacgtcttcatcaatttgagcagtcgttatgtttcctactattctctccacaagaaagggggaggtgcgtactccaaaaatgtgctcaactaaaatgtttcccatttaaggtggttatttctggcactaggaagacagttaaatatttgttaatgattccttactcatttttaaaaccttcggagttacccctgtatggacatatatagagccccacccacatagcccacggctgggtatcagcccccatttcccttctctcgccactgccagtagtctaccaagtgaacctgcctcatcccaaagataattttgcttcatgagcccacatatttattcttcttcataatgagtcgcttttgaaaagcccgtgcagcaacagccttggccaaaggaacagcgttctgcttacaacttagctcatctgggggcctatttgcccctggaacttcaggacgctcctaaactatacttgcccttctgcaaacaccgacagtcggctcgcggcgccccaccgggacgctcccctttcatgggctgtaagcccagcacatgctggagtttaacacggttcctgctggatgcgcacagaagccctggagccaagcaggcgtgtgcgcgtttggggctggctgtgtgatgggttgagggtcggccgcacagcccacggaagcatcaggagaccagcgccggcgtacggtgcgggctagggcagagccccagactcacctggcagcgctgccggccggaaagcggagagggacgcgaagatcagcaaattcgccagtttggatccttgtccttttccgcccttttccccccattaaatccagaacccgtcacatgataattaagaaaaaacttcagttccgcctcctcaaacgactgcggtagaggatctctcagttctacctcagtgccgcgcccacatccggggctggttctcaccgcccctgagcctaccctataggtagagaggacgccaatctggattcagaggtcccttttccgcggtaattggaccatttgtccgccagtgcaaaccaaccgacctttccttactttcgggttcgacagaaaggcggcaataaaaagacccattggtcccgcctctctactgtcacgggttagtagggaagtcagtccaagatcagcctggagtttccgtgctcccattgggcccacagatgttaatcagagcagccggcgctcagctccgccctctcgggacgccccgcccctcctcccatcctccctgcccgcgcgcagtgactgcaggctccggcgcaaaatcctgcgggagagggggtggggcaaccctctggaggcagcgcgcccgcgggcagcctcgttgtggctccttgggctctgttggcggcggcgctagcttcggagtctcccgcgcgcacctcagccgcctcctagcggcgcggcgctcgctcctacggtaagagcggcatcacctccgcgctcgggtgggcagtgtggaggtcgtcgagttctgacagaatttcgaggatggatcgggacgagggaggagagcggtcgtcgggatggaggtgggggctccggggccaacgcgtcgccctccgtcgccggcgactttcccggcagtctcccgtacctgagggccggggtcagccgcgaccccttctcatcagtcggccggtggcggaggctcagccgccttcctcccgagctcgcgcggtcctcaagtcttgatggtgacgggccgaagcccagcgcgccacccgcccctcgggccccgcttccaggcccctgtcctttgcttccttcccttggcgctgtgctgaggggtcgtcgggtcctggaagggcgttcaggggtctcgggtggctagcccggctggcggggagatgtcagctagcggccggaggagcgggctcgggagggggcggcggctcgcgcgctggaggaggtggaaggagggtcgctgccctgccccctctgagcaggcggcagtcgagttttctgatcccaacacggcggagtgggtgcttaaggcatgggccttaagggatagttcccgtctggaaacaataccgtgctccatcagcatgcttcagcttttcttatttttatctgcccagtgttgacagccagcattctggtattgtccttcgagtcatggctttctaactcagcacctccttgtgtaacttcagggatcattctgtcactaatctgtcacccttcttatttttagcgtggcgaaaacaaggaactgccttatactaacctgggcagtgcagaatctggaacaatttattaatctcagtgtgtactttacatgccaagtaattttgaaattcatggtgaatattaaatattttgtagttttcggttgctttctttgttaatagtatatcctcctt

SEQ ID NO: 11748 - DNA, 6000 bp, Homo sapiens
ccacttcatctggggaagaaaaaggccaggcttcagaccccctttctctgggagctaccaagcaacacattcttctaaatatggggtcccaaattctccagggaataaagggacaccagggctatcctggagtgtggctcgttgtgggcaggaacctttgggttctgaccaggctgctggcccagagagctccactgcctactacctgcgtgatcacaccgcagctgggcgaggaaggggagggtgagctgagcgggaggccagtaggagcctcagcatccctacccctcctcatattctctctctccttgtttttttttttttttatttttattttttgagatggagtctcactctgtcacccaggctggagtgcaatggcgtggtctcggctcactgcaacctctgcctcctgagttcaaaagattctcttgcctcagcctttcaggtagctgagactatgggcacatgccactacacctggctaatttttgtatttgtattttttgttttttatgctgagatggagtctcactcccaacacgcaggctggagtgcagtggcacgatcttggctcattgcaacttccacctccagggttcaagcgattctccttcctcagcctcccgggtagccaggattacaggcgcgcaccaccatgcccggctaatttttgtgtttttagtagagacagggtttcaccatgtcgaccaggctggccttgaactcctgacctcaggtgatccacctgcctcggcctcccaaagtgctaggattacaagcatgagccaccacacccagcctaatttttgtatatttagtagagactgggtttcactatgtcagccaggctggtctcaaacttctgacttcatgatctgcccgcctcagccttccaaagtgctgggattacagatgtgagctgtcgcacctggccttttttttttttgagaaggaatctcactctgtcacccaggcaggagtgcagtggcgcaatctcggctcactgcaagctctgcctcccgggttccagtgattctcctgcctcagccttctgaatagctgggattacaggcacccgccaccacgcccagctcatttttgtacttttttttagtagagacgggttttcgccatgttggccaggctggtctcaaactcctgacctcaagtgatcctcctgcctgggcctcccaaaatgttgggattacaggcgtgaggcaccgtgcctggcctctctctctccccgttctccccatcccctgaggcaagtcaccaacccctccacaagctgttttcctcatctgtacaagaaggataaccagggaccttccctttgttaaatggaatcacagaagtagaccgggcacagtggctcatgcctgtaatcccagcactttgggaggttgaggcaggcggatcacctgaggttgggagttcgagactagcctggccaccatggtgaaaccctgtctctactaaaaatacaaaatgagctgggcgtggtggcgcatgcctgtaatcccagctactcgggaggctgaggcagaagaatcacttgaacccgggaggtggaggctgcagtgagccaagattggaccactgcactccggcccgggcaacagagcgaaactctgtctcaaaaaaaaaagtccctggcccggtgcccaggcacagcatgtgtgcaacagatgccagacacgtttttgcttcccttgcttctggtagtaccatcagcacagtgcaacttacacaaccagccactcagacgcctgacaaaaccacatagaggtgggcttggatcagcccagctcctccagaagcctctcccagctcaagacccctagctgcagaggctgcgcatcgcccacctgcggctgtcttcctcctcacctaaagccccgttgaggttctgaaagatccgagacttatgatccagattaaggctgagtttctcctaaatggaatgagatgcgatggagtggttaaaatggaaggagtggaaaggacatcatttctcacttttctctctctttttttcttctcttgcttttgttgcttaggctggagtgcaatggcacgatctcagctcactgcaacctctgcctcccggtttaattgattctcttgcttcagccttccaagtaactgggactacaggagagtgtcaccacgcctggctaatttttgtatttttagtagagacggggtttcaccatgttggccaggctggtctcaaactcccaatctcaggtgatccacccgcctcagcctcccaaagtgctgggattataggcatgagccaccatggttttcctttttttgtgagagacagagtctcattctgtcacccaggctggaatgcagtggtgcaaaacatcctcaaactcctgggctcaagtgatggtcccacctcagcctcccaagtagctgggattacaggcgtacaccatgaagcctggctaattttttctttctttttttttgtagagatgaggtctcaactatgttgtccaggctggtcttaaattcctggactcaagcaatcctcctgcctaagcctcccaaaagtcttggatgacaggcgtgagccaccacgcccaggcacacatttttctctttgcaaccccctttgctccccaaatcccattcagcctgaggcctccactcccacagagctgcgggatgcgcccactcctctgccttccctaccctcagtcctgggtccaggtagagccgtgtgtagaacagctggtcgtcgtcatcatccttgtacttccactggcgcacgatttggtggatggtggtggcaaaaccgatgaatcctggcggggagggggagtgttgacctcgagactcccagggtcccagggcctgtcccccaggctgtctccagccctcaggcgcctttaacactctgtgtcccaccgctcttggcccctctgccttgggcactctgccactcaccaccagaattgaggaagcgcttccccgtgcccacctcagggtactgctccgccagcccccactcgggccagcagaagctctctgcagagaagagcaggcggctgccactctggacgaacttcttcagcagctctgtggggctgccggccagaatcacgtcgtagctgggtgaggaaggggaggatgggcaggggtccactgggaacctcagcatccttaccccgctccctatccccagccccgttacctatccacaaacatgatgatcatatcctcccggtcagcgtatttctccatttccttctttaaccaccggaccttctgtcctccaccaactgttcgagccacatcaccccctcgccactcctctcccaggcccagggtctgtggagaagattgccccgtgccaggcaaggggtggggagttgtggggggaactcctgaccaggcttaccgtggggacctgggcatccagacttcagcccacccctcctgctgggaccccctcccaggggcctttccctctcctcacccgcacagtgtagttgaagaactccgcagagcgcaggaaacgcaggtacccctcggtttcagctgtggccacagtgatcaccagcagcttctctgttaccagagggaaatggcacttgagatccaccgcccagctccgggcctcacgtgctttgctgtcctccctctcactcgacttccctccctttcttccttcccattcttaaactcttctcacccaggaacactctgaccccaaggagggcagggtgggagtggtgcccaggaattccgagtccctttgcatagggaggctggaaaccccagttcagggtagtgatgggcgaggggcttggcgcgactcagcctcaagagcacgctgggcgggggacgggccagacacctcctcgagcctccgaccctctccgggccaggctggcaggcacgccagcctctgccccctcggccgtgccgggcctccccgggatctcacctgggttgaccgggtctcggccccggggccggtcggaggctgaggccgcagggggcagcagcagcggcagcagcagcaggaaccggggtccaggccccgaggaggtcatggtggggagcgggcccagacagcacccaggatcctgggatctccgctacgcgcctggatcccagctccggaggggagctctggaaagggggcgctcgggctgctgtgcggccgccgcggggagcagcttggctggggctacgccctgaaaaaaaggcgtatccggaggctacagaaagctccagatgccggcgccacagacaaggcgaggattgtcccgggcgcacgggaggcgggggaggggcggcggctcgggccggcgggcgggagacagggactctgggctgagccagccgcttgacacatgtggaagctgaaacctggacaggggaagtgacccctggcggagggtcgggcgggacgcgggggcgggtcctggccgcagccctgcccagagagtgcgggcggaagacggggagagcgagaggctggcggcgacagggagggaggaagcctaggagtccgccgcgggacggaggcctgggggaactgggagttcagctttctgcagagggccactaggaacctcggattgcccacggaagccagccactttctttgacagtccagcccacctcctcttctgcccggagaagctccaggggctgcctttgtgatcacagcatcttcacaaggaccaaaggaaaataagatttcttgtaagaacaccgtgaccacatctttaaaatgacccatttcgtggctcccacaagatttacacctccacactgaggccggaagtggttttgcccctataaaacatggcgaaaagctttcttgtctccaaggaaacgccacgtaatgagtcaaagctgtggcgcacgcgcagaagtacaagctaccggaagtgatggcgcccctactaaagccttggggttagtacgcgtgcgcagcagtttcttccgacagttgtgttgtgccaatggtggagaagaaaacttcgggtatgtgagcccccgcggttcgcccccttccccttcccaagtcagtcctagaattttcttacctagtcattcctcttttttggtctcgctctttcgcctaggctggagtgcagtggcatagtcatagctcactgcagcctcgatttcctgggatcaaaccatcctcccacctcagcctccggagtggctggaactgcaagcatgaggccccacgcctggttaatttttaatttgttatgtggtgacgggctctcgctatgttgcccaggttggtctccaactcttggcctcaaagcgatcctcctgcgtgggccttccaaagtgctgggattacaggcgtgagctgccgcgcccggccccagctattcctcgtaaatcccttcctcagccctcgggtcctggcgttgacccttcattcacgttttattggtgcctgctccaagccgggcgctggggatgaagaggagaaagacccctcttatccaagcattggctttttctggaaggggggcagaaacgcagacctaacactgtattttactgtgatttgtgatttgtgctatggcagagggaagcacagcgcctgggaacagggagacgtggcatctagcccaggttctgggaggcaggggactgtgaaagcttgaaggaaaaatgaaaaagcttgaattgagtcttgaaagtctagttagggtttctctcagtgggaacctcacgtgcaaaggcagtgaagcaagaaaaagcaagtcgcttaggaagccaagttcacagtttggatcttacagagtaataagaaaggatcgaaggctggggaaaggttacattttgaaaggcattatacacactgcccaggagtttgaactctgtagggaaacactggagagccagcaaagactttttttttttagacagagtcttgctctgtcacccaggctggaatgcagtggttctatataactcactgcagcctcaacctcc

SEQ ID NO: 11749 - DNA, 6000 bp, Homo sapiens
ataggtgttactgaaatttaggatttatgggtgaaatatgttaatggaaagaaaagctgtttaaaataggcccctaatagacagaaaacagaagtaataccagatgttaaaaagatacccctcaatatagaaatccacaaatatgtggatgaaagaaaaattaagagaattgaaagctaaaaatagatacccagaagggagctcatggtaaccatgtaccaaatctcctaatgatacagtagatacaagtaaagctgccttgagagagattatgaaacaaacaaaatagagtacttttaagaaaacctaaattgtctacatctgctataatgtatgctccaagaggggaagaaggtctttgttttgtttgctaactcttctccagtgtctgaacaataccagacacatggcaggttccatgaattaactaatctatacatcagctgatgtatcattagtatcattctggtaacaaccaacaacaaaaagtaaaggctcatactcttgattattcttaaaatgtagtggaatgaaagaaggaaactgctactttggctgcttttaagtctgagaaccacatttccttctgatttgccaagtgcttctcagaattaagagtcctgtcagccagacaaatgaaaaaagccattccaagcaaagggaaggtttagcagtggcaaatgccatggcatattttgagaaacaaggggaatactgatttcagtgtgtctaaatcatagcacatgtatattggacagaaatggtaaagaatgacagatgtggttccaaaggttggagcgcagtttgaaaagaggtttgtaagacatttgaaatgtttaaccatatctcatttaacccaagaaattgcactatcagctttatgttacagaacaataatcctggcagctgtatagaggatgatggaaaaaggattagtcacacagcaatgtgctgaagttgcctcttattggctcttgagcacagactgttacattttcaggaattctgtgagccagttgacctttcacacagatatcttaaaatctacgatggtgagagtatttacaccatggtaatcagcaaacactacaaaaatcagggctttttctattttcccacaaagccaattaaccaatacacccaagaaatagaaccacagaggccagtaaagtactatgttaacagcctaagacataatgaaggcccgactaagacctgaataagtggcactaagaatgtcaaagtgacaaatttgacaaatattcacactgcacaggatgtaggacttagtgacaagctgaaaatgggtgattaggtagaacaaacaaggattcccaaatttctggattaagcaactgatacaggaaatttagttttacactaacttagaccactagacactgaatataccaagatgaacataaacttctgcctccaaggaattcataatttacaaggggaacaagcacacatttacctaacaacatagtaaacacagataacagaaactaccagaggaaaagattaggagagaagaacagaaaaagtgaattcatttcattttttcatatgtaaaccttgtactatttgttcatatgtaggttttcatgtgtattatagaactagcactgcttgtttactatcaaaatagaaatgtccatacaggttatggaatggcatatcataaaaaaattaagatagaaatgtccagtaggcagttaaaaatatagttttataattcagaagacaggtaaggagcatactgaaaccacagacaagaccagatgatttaggaaaaaaaagttttagaatgcacaaaaaggcaggaaaatgaggaagataggaaagtggggggtggacagagaaaatgaaagcaatcaaagagactaaagagtgctcagggagaaagagaaacaaaaaagaatggcaaaagccaaaagaagggataaagaaagtaagtattagtattgtcatagagcttacaaagatcaaacacaacgggatgtggcatttgagggctgacagcctttaaagagatgaattatataatgcttctcttttatagtttcctcattcccatagagggcatatcagaaacacctcaccaattttcatactatgcatctgtgctcaccaagcctatcaatccgatactctgtcattggccaaatccccgatatagtgaatcaaagtttctgctggaaatgcttaattcctcaggaatgttgggggtggaggggcaacagagaccgcttaattcagaacaaactgaactgacaagtatctacaggaacctggaaaagagcacctagagaattaagaatttttaaaaagcacggcacccataaaccgcatgaggaaagtatttcaagaaaggaatcaaatgttattacaagttaaaggaccaaaaaagtgtccatttgtcgtatgtgcaagaaagtcattgaaaaccttgcaaagttacttcaatggcatagattgagggtgactgagtccccaggaaacaggaagaaaaaatccagagcaaagtaggaggcactatccttagaacggagcagagactcggccgggcgtggtggctcacgcctgtaatcccagcactctgggaggccaaggcaggcagatcacgaggtcaggagatcgagaccatcctggctaacacggtgaaaccccgtctctactaaaaatacaaaaaattagctaggcatagtgatgggcgcttgtagtcccagcttctcaggaggctgagccaggagaatggcgtgaaccccggaggcagagcttgcagtgagccgagactgcgccactgcactccagcctgggcaacagcgcgagactccgtctcaaaaaaaaaaaagaaagaaagaaagaaaggagcagaggctccacttccgttgcaattgaaaaggcaagggaaaaaaggtgcaacagatggttatacgttgaggttaaattcataggtttgatgggcaagaaatggagaaagttcacatctgatggatcctctttttctccccagggaagcttaaagtcatttgttgagcttgaagcgaaaggtttgaaaagggtaaagaagatttaaacaatcactgtggagaatggcagagaaccaaggaggaaaatacagaaggcagaactgaagagtatttaccgtccaagaactgattacaattcctgaaatacatcctactgaaacatatatccaatgttccactgttcacctggggaagtcctgtctacagtttaaaacgtctccacctagaaagccttttctgacatttcctaaccagtttccaacccccagttatcattctcctctgtattaatgctctactttatatgcaatcctactgctatcttacatcactatattacagcacctacctttatagtctacaagattatttcctctactagatggtgaactacttgagggcaaaaattgcacgtgtatcaggagcaactgcaaatatatcagggtctctgccttgtatctaaagtttaaattcagtttagccaagttttagacagagacccggtcctagagtttccaacatgaaatagttcagaaaacatcattgcttttgacaaaagtacataaattatcatgaaaaggcacgtaattcaggatgacaataaaatatttaacagtcagagaaaataaacaataatttggaactttatttcatttattacccacttcggtcttcaaatgtgtgcatgtgcttctaactgcgatgatgaatttaaaaaacattctgcacctactgtatgcaagatactgctattcacactgtgggatattaaaaaaagtttgcaatacagaagagattaaaacaagtatacaaatgattttagtacaaggtagaatgcgatggccactagagaaaaaattaagaacaggtgagaagggctttatttttatgcttataaatgtgaactttattctgaaggataagagattcgggacatggtaactggattgacacaactgaatatgcttttcaagtatattatatctaacttttcttattttgggcaacttctctccaaactgactagcaataaaatctgactgctagattctgtacaaatggttaatcccaacctgaacaaatgtctcaaaccctcccccacgtgtcactgtagataactgcctcataaaggaggaaaaaaaaaaccagcctgtaagaggggtcacctgtacagtccatttgttaaaggagtaagcgtttccagctctactttaaaacaaggccctatttcattatgcgtctgccgtctgttctagagcttacacttttgaagagctcgaacgctacaccccttcgtcaagaactgcggcagcagccggtggctgccaacgcggtccacagggtttgggctcccgaaacttcagggaagctggaggcatggggggggggggggtcgagttgaaatgaggaacacacagaaaccaagtgtccccaagactccagaaaagagggagccagtcccagagtaaataggttggctagaacagtacccaagccagggggccgggcggaggggagtggtcacgtccagactggaaaactttctgcaaagcaacgggttgggtccacctcgctgtccaggtgcggagcagcgcagacccccaaccccacgacctggtcagaccccgtctccttaccgtcctgcagaagttcccggactgtagctgcagccgctccagagcctcgagctccgaggccagctacagcgacgctgccgccgccaccttccatgttggcaggtgccgggttgatgtcgtcagcagcagaacggctccgcccaggtggtgacgcagaatcccggcgccgcccgcccacccagcccatggctccaggcccacctggcgaactgactctcagcccgcgcctgggctaagcctggctaggagccgcgcaggtactcgagcagtgggcgcccagggtccgagtgctctgcgcccagcgcaccgagggagccaaggccgtcgggccggcgctttcagctgtctctcgcagcagctcagggccgcgccccctgggctggcgtcgtgccctagccaaggagaaggtgggcaccggaacgtggccgcagcgcttatctgtgaagcaagtattaaacctcagaacaggggccgcgcggcgtaaggcaggagagcagagcggaggtttcagggagcttcgtttgccctccacactcacaagagtcacgcgttagttgctacacagctttatctgttccacgccttgattggcactcctggggtaataaaagcccgcaggaaatgcttgggaagaaaagttgctggggatgaacagtgaagagaattagggagagtcgatgaagaaggaagtctgaaccataaaaggaccaataaaactcactgtctctaccctccttccttcccatgagacctttgaccttttgccttttctacttcttcctcagtttcagtcacgtgccagactttttcttaattacaaactgatagatggtccacatctcaactaacagtattgacgctgtaagagcatcaggttggttcccattgtatcttctttactaatacgttcgcgtttttgacctagatttctttcttctaagataaatactgataaattaacagggtcaggcaaccacaagtatgcaagacagtcttaagcttcttcgcaaaaagaagctggaagatgactttttcattttgtacagtaggtatgtatccaggaaaccaattttatccagttccagagctacgtggttttctacattctgtttcaaaaaggtgctattacttatcctgtgcttatcgctgttctaagtattttataactcaatgcatttcatactcataacacctcaggtaagcaagtcttatgctacactgcattatgctctctttgtctcagaggattttccctagtatgtaagatcttagtcatgatgggaataggggtgattcattcattacttgtgaattaggaattgtttttc

SEQ ID NO: 11750 - DNA, 6000 bp, Homo sapiens
tactttcccttgcagttttctggttatgattgaagactagactctgggggtataatcatgaaaaaaaatactgtcccaactcaccaagcttagtctattggaaaaaatacaaattaatcaaataatcacattaacaaacataaaactgcaaatgtgacaagtattacagaaaggaaagcaactctgtgatgagagaatctaaaaaagggagacctaatagaggaaaagacaactaggttgagaccagaagaatgaggagctggtttggtagctaaacatacacaaaggccctaaaagtaagagaaagagaaaggaggagatgagagttgagcattaggcagtgctagaccatacagagcctcataagccattttgaggaagtttttaaacgggtgacaagaatttttcagagaaaaaggaaagatgccattgaaaaagaagtcaacaatacactgagaaaacaaataaaagtaaaaagttcctgagacaaaagagggatggagagttcagcctccgataagaggcaaaatatagttgtaataaaatcaaagtggtagaacgcagtgagccagactgtccgtgttcaaatcccagctcctccacctacttgctgtatgactttggtcctatagtcagagaacttagtctctctgtgtttcgtttctctcacctataaaatggtaataataataatagcagttcttcacagagctgctgccaaattttatatacagggcagagaagagtaccttggcttacttagcatcttaatgacttgttttccattattgttatcattaataaaagtataggctcagaaatcagaccatgtgtaaatcctggcttggccactgtctagcagtgagtccaagaagaaattatatatcctctctgcttctcagttttgtcatctataaaacaaatatacctgaaagggtttttgtggagcttcagtgagatgatctttgtaaagcactaagtactggcataaagtaagtgtttgataattattactgtgataggaagaaagagaataggattactatataaatacaagtaggtttgcatatttgaaattgagaaaatgaggaagttttctttgaatgttttaataattgtctcctaaatcaacgtttttaatcattgtctcctaaacaggagaaaaaatcatctgctttgatggagaggtagaaagattcagaagtttagaaaagtgaaggtttgaattagtcactgtaatgagtggaaaagtaggcccaatcacaagaacataataggactgtggagcagtgttcaaatatcattaaggtaggcaatcataaaatcaggaagaaactaatctggtgcagaaggagacaataactggctgcctccaagggtgacttctgccagctgaacacaatgaaaagatgcggggtcgaggaaatttaaagtacagtattgccaagagtgtaacagaaacgacatgccatggacccaaagcggaaagaggaaagtgaagaatgaaggctgatggatcaggagaaagtaaatggaatgcaagatccaatgaggtcaaagaatagttataatttaaggagttgcacaagcaaaccaggagacggtatggtctacgaataggatatctaaattaatattgtggaagtgaaacagttaagagtgacaagtccaaagcgagactgtgaagtaaatggcttaactggcacagggaagctcattagagagaagacgggcaaataattgagtagctatggtgtcatgtgggtcattcaagtggacagtgaaatcacagaagatgtatagagcaggttagaaaaccccacagatgcatggtaaagaaaaatgagggttaattaatatcaattttaatgacaataagtgaatagaaaactcagaacagtggcttttaaaccatagttgccagaactacaggtttcctcaatggtgtctcaaagacgaccccaggacatgggaaaagctaaaaggataggtatctataagacaccatctcttaaaccagagcagtttccattttgtttcctatactgaggatatgtatatgattacaatgtttttaaatgttctgccacttttttaaaaaagtttaaaaagcacttctctagttgtttttttttttttcctctaattatttggaagacttaccttctcatatgcattttctagaaattcaattggacttttcccaaatgctatggcatgcccaaggaatggaattggggagaaaatgtatggaggacttttctacaagagaaaaaaatagtaaattcaattcgtgtttcatttcaagagagaaacccagtttcgtttcatgaccaaacaattaaacaaaatagctattaagacttcaaaaaaaagttaccaaaaaaaaaggaagcatcagaagtaacttgagaacagccaaattgcaaatacctcaagagagtagctattgtagaaaagaacagaaactcaaaacacggtataagataaacgaccagataaacactaaggcactgtaaatttaaatgatggacactgtccagaatatgtccaattattattggtgtctccaggcaacttttctaaccattagtagcaaaaaaccaaaaaggtcaaactacacttgtcccttggcatttgtggagaactggtcccaggaccccctcacagatttgtatccagggatcctcaagtcccttatataaaatggcaaagtatttgcgtataacctatgcacatcctctcatataccttaaaccatttctatattacttacaatacccaatacaatgtaaaggctatataaactgttattaaactgtgtttttttatttgtattattttttattgttgtgttattttgtattgggtttttttcccctgggtattttagatctacacttggctgaattcccaaatgtggaattcgtgtccccagagggcccactatattgtttcttcactacttactactactactactcacaattttagtcccagatacttgcttaaagaaggtatagaaaaagacaagcagtaacttgtagtatagaaagaagggaaatgtttaagaagctatatttacttctcagtaaacaatcaatctcatgcttctctcactgcaagtgaactagagccactgattttagagtttttaagagagtagatcagctctagcaagaactctagcattcttcataaaagtttctttagatgccacaaaatgagacctgcagattacaacattaagtatcctgaaaatcaaacaaaataatgaaaaagggtaatactcctcaattctctggtggtctcaaatagaaaggagcaccacaacctcacagtacacctcagctaatagaactatctttaaacactaaaagtaactttgtcttcccagagacaaatatcatttccttaaagatcccatgtgtaggaaaaaaataaataaataaataactctttcttatgcctggtatggttcaaacaaaaattattttaaaagctacttggtcaaaagtttgtacattgcattgtcagtaaaagggtagttttcaaaagctacttattgctgactgtaaaaggcacaatcaaataacatttgggagattgaaagctaggttaataaggctgttaaattgaagaaaatgattttttttttttttgagacggagtctcattctgtcgcccagactggagtccagtggcgcaatctcggtttactgcaacctccgcctcctaggttcaagtgattctcgggcctcagcttcccaagcagctgggactacaggcgtgtgccaccacatccagctaatttttgttttgttttgttgtattttagtagagatggggtttctccatgttgttcaggctggtctggaactcctgacctcaggtgatccgcccgcttcggcctcccgaagtgctgggattacaggcgtgagccactgctcccggccgagaaactgttacattattagcatcagaggaaggcccttaccacactccagtcactaccattaccacactctacacatcctccttaatatgggtataaaccaccattaggggcactgctacagcccacagaacactgaaccacacagggcagcctccaggatgacgggccagctgccaacagcatctccgtcaggacccccaccaagggccccaacgaccaccgggtcgttcaaacccacagccgccaatccagccaccgccactaggggcaccactgctgcggtcagtacagaccgctacaaccacaaatgccgcaaccacgaccccgtctaggatcagatacacagccggggaggccagcaccgccccccaacacaaggcaatggcgggtgctacagccagcgccaccagcagcagtgccgccgccgcagccactactccagcccccagcgcgcctgccaccaaagccacgccaagcatggccgcagtcgcccccgcccttgccatccactgagccggtcggggccacggagccgcccacgccagcccttcggccgcctcagctgcggcgcgcgccccactcagaccctaaagaatgtacgtaccacccctgcgggcagctggaccaggtggccggcggccagacggatcaggtagaccaggctgagggtgaaggcgcaggcgatcagcagcatggacaagaggttgccgcctgtcaccttctccatcgcctggcccagcaccgacccacccgcctgcagcaagcccagcagcagcatcccagccgccgccgccattcactccgtcggaaacactgaaggccgaggtcgccaccgctcctcccaatcgacggaacgagagaagctggcagatggtcgtccacagggggccttgccccaggtctcctactaaacccagccccacccctcgggtcccacgcgcgccaccccgtgcgtcacagaatggggcgggatgttccgctggccacgccccttaaataacactctgtgaagccgtggtcttcttgcgcgggatagggcacctgaggaagcgggctgcgcctgtggcacagtggtacggggccggaagataacttacctgaagaggcgatcaatccctgagaatcgcgggcgacccgttttttgtgtgcccgggtgcggggtgccgggacacggcgttgaaggcgctgagcggagggatctcagggcgagctcgagcggcgacggcgcgctctgtgattgcaccgcgagcgcctgaggtgatctcggcctacatcgcgtcagcggggccttgggcgtgagcaccgccccctgtccggacgcagggtactggggcacctcgaactgtggcacctcacccttctccggggccacgtcttggggactccgacagccccaaataagccctcggggactggggttgtgaaaagcgaggtcgtgaagacgccggcctcataccgaagggtaggacggtgaggtcagccccgtcccactccaactaaaatcaacctgacaggtattaatatgccaccatgaagttaacaaatgttggtgattaagtatgctaggttttacgaaaacagattttccaaaataaatgtacatgttttaggacgtcgcgagccgtttgaggcagcattccccaaggacgccacttagtctgtaggtttagcggctagaaagattcagaagctgagttcagtcctgccgccacaatcaatcttcgctcctatggcttcacagaagcgtctcccatgactaccaaatttaactccttccagatcacccacgggagcacctgaccggattcatttatttaatcaatgttaagaactaggttttgtgctaagctaggggatagagcagcgaatgagacaaaactgcaaggccctgggggaattagtaggaatatccagtgaaagggaaattaatgaattttataagtatactaatcaagaagtatattcttttcctttgaggtagaatgtaatatagcacctcccctacccaaggcctgggttaagagtatattaactgcttattt

SEQ ID NO: 11751 - DNA, 6000 bp, Homo sapiens
aggcctcgggtcctgtatggcggtaggcaggggctccaagggtcctgactgggaggctaacctagacttgctgcgtccacagttaactcctctgcatgtgaatcccctaagtactcgccattctggtcacccccacacagaggcccttcagcctgtggctggcaaagtccattgagtacctcgagaggaccaggggtccccttcctcctgcgcccccatgcgacctcagccctaggaagcactggctgatacaaagtgccctcattctgccctgggggtccctgcagacagctctgggggaccatgaaacgggagtcacggagctgggttgtagactgccctggctgccctgtggcctcaaacaaacacccccctccctgaggatgggacagtcctatgtgaaaatggctggacatacaggactttgaggcacacttcctgctgctccactctgaggcctcatacccccctttctgtttcccatcaatcagggacgccttagtctacacttagccttgggaccaaagctctggatgtgtaaagcggccatgggatcagggctcactctgtaccaggatggaagctcgtgtgtggccagagctcagtgtgtgaccaggatcagggctcagcgtgtgaccaagctcagtgtacgaccaggatcagggctcggcgtgtgaccaggctcagtatacgaccaggatcagggctcagcgtgtgaccagagctcagtgtgtgaccaggatcagggctcagcatgtgaccaagctcagtgtacgaccaggatcagggctcagcatgtcaccaagctcagtgtatgaccaggatcagggctcagcatgtgaccaagctcagtgtgtgaccaggatcagggctcagtatgtgaccaagctcagtgtgtgagcaggatcagggctcagcgtgtgaccaagctcagtgtacgaccaggatcagggctcagcatgtcaccaagctcagtgtatgaccaggatcagggctcagcatgtgactaagctcagtgtgtgaccaggatcagggctcagtatgtgaccaagctcagtgtacgaccaggatcagggctcagcatgtgactaagctcagtgtgtgaccaggatcagggctcagcatgtgactgagttcagtgtgtgaccaggatcagggttcagcgtgtgaccagagctcagtgtgtgaccaggatcagggctcagcatgtcaccaaactcagtgtatgacaaggatcagggctcagcatgtgaccaagctcagtgtgtgaccaggatcagggctcagcgtgtgacccagctcagtgtgtgaccaggatcagggttcagcgtgtgaccaagctcagtgtacgaccaggatcagggctcagcatgtgactaagctcagtgtgtgaccaggatcagggctcagcgtgtgaccaagctcagtgtgtgaccaggatcaaggctcagcgtgtgaccaagctcagtgtacgaccaggatcagggctcagcatgtgactaagctcagtgtgtgaccaggatcagggctcagcgtgtgaccaagctcagtgtgtgaccaggatcagggttcagcatgtgactaagctcagtgtacgaccaggatcagggttcagcgtgtgaccaagctcagtgtgtgaccaggatcagggttcagcgtgtgaccaaactcagtgtgtgaccaggatcagggctcagcgtgtgaccaaactcagtgtgtgaccaggatcagggttcagcatgtgaccaagctcagtgtgtgaccaggatcaaggttcagcgtgtgaccaaggtcagtggtcattgattccaatgtcgggggcagggtcacagctgagtggctgtggccagggatcattttgtggctatggagaacactgagaagataccatgggttacaatccctctgggctgcgcgaggaggttctagggcccagcatccagctgggtgtggtccccagcagggaccgtcaattccagcctcccagtgctgggcccaccctgggttcttcaggctgtggacaggaccctgaaaggaagccgatctgggcgtgagacatgcagtggcaggcagggaggggggtgagcaggtgaggggaagggagttcagggtgcacactgaggcaagcctcctgaaagccagtcgccggtttaggttctagaatcccggagtgtctaggctggaagataccttcaaagccattcagacacacacgtgccaacagggagacggggctgaggtggggtgagcgggactgcttccgggcgccctgctgggagctggtctcggtgggcagaactccttacgcctgaccttctccctccctggggaggggctgagggctgggccgggggtgggaggtggaaccctctgattcctggatcaggagctgggctgagagggcgattttctaaaaggggcgagttggggagggaagcagagaaggccccatgctgggagaggaaaggccctgccgagaagctgggcccagacgggagaccgcatcaccctggatggccgcattggagaaggccccagccctgagaacctggggctggattccccagtggaggcaccgggatcgctgccaccctccgggctccaaggaggaaggctgagtcctgactcagagctgctggcctcctggcctgacatcagccgccccctggtggccatgactgctggtgcagcgaggagacggcagggcatcgccgccaggactgggaggagggggtgccgctccgcaggggatcctcagaggcagcccgggcaccctgcccttttgtcaacaatcctgtcaaagccttggagaagaaggcctttcccccaggaggaaggaggtgtgacactgcccaagaggttggaccgggaagcggactgcccccgccctttcctggctgccctgtggcctgtgtctctgggcaacttctcacagtccctgtggacacccctaggagccttggccacagatcagccttgaggaggggactgatatggacacaacagtgtccggcgagctgtgcgccatgcccaggggctcggtgggcttgagttccctcgtctcctggtgacctgtgttgacggtggtgactgccgttgagggccatgggaggacagggtggggtgggtgctgacattcaggtaggggtggtggtggtccttgtgaattcgtgttggtggtggcagtggtggtacccagtggagactggctgatgggctgacagaagcagccaggccgacggtgggcctgggaagcagcagcagcgtgacctgctgagatgcttcagtgtgcagagtgctggacatccacacaaggggacttgcactcagagtggaccacacgttgagagctaggagaaaagggttgaggcagaagcatcttggtggagaaggatcccgcagtcacttctccaaggtccttccttctgggaaggctccctctgggtacctgtccagcggtcctggaagcagaagaggggccgtggatgatccaaggcagccgaagcggccatctccatcagctgatgaagaacgaaacctgaatatggggctgggaggtcccccatgtcatcaagtcaaaggagggcggatggtgacaatgggaggaagtgcctggggacagccacccagggtcagtggtgggttcgacctcaccttcaaatccatctcctggctctttccccagccactcccctcaacatctctcagcacagggtccatgaggaagaactggacaagcccccccgagcagttcaactggccctacccagtccccgcccagcccccactctctgaccctcttggatggggtcaggagtctatgcctccactctctctcctgcccatcccccactcagcccgctctcacccccatccatgcctggtccttgcacctgcacagccttcagccaagcagacctccactgggtgctgcccatccacttacccacctatcccgtccatcctcacccatctcttccctcaatccatcctcacccatctcttccctcaatccccatcgtcctcccgccagctctccagtcatccgtccatccatccgtccaccccacttccatctacacccaccaactcatccatccgtccaccgtccatccacccacgcacctgcattgcctaggcacaacccctcacttccttccctccattcatctgtgtgtccgtcctgccgtccaccatccatcatccagccagccagtggggccactcccctgctcctggagaaggccgagagcaggaacccaactcttggcttctctgctgcgcggggcaggcaccgggctctcctaggtgtgcgcgcgtgtgtgcattttatccgcccccccttatctcgctcccctccccccacacccccgccccccgctagcgctccccctctaatgtgtgatctggaagctctataaagcctgatgtaatccgtaatgcagtctctggctcccgattcgggatccagtttcagagagcgagagattggggagcgccggcagccgggtggggggaagcagctctcgcctctctcctcctccttctcctcgtcctcggcctcctcctcctccccgcgccgccccgcccccggctcggcttggctcgcccccccccccccctcgccaggaaggggaaaaaaggcgagaagagccgggcaggcgagaggagcggagcggcggcggcggccggagagggagcggcgggcgcaggcggcggcggcgggcgcggcgttggcggcggccccggcggagcgagcgcggagccggagagccgggagcacaggcggccgcgccgcgtcctggcccggcccgggcccgcgcgccagcatcgtccgcagcgcgggcatccggaccctccgggcgcccggggggctccagcaggcgcgggggaacgggagggggcctgcgtgcgccggcgggtgctctccagggggcgtcccggcgaggcccagagcgggccgggggcggcggcggctggaggagccccccccacctccggtcgggcgcccggctcagccgccggcgacgcgaggcgctcgcggggatttgcaactcgccggatcgagtcctcgccggcggggccgctgctgctggggaaggtaaggaaggctccggcggggggctgggggcgcggcgggtgggggcgcagcgagggtgggagggggtcgggggaggggcgggcgcccagacttcctaacttcgccgtttggggcttcgcagctccgaggttttgcgctcagagctcaggagtttggacccccaccccctaccccctcagccccctgccttctccagcggtggcgatggaatgtggcaggtccccgcgagcccgcattgggcaggctgaggagggggcgaccctggacgcaggagaggctcctcggcgccgccgcctcctccccatccacacaccacagcctggcacccctcttcatcacatgcacagggcaggctggggagggcgttcccgctgtacccccagcacacacagacgctggcgggggtctaagggagccccccatggcccccaacagccacacatagacgcagcaggctccggagagcccccgagcgtgtccccctcctgctaatcacgtccagggccccctacagacattgtaagggcccgagacgtcctccccccacgcacagagctcggggcaggcaggagaaaaccccagactccttctcgaagccctcgctcgtagaagccctcgcctgtagacctggcattggcagtggagactccctggaggtactctcccccacttcgggcggagggctatttttgcgccccccacccccacgcgaacgcctggctcttccctccttgtctacctttccactgggtcggacaggccgcgcggataagccgctctcaactttgggccggccctatgccgtctccgctccaagcgccgagcactcccgggcgccgagcactcccgggtccgcgtcgccggtgagcagaggccgccggccctccaccgtcgccgcg

SEQ ID NO: 11752 - DNA, 6000 bp, Homo sapiens
ttctcctgtctacaagtttaccttcctcccatttctcattcctaatgacaagggaaatatccagtgttatctgaagtggtcataaaagacattttttttctttttatgtgaggaattgaaacttatggctttagattatggggcttaccatcaaggaaagggcgtagcgtggtcagaggacaaaacttcttcctgcatttctcaggaagtctttgattagtgtgtccacctaggagcaatttttttttgttgggggtgctgggaaatatacttaagtgattaaatccaagtgtagacatgagagctttacctaaagccaggtctaattaccatacctgagaatcagggagtatttaaaatttgagaaataattttctatacttgaaagtcacttatgtaggtaggcctcagattataataaataacgtttattgtgctatactatgtggtaggtatgaggttaagtatttttacctatattatatcacttatttcttacaaatggagcaagggagcaagcaagcaagggaggtattattatccctattttatgtatttatgtatttatttttgatttctattcttttggtttttttgttgttttttattgatgtatcatagttgtacatgttttggggtacatgtgatatttttgatacatgtatacaatgtgtaatgatcaaatcagagtaatttggatattcatcacctcgaatatttatcttttctttgtgttgggaacattataatttttctctgctagctattttagaatatataataaattattgttccctatgatttctccattgtacaattgaatactaaaatttattatgtctatctacatatccccagttcaataactataatttctctgctgtgcaatcaaatactagaacttcttccttcgaacgctatatccctaattcaataacaagtaaactgaagctcagcatggtctaggaactttgttacgttaacacagcaagtgaatgttgcagcctggatccaaaaatcaggcctggtcgacctcaaagtccagattattgacctttctaccataatgtatggaggtaagtttgtgaatttattcaaaaatcaggcctggtcaacctcaaagtccaaattattaacctttctaccataatgtatggagctaagtttgtgaattttcatagttttaggatttgaagataaaagaggtgaaaatttggaaatggtttctggacttttgaattttggcaaacagctatgtgataagtccaccctgcagacccacaacttttggaaataactctactgtgaccttcagtagcagaagctgctcctggggtggtagaacacaaggaaaacacacactagtaaaaatttcatgtgccttctttgttctgtacatgtgtttctcttgattagtatatggtagtatcctcaaatcataataacaagtatactttttccagtgaattgcatgtgtatattattgtatagtataaaaggcaatatttccatttattatcatctgtgcttttcaaagaaactctgtgagtccaaaagggcagataatagaagcaactgccctttctctccccctttaaatgcaacccaatgtcaaagtccgtagcatccccaaatgagtgtgttaaaggtgagaaattcccagagtcaaactcagtagcatccttgaatgagtgtattaaaggtgataaatttattttatttatgttctttttaacctgtgttctcagaaacagagactactgtatttcatcctaccttagtcttgcttagcagtttctcttctcctttgaggctcttttatttttaaatcattgttcatatcttctaatttcccctttctcccattcttcccatatttttaatctttttttaactttatctctgttctgctttttctgtatttcaaattgatccatagactttagaaaaatgagttgaatgctggctgtaggctgtcttatccccagcaagaaacatgttgtaaagtcttagtaccttcccactggaagatcattagtcatggctactatgtttttaaatgagaattgttttaattatgcattttaaaattattggaaaacatgagggagaggaatgaaccataagtaataaagattattgacttgaagttaagaccttactatgatctgggattattagtcttacttgtcaatcaagaactatccactttctatttgtttgtgggtatctaatatggttatatacacagaagtaatgataattgatatgaaaagtctcctcctgttatatcaatttaggtatttttcacacattgtgtacctcattcttctcctattcaattttcactaattcctaaagggtcaggtcaatgtccttggcataacctcctccacctgttcttaatggcaattgtatcttctgccctccaatatctataacacttttttctttaaaactctttgaatgtttatcttaatactcatttgatatatattgtataccacatatgattgtttgttatatgtacaatacatgttttttcaactttttttggttctttccatttacaggaattagagaaagaactaatcagtgtgaaggagaattgtcagtaaaattacaagaaaagattgagatcataattgacctttgaggataataaaatttaaagaccaaaaggatggacttcacagaaacatgaccttaggttgtttttgcagttgtagtaactggttatatgaccaacaaaatatgaagaatgggtaaacaaattctgatagtaatgatcagtcactttgcaaatataaagttactatttactactgtattgtacaggttcaataatctttgtgtacacattttatgtatttattgtcaggctgctatataattcagtatttataatagatactatgtatagcaatctatggttagttttggtcttaaccaggaaaaatcactcttttgagttttgctgtttttaccagattatttttactggatgattgctcatattatttgattattattgcaatttgtctttctggaataggaagcaagaggcctgaattctggttcctattctatcaattgtgtgaattctggaaactcagtttacttttctgggcctcatggttttcatctgaatgatgaccaacttggataaaatggtctttatataattccataggcatttcccttcccaagggcttgagtctttttcaacaattatagagttttccggtccctcttcccagtgcctcagcaccttgctattcatgttcatctgatcagttgtttgcatgctgacttacattaccctgatgggcagtacctgtggctgtttctgctccctcacccagtccataggcttctggttgtaaaaagtgtgcatcttgagactgtggacagttagctccagaggtgacagtataatcacttcacgtagaagaggatagagagagactcatgccagtggtggtgagcaagtattagagatatgatgtgtgcctctgtgagttttggggtctaagataaattatggcactaggaagatggtcctttgtgtcagaagaactggagttgttggtgcaaaaaagtatgatgtcagcatagcagttttatttgtacctcagcaacttctaaaataatctctattaagtgttttcaggaactactttctactataggaaaatgattgaggtgagtatccatctggacacagagaaatataacactgttttctgctcaccctccacttcacatataaatacaatatgtgttaaaggactaaatttctagtgtcacagtttgtactttatagtttgaagtcaataagaaagctcatataccttcctaaaagtcacttattaatgtttgatattaatctaattttatcataaattaaaagtataaaactacaaatttcttaaagataaaatatccaaatggattcagtcaaattaagcatgataatatcaaatatcagaataggttaccatgcaggaggtactgagtacttaaaggggtggggaatgcaatgaacataaaagctggtaccaaggggaggaggagacagtgatgaattaaaacattatcttaactaatccaagtgctggtcttcaatactttcatgtgtatagacaaagagaaactgcagagatttctcacaacctctgtgtccattttatgcatgtatcttagcagaaacactggtgaaatccctccaaaacatatttattaggcatggaaaaagccttacatgacaggtggcataggctccttatgaaatcattgcaggatgggaagccatttagggcttcgtaattgtgaaagattgtatagaaactgaggcacttaaatagcagtaagcatgagaaaatgtggtagataatggtggtgattctatttcttgtgaaagtccacttactctagtctgctacagttgtgggctttccgatttcacataccccagtctctatattctctcaatccacagcctacctcaactaagtccgtcccaggcacctcttactgcagtgataatccatctgttaatcatgttttcctcttatgtctactttctgtcagagaattgtgggtgcaaactgggaagggaaggaaattataagaatatgtataagtacaaatggaatatgttggaaatgaggaatagttaatatcacaggtcatttaaacacctgatgaatttcatggatagtcaggaatcttgttcttacctaatctgttaattttagatcagacattacactgaaagtattgatgaggggtttaaatcaggttgcagctcacatgttgtgataatattatgttgattttttgtttttaatatgtgaggaacagaataactgtatactatttattcatagtgacattgcaatattgattttagtacatattattatcttcataatcacaatttcctccccattttcttagttctcataattttagccacagcccagttggctggaccaatggatggagagaatcactcagtggtatctgagtttttgtttctgggactcactcattcatgggagatccagctcctcctcctagtgttttcctctgtgctctatgtggcaagcattactggaaacatcttcattgtgttttctgtgaccactgaccctcacttacactcccccatgtactttctactggccagtctctccttcattgacttaggagcctgctctgtcacttctcccaagatgatttatgacctgttcagaaagcgcaaagtcatctcctttggaggctgcatcgctcaaatcttcttcatccacgtcattggtggtgtggagatggtgctgctcatagccatggcctttgacagatatgtggccctatgtaagcccctccactatctgaccattatgagcccaagaatgtgcctttcatttctggctgttgcctggacccttggtgtcagtcactccctgttccaactggcatttcttgttaatttagccttctgtggccctaatgtgttggacagcttctactgtgaccttcctcggcttctcagactagcctgtaccgacacctacagattgcagttcatggtcactgttaacagtgggtttatctgtgtgggtactttcttcatacttctaatctcctacgtcttcatcctgtttactgtttggaaacattcctcaggtggttcatccaaggccctttccactctttcagctcacagcacagtggtccttttgttctttggtccacccatgtttgtgtatacacggccacaccctaattcacagatggacaagtttctggctatttttgatgcagttctcactccttttctgaatccagttgtctatacattcaggaataaggagatgaaggcagcaataaagagagtatgcaaacagctagtgatttacaagaagatctcataaatgatacaataagcccttctcgttaaacatgatatggctttatgtttctttctttgatatt

SEQ ID NO: 11753 - DNA, 6000 bp, Homo sapiens; identical to SEQ ID NO: 1291

SEQ ID NO: 11754 - DNA, 6000 bp, Homo sapiens
cacagatatacatatgtaactaacctgcacgttgtgcacatgtaccctaaaacttaaagtataataataataaaattttagaaaagtaatatatcattttgtaaaacttcaaataatacaggcattacagagaataaagagtgaattttcctttaaaaaattgccttaatttaatttgtctgcaaaaggatttagaaaaagtgatttcggaaattcttttacagagaaccttatgaaaaactcaacttcctacaaactgggcagatagaggctgatcagctgagacacaaagtggctttgccatgtgtgacccatggcctggcagcactggagcagctgtccactgcagcaggagccttctctccctacagtcaccaataaggatgacctttggtcaaaatccaggctagtgatgacctatagtgtgtggagttggctgtgttttaacctcagtggaaacatactgaatttcaatgagtaaaggggagagtaacatcacacaagccaagagcctgagaccttgtctaccagagggagggcacctccattacagagagcaaaattctcccatggccagcggcaaggggtgctttttgtgttcccacagttgtgatataaagtggggagtggccctgggcagtgaaagagaggcaggtatgtttcgcactagccatgtggcatacccctaccctctgccccaggttaggagtaccttcagcagagactctaaggcccagtgggtctttgccctttcactgttttattgtctgttcatttctgttctattgcacaaatataaaacataattttaattatagatattactggtgtctccagtgacattctctttgccaaataacttatttaagttcttggacatgtggacactgttgatcacctctccatcctgaaattctttcttctcttggtttctctgcttatgttcctcctttttcattgatgcctgttcttcatcagtgttctttgatagatccctattaaagcgcatgctttctccagcattttctcatcagcttgattttcttgcgatgttcactttccatgcccttattcacctgcatggctcggcctgtgtctctccaacacaatctgcccagcattagacagccctggaccacgcacacaaatgaatgcctcactgatgcctcaaacacagccttccaaacccaagctcattatgttctttctacagcttgctgtgattcctcctgtatttcttatttcagttaatggcaccgtcattcacttggtcacccaagcataatcctaaagtaattctaaactctttctcctccctaacttccatattcatccagaccatttcttgtcaatttaatttcctacacagttctcaaaactatcctatcctccccaatctgcttagcaattgtgttgttttagggttgattcatctctaacctagatggttaggagagctttactactgttctctgtccaaaggtgtcctccttgtgtcagtcagggccacttccaccacacggtcagctcacgatcccagcacagccgggccgacctgctcttccctgagtctgcaccctggctgtcctgatgcaccactttcctccccccacaccttctgtaacactgcaagccccacaccaccacgtgtcaggctctcacacctttgcacatgtgcctccctgcctttccttcttgataaaattcttgcttaaattccgatccctaccttagtgtcatctttcttctactaccagagataatctcaacttcttttgaaataattctgcccatacgtctgatgtgccattcattgctttgtgttgccaaaatttctctcactccccaacttagagtctgacatgtgactggcattgacttttcaaacctgtggatttaatgcagtcaagaatttcagtataagcagttccaagtttaagtctatggccgtgaaaaagtcctggttgcatgttgtctatgtcacatgcagatgcgcggcacctttagctggaacagcacatgattccaattgaatttggagctcctcacacctcctcattccctccagtatgttcaccaaactaaagacaagtgatacttcaaagaccccaatctgggcatgccactctcctgcctgagagccttcactggctctttattactcttaggctgaaatccaaaatctttgacattcttgacaaggctcagcatggtctgcaccttaactgctcttgatcaccaggctcaagcacctcagcctcgtcagggtgccacagaaatgccccactcttgaccatctacattcttcacatatgctgtggaatgctctttcttccccctctcctggataactgccataactgcaatccttaaatatcagcttcaatgccatttcaagaagggcttccctgatgttctctgactgagcagggttcccagacaccaggtcttcttcaggggatctgcacacttgtgtagactacactgcacctaagtgtgcagtatctcacagtatgcttcacaccgaagacaagactgatttgggtatttattataacaacttgctgacagatctaagtaaagtgccttatgaaagggatgctatttttaaatttcatgcaaatttgctgcactggctatcactgtttattaaacacctttccacataacatttgccagagttggatgaatttgttattaattatttattaattattcctaacattaaaaaaatttagatcccatgtgtcacactagcttcacatcctctttgagaagagattgtctctgtgttggtattgttgtatccccagagggtgccttttcttcagccacttggggatactctgcaatatctgctgagtgaagtgagctgaagccagctgcatcccggctcagcaagactccattggctgcactggggtcttaagctaatgaagttgctccctccagctctgcactcattgctgcacaacaatatctgttgttggagccacaagaaagggagttaattgcaatttactggtgggttatctagtctatctaacaaaaatgtcaaagccacccactacccaggatgctccttagcattgtagcattatccaataaaaatctccacattttcatctttaaaagtgctttccatgtacttagttataagcatagtgtttgcattgagtagaatggccaagtataaccacatgtgctttatatcagtgtgtaacagtatatagcattttagcagtttacttttcctttctattttatgagcttttatctgatattatgataaaattgcatactcctaagagcatgactccacagaagcagccatacttcctggatttagagactcgagtgggttcccctggcaacctgagccacctgagggcttctcaatgctctgttcattttgtcttccctttattttggccattaatttggtaaacaagaaaggtaagagtgctcaaatgaaataaaactactgaggcccttatgaggtctcagcaggtctgatgtgttactgaaggagatgtgatccttcaatgacagtttgcaatcagacttaaaagaactctaagacttgataataattttcaaaattatttgaaagggttgaagggatatggttgaacaaagggaagatttccttatgctcttcatattacactgctcaaaagagttgttcatctccaggcggcaagacgctggtggtcaaatcccactttggggtcatggcgtcttgaaagagacaggaacccccttctgccctccgctgatggagggaagggctgtatcagtcattagtgtgtccaggtgtggcatggacattagctgtgggatgcagtggggacctgtgtttgtcagcctgaggcagtgaatccactggggaaattgaggtgcctaaacccccagtctcccccaggcctgtctccagtaccctgtggagaaggggaacttccccactccctttcagaaccttcacctcaggggctgagcccttgctccctttgtgtcttgccggtccctttgcctgagaagagaatgtctctcactcagcaggatctgacagctacccttggactagcagagttttgcaaagaaatgatggtgacagtttatttacggacgctcagattcgcggccgtataatggaggcagccctactgtgagggagaagtgaggagaacgtgatggctgcagggattaatgtaaaacagagacactgtcacctccctggagcaccactgaggcccgggtaaggagagtgttttgcccttctcagatactatcagcaattcaggtaatacccgtaaggtgcagtttgtctgcagcctgtcatcccagttagagcagacggaatggaagagaacgcaaggaaatattctatttatgtgtcttttaagtcattattttatgaactggtcttattctaactggatcattttgttactttctttggatgggccattctaataagcgtagttcctgactgcgaactatgcagataagaagttctagacacaatatgaaaatccaggtgcatacttgcactaaataggcatgctcctcctttttactaaatctaaatggctcagtctcaggtcttggggaaggctgcatggccggggaccaggcggtgtgccgctcgggcagttagtgggccgggcgagcctgcggggctggaggggacgcggggctgggaggctggggagctgggggctgactccgggcgggcggggcggggcagggacctgccggcctggggcgggcgcaccagacgagctctccgcccgcaggcccccagcgcccagccgcgtcccggctgcgtcccgccggtcccgccccgccccgccccgcagagccgccgccagtagtgggagacgtgcgctgagaggcgggggctgcgctcggcggaacagcagccctcgggcggagagcggggccggggtccgagagcaggtgatgccaagagctgagcgggactcgtgagcgcgcggttcagcacctaccagggcgtcccgtaaaaaacctcgccttcgcctgtctctgggaaccataggtaagctttgggctttcgaggtgcagttctaggtagagctccgtgctgggaggtgggaagggggcttgaccctggggactcaggcagtctggggacagttccaccaggggccggtgcctagaattggtgagggaggcacctcaggggctgggggagaaggagcgagcgctcttcgcccctctctggcacccagcggcgcgcctgctggccggaaaggcagcgagaagtccgttctccctgtcctgcccccggcgacttgcggcccgggtgggagtccgcaggctccgggtccccagcgccgctggccagggcgcgggcaaagtttgcctctccgcgtccagccggttctttcgctcccgcagcgccgcaggtgccgcctgtcctcgccttcctgctgcaatcgccccaccatggactccccgatccagatcttccgcggggagccgggccctacctgcgccccgagcgcctgcctgccccccaacagcagcgcctggtttcccggctgggccgagcccgacagcaacggcagcgccggctcggaggacgcgcagctggagcccgcgcacatctccccggccatcccggtcatcatcacggcggtctactccgtagtgttcgtcgtgggcttggtgggcaactcgctggtcatgttcgtgatcatccggtgagcgcggggacagcgcagcgctgggggctgggcggggcagggagtgagggtcaggccccgccactggagcagcagtgggggcagccagccaggtggtggggactctgttccgtgaaggatcctggaaatgctacagggtggcttcctagaagaggtgaaggattttctgggagtttttggtggagtgctgagaggttcacacaggcgaatccgagcggccaggggcgtctggaagatttcagagtaaccccccgaccccaccctaggg

SEQ ID NO: 11755 - DNA, 6000 bp, Homo sapiens
gagcatctcgtttaaagttcattaagtgtgttacttcatttccttctacaacgtctgtggaatgccattgctgactaggcagcctgccacacatggggcacaggagaaaagagctcttggtcaagaataatcatgacacagcagcaggaagcagccttgactgcactaatagcatgtcatgagcaagcagagaagaggcccagagcctggcagaggagcttgtgttgaacccaaacccagattttaccagtagggaaactccttagggagccaggctggggcatggatgttttagtagagctagcaccacttgaaaggttggaaaaatgagagggcagggcttgtttggggctttgcatgcctagataacagattatgtggggagagaccaaggagaagaggactaaagataagcagaagctgaatgaccccattccctgaacattcattcatctcttcactcctttattgagcctcacttgtgtcatgcagaggctaggtcagttgttctcaagcttggcttttggaattacctaaatctcacctcagtgatagctggtctgagtgtgctttgggcatgaagattgttaagagcctgggagattctaattttagttgatgttgaaattcagtaggctgtatgatagagataaagaaaaaattaaaaaaaagattaaggcagatatggtgctggcacctggtgtgtacaatcaacaatgctttctgagttgcctactaggtacgagatactgtgctgagtaaaacataagagtctcagttctcatgaaggttcagactagtggaaacaacagaaaataagcaagtgggcagactgagaagcttttcatcacaacatcagataactgatatgaaggaaacaggaaaggttaaaagatagccaataacgaagaaaaagatggctcattagattggctggtcaaggaagaactctttctttttttaacatttacttacatatgtacatataaatgcatacatatatatgtacaatcatcaacacaaattaccatctccaaaaattcctcatgccccactgtaattttttttttaattttacttcacgttctgggatacctgtgctgaatgtgcagatttgttacattggtatacatgtgccatggtggtttgcggcacctatcaacctgtcatttagtttttaagccccgcatgcatcaggtatttgtcctactgctctccctccccttgtcccccaacccccaacaggcctcggtgagtgatgttcccctccctgtgtccgtgtgttctcattgttcacctgtcacttatgagtgagaacatgcagtgtttggttttctgttcctgtgttagtttgctgagaatgatggtttccagcttcatccatgtccctgcaaaggacatgaacttattatttttatgactgcatagtattccatggtatatatgtgctatattttctttatccagtttatcattgatggacatttggattggttccaagtctttgctattgtgaatagtgctgcaataaacatgcgtgtgcatgtgtctttatagtagaatgatttataatcctttgggtatatacccagtaatgggatggctgggtcaaatggtatttctagctctggatccttgaggaatcaccacactgtcttccacagtagttgaactaatttacactcccaccaacagtgtaaaagcgttcttatttctccacatcctcgccagcatctgttgtttcctgactttttaatgatcaccattctaactggcatgagatggtatctcactgtggttttgatttttgtttctctaataaccagtgatgatgagtttttttcatatgtttgctggctgcataaatgtcttttttttgagaagtgtctgttcatatcctaggaagaactctttgagcaggtgacattaagccagcacctaaagtatgagtagaaactggccttggaagatctatggaagaatgttcctggcagtgggcacatgctgggtgcacgtgctgttgttgttgttactgttgcaaggaactggcacatattcagactccatgaggaaacatggtgtgtgggagggactttaatgtgtttataggctgtaatgttttatttatccgtgtatgtgaagaatcaaagacgcttgattatagttgctttataaatgcctatggaataaatgaactgatgttatcagtagagaagaagttgaaaggaaaggcgatggttgatgagttttccataggaagtgggaagagagggaatctacagtgcacagaaaaagaggtacctctgaggtaggaagggagaagtggagaatagatatatttttctggtgcagggacaggaaatagaatttccttctgatagctactgtgttctttattgggggaaaagagtttgtttgctgaaagcaagccaggtgggagtgggatcagggttctaaagaggtgggaagtgttactttgcataattagagaagtgagctggctggggacatttgtaagaactgaggtggtgctgagtgcccagccaggggtaggccagacatcaatggtggtgccaatggccatgattttggaatgatgtttacctctagcagatagctacatcttcggtggagaatttgcagatgggtatggcaatggtaggacaaagaaatgaacaaattgaagtggaaggagagacagatctaaattgatattaaagactagtcggagacatagaggaagtattgtcaagaaggagctgaggtcagacgcagtggctcacacctgtaatcccagctctttgggaggccagggcaggtggatcacttcaggtcaggagttcgagaccagcctggcaaatatagtgaaactccacctctactaaaaatagaaaaattacccagttgtagtagtgggctcctgtaaactcagctacatgggaggctgagacaggagaatcgcttgaattcaggagatggaggttgcagtgagcagagattgtgccactgcacttcagcctgggcggtagagcaagactccgtctgaaaacaaacaaacaaaagaaaaccctgaatataagaagaggaaggaacaagggataaacttctaatgagtccaaagccagatgtatgatgagaatgagggagtgagaggactgggagaaagagagtgccttgttattccatggtaagcactgcacatattaaagtactttaaaatataatagctatcttttactgagtataactccatgcctgcagaaaggctaagggttttatctacagaatttcatttaatcctcatagtatatattacaactccagttttactgatgagaaaactgaggcttggtgaggttaaatgtattgctcacattttcgcagctaggaagaagaaattgcctctgtctgatgaagcaaatgcccctaactaccgagctaggtgatgttgatctatatctttttgttgttgttggagaacaatgcatgactcctgtatcctcctcttgtgagttgatgccccagagccagttatattaacacattcagcgctgcaagatgaagtccacatcccctagagtgacacaggaggctggtcagagtccatcccgcacccccttctctagattcaccctcccacaccgtctgctcctgcttgccccgactattttcaagttcactgaacacaccacagcagtttgtacctggtgctgtctgggtcggtgatgtccttccccctcttcttctcctggctggctcctccaagtccttcaaaattgagagtgagtgtcaccccctttccacttttctgagctgaaaacagtgaaagtactattgcttttcacactgggcaggtctaggtctagggcttctctgcagacctccaccataactctctgccatccctcaactccgcctccgtcacattaaaattctgtgatgctgactgcttgtccattgttcatttcacaagctcacagccccttcccttttgtttagtatttcactgtctggaaggacccagaaataagatagaaagaggtgctgatagtagttagtgatagactttgctagcagcccggggaacacctggcttgtacctctaagtggctagtctggttaccacagcatccttttagcagtagactattttttttttaatgtagccagtaaattcaagatatctgtgaatatcaaggaacaaaacatctattatctaataaaacaatttctgacactcacttttgtaattcaaaaattaaaataactgtagctactattgctttatattaattgtgttctcgttagtagtgtgggtcactcagcagggtggtgggtggtttcgtggatgtggactggatgccaattaagaagacctggatttcactttctggttgggtgatggggcaaatatttttctgagcttctaattctttatgtgtaaaatggcagtagtaggagagcctcctcggcattgtttgggaggccaaatgacagcatgatcgtgaaaagccctttgtaaactgtagcgtgttttagaaaaaaaaatggtggtgatattttccagagcgtcagaggaacttaaacagcataggcctgcccctgtttgacctggaaatgctagttcagggaatgcattaacaacacagcaggaaacttgtgctgcgaactccttttggaaacagactgaatcctacagaatgaaagagaaacagcaaaccaaacctcacagaggttctccttgaaagatgaaaaattaactaggcactgtcgggggtgggaatgtggatggcggcgctggacgccccgtcttcagcctcccgacactttccttccccaaagccattttagtcaaaggtcatgtgtgtgtcttgtcaaaggccagcttccaatggaatcattgtcccccgggacagcggccccctgactacatctgcactggagaaatcccaaaagcaaacggccagtgcaaacaagagcagtccgcagcagccgtcccgagcacagctcccaggtcgcggggctgcagcccaggccgcgtccgcagcgcccgggcaggaacagacgccgagactcccgcagcatgacccgccacgccgatcgggtacggtatgcgcctctctctacccgtcctccattgcttgggctcccaggtcacagctgccattctgtcaagcagaaaaaccttgcaaagggcctccaggtttgccggaaagcagtccctgttgggctgtgttcccgtgcactcagctggagcaatttgcaggcgcgcaaatgcggagctcaactcatttcaagttttcattgccagagaatgagtttgtaaatatcgagtttgtctctggtttctggaaagcgagcccgtccaacttgcaggactctcggttcaccacggctcgactgcaagcgggcgaccctcagccttaccagccgcagggcactgcaagctctgccctcctgggcggcgagacgggcccggcttcttgtttattacctgtgggacaggggcttggcaagaaggacggggatttttaaaacaatatgtttagtaaagtcctctgaactcccacacttgcctccaggagacagaatcatctccctgaaggagggagccccttccccacaacgcgccgatcgcaggctccacaaagatgttgattgacgtgcacaattcggcacagccagtttcttggtcctttgtccttttctatttgaacaagcctttcaaacggatagggctaattttggataagactagagggagccctgggtcttaactgattatgggtgctttagatctggacttggaaatctccaagggcgaacactggggagcgtccgcaggggcagtgggcacagccggtcttcaggtgcggagagggggtcaaagggttccagcgattgctgggcttccacactctggtttcattttaacaagtgaagcaagagccgcttctcactgatagagggaatggaaacaaaagccgctctagtgcccag

SEQ ID NO: 11756 - DNA, 6000 bp, Homo sapiens
ctgggaggcagaggttgcagtgagccaagatcatgccactgcactccagcctgggggacagagtgcgactccatcttgaaaaacaaaaaaacaccaacaccaccaccaccacaatttgtagaaatgttgaccaagtgtggtggctcacgcctataatccccgcattttgggaggctgaggcaggaggatctcttgagcccaggagttgaagcccaggaattccagaccagcctgggcaacacagcaaaaccctatctctacaaaaaaaaaaaaaaaaaaaattgccaggtgtgggtgtggcggtgggctcctatagtcccagctactcaggaggctgagatggaaggattccttgagcccaggagttcaaggctgcagtgagcgatgattgcaccactgcagttcagcctgggcaacacggcaagaccctgtctcaaaaaacaaaaaccaacaaaaaaaaaaaaacccttgtagaattgtagaaatgtagagtgaaactcataacatgatactgggctctggggttatatgcagagtttactgagcataataggactgggtctctctgctaacagaatttacccatacattgtaatatcatcagacaagggaatctcaaattattatcaggaaattatcaagaaatagcgtatgggtagatttcaatacgaattcatcttccgcttaactagtttttaaaaagcaagaactataacacaacgcaaaaagctaatgcttggtaggcatataattatctgtgggttgttaatttcacaagtatgaatatctggcggttgcactgtagcccaaatgagagggcacaatgaaatccccaagagcactgataaagctcatgggaggccctggagctttccaaagagagagtctccatctttttcatgcactgcccacagctctcacctcttttagcttgtctccctcttcaagcctcaagcgctgacgttgccacagtttcattaggtcagctttttctccgactccctccagtccctcacccctcccagcttccagcagcccaatcaccgtctataaatcccgtcgctggcatccggggtctcttaggcaacaatgtgtgggctcctgattggccgcgagatccaggagggctggctacaaaattgggcacggggataaaattaacaagtgtggcggccaagagcgtgggagggactgcaatgtctcaatataaccctagaatgaagacgcgtcgaatcctgaaacaagtagcgttgaaaaccttcattcaagacgtagtgtgtcccaaatcagccctacctacggagcacgcccagtcacattgtcctggtcactccggagctgcgaaatgcaggctccactgtgccaggttttaagagtggccaacaggtaaacagagggttggaggaaaaagaattcgagactggttcaatgaaagaatagcacctgcaacaggaagtggaaggatggggccaggaggaattgcccaacacagagacacacaaatgcttcaatgcaaatttcaatttattggattatagaattcaggctgactgacagatacaccagggaaccagcagatggcatgccctaataagaataactaaatttaggaactcttagaatcccgtccaattcattaaatttattgagcgcctgtcttgtaatacgaagcaaaatgagaatacaaagataaaaaagaaatctaaagaggaagactggaaggtgcaatatacaaatatttaatggaaggctcacacgggtaacagctgttatagagttatgaacaagtgctggaggataccaaaaagttcaaaattccggaacagaggtcctttggtcaatgtaaagcaggtcttataggcagcagtcaacaacaacaaaaagcaaaacaacagcaaaaagagactttccttactatctttttttctcaaaataaataagaatgcactccccttccacttaaatgtacaaaccctgtgtttctgttgtgttttacaggttttatttttatttttggggggaacggagttttgctcttattgcccaggctggagtgcattggtgcgatctcaggttactgcaacctccgcctctcgggttcaagcgattctcctgcctcagcctcctgagtagcggggattacaagcatgcgtcaccatgcccggctaatttttttgtatttttagtagagacggggtttcaccatgttggccaggctggtttcgaactcctgacctcaggtgatctgcccgcctcggcatcctggagtgctgggattacaggcgtgagccaccgtgcccgacctgttttatagtttttaaataggcagcatttgtatatctctagtttaaaaagaaaaaaatgaagctcatagaagttgttgctttccttgggttaaaatggatcagtaagtgggcaagctgaaattagaacctaggttgtttgaattccagcctagggattttttccacatgaccgggttgtacctaaatgaataaacaaagccttgggggcagaggcggtgagggggtggcctggaggaggtacttagatgcaatactaaattaccatgcattaccagttagcttttatggtttcaaaacgggttcatccagaaagagaccagttttaacaatgttgggagtgctgtgtctctctatgaagttcccgctcattaaagacttcgtattggtggttacaacatggaatgaaagagagatgggatcacagagagcatctcctttagccctgttggatttgaatattttcatccctgaaaagaaggtctctttcttcttgcctctcaaccaacatcttctgggcctcctcttgtcctgcacctcatcatcagactactgtcctcccaaaagaacctgagtcacaccatccacactgtctgtgttcacagtgagcacatagagctccatgtctgacactgcaacattactttttttttttttttaagagacagggatggctttgttgcccaggctgcagtgtagtggctcactacagctttgaactcctgggctcaagcaatcctcccaggctaattttttagtttttatttttgtagagacaggatcttgctatgtcccccagactggtctccaactcctggctcaagtgatcctctctcctcggctttccaaaatgctgggattacaggtctgaaccacctcactcagccccaaatattaattacttttaagagggatatttcaaacataaagaaagatttggacactttcataagaaacacccttgattctccacgaagattttttttaaatagtacatttgtatgtatttcacagatacagtagaagcttcttttgtctcattcccaggtttcatccccctccctgcctgcctagaggcagtcattgtcacaaaattggtgtgcagcgtttctgtccattttcatgcttttattatatgtacgtttgccctcataaacattgtatagtattgctagtcttttttttctaaagaggcatcatcacttacatatcttgtggtttgttttttttttttcactcaatgttctttttctgcaatttagtcatgctgatacagtggcgatcatttctacgtcattcccacctcccgatgttgagctattatgatgtgtctcattcctgacagtctttacaggatggtgtgtaaattgaataaaaatgcacctcgcagcacatctccagaggttccccagctacaagggatctgacacacacagatttcccccacgctatctgccccctcactcactctccacagaggcaccgctggctccagaggatacactgccctgcctagaatcaacctaagaatcaatattattttaaacattgtttactgcacaagtatttacttattagagaaactgtaactgtcatttcagatctcatttatcaggcctgttcacacagttcaccttctgatgtgaaactctaggtctaagttcaacattcgtcaacatttacttaacacgtatcaagcgcctttctaaaaaaaattgtaaaacacacataacataaatgcaccactgtaaacatttttaagtgtacaattctaatagtccattcacatcgttcaatttctttaagttctatgtgctaccgacagaacaaaatgatgcccatgaaatccaggttgacgaggaacgaaaaagaagagaaagaaaagacaggttaaacggtgcagtgaaaagaaagacagccctaggttgggacgagtccaggccctgttgttaaaacgctgcatggctttaggtaaatcatctaacctttgggggcgttcttttcctcgtctgaaaaatgagaggttcggtttagattatctttaagaattctttcagctctaaagcagcttatgtagaaaaggagaggagaaacatttcctaaggagcaaaaattggggcgcgcaccagtaacgaccagcgccacctgtttcctaaggtcttggccaagaggctatgaactatcccgggcgagtagcctattctgtccgctacgctgtttcgcgtggagctctgcagcaggccagagctcctgcaccccattccaccctcagcatccggggatctgcctcttgagcaccccaaatccccaggtccggaggtcggcacctctggttctcagaccaggtgtaggtggtcctgcaatcacacctccgcgctgtgtcatcaggggacggagtgcattgcgaggagggccccgagtgcatctcagatgagcgcctccagggctgggaacgagcacgccggagcaagggagctccaggcgtcactcagggcgagaggcagagaacaacgaggcgcgccgggccaggcccgcaagcccaggatccggcagggagctttcggccgagcgtactcagtgcgcctgccccgtgcgtgcgcgcgcgctcgtgagctcgctctccgggccgcgcgccccggtgctcgcgaaagctcgctgtcgctgggaggcgcgcgccggcgttcctcggccgctccgggtacctgagggacgcgcggccgcccgcggcaggcggtgcagcccccccaccccttggagccaggcgccggggtctgaggtgagccccgcgaagcgtgtgggcccctgggccggggcagcgggagaaggagcggcgagtgtggagcccgaggaggcgccgcgcggctgcctgctgctccgcctcagcccgcgccgaggagccagcagcagcccggcgcctcctcctcagggatcgttcctctcgtcgcggccacaacaaaagccttgggcgccggactgtggcgggctgcggagcgggggcccgggcccgcggtggcggctgggggcctcggggacgcctagtttgaggctgggggctgagggctgagggctaaggggggagctgccccgggagactgttaaccctgtccgccctgagcccgcggctcggcaacctgtgcgagtgtggaccgcggttcgctcgcctctaccccggctcagaccctgcgcggcggagagaggggcccggccggagccggcggcagcgcggggtgccgggggccgtaggcggaagacaatgctccgggggctcccggccgcccgaagcgcgcgccgccaggctcccggccccggctcgggtcagcttcgggcccacctttgcctgcccacgcctgaaagtttcccctcccgtccatcagtttgcaaagtccttgctcccttccgcgagcttcccccggctgcctcctccgcgggctgtgggtttgccgtggggtggctgctgctggatccccgagggtccgcatctgaaatgaagctgctgtgaaatagccagcaaggtgaaggagccttgtgtcctttcaagacatgtaaacatcttcctagcggtgttttacatcttaggagtcttgagttcgatccctctgttgtaagagaagccaagggtgcttttcttggctttgtttttaagaacaaaagcacgtgccatgaattgaggcagaggagtagatttcagatttagaga

SEQ ID NO: 11757 - DNA, 6000 bp, Homo sapiens
aggcaggagaatgcttgaacccgggaggtggaggttgcagtgagccgagatcatgccattgcattccagcctgggtaacacagcaagactccgtcaaaaaaaaaaaaaaaaaaaaaacacatacacacacacaaggggaagtgaaactcttgggagaatttttgtgagctcttctcctccctagaaatgacagagtacagcagttaaaaatttggtctctaggccaggcatcatggctcatgcttgtaatcccagtacttagggggcctgaggcaggaggatcacttgaggctgggagtttgagaccagcctgggcaacatagcgagaccccgtctctacaaaaaattaaaaatttagtcgggcatgctggcacatgcctgtggtcccagttactcagaaggctaaggtgggaggactgcttgagcctgggagttcaaggctgcagtgagctatgattgtaccattgcattccagcctgggcaacagagagagaccctgtctcaaaaaatttttcgactttggttccaggagtccacatcttggttccattacttactagctatatattcttgggtgaggtactctttgggttccctgtctgttaaaaaaattgtcctaaccgctaggcgcggtggctcacgcctgtgatcccaacactttgggaggctgaggcgggcagatcacttgaggtcaggagttcgagaccagcctggccaacatggtgaaccccgtctctactaaaaatacaaaaaaaaaattagctggacatggtggcgggcagctagttgggaggctgaggcaggagaattgaaccttgaacccaggaggcggaggttccagtgagccaagaccatgccattgcactccagcccgggcaacaagagcaaaactctgactcaaaaaaaaaataaaaataaaaataaaggtcctcactctgttttgagaactaaatgagctaattcttttttttttttttttttttgagatggagtctcactctgtcccccaggctggagtgcagtggtgcaatctcgactcactgcagcctccgcctccaaggttcaagcgattctcctgcctcagcttcccaagtagctgggattacaggcgcccgccaccacacccggctaatttttgtatttttagtagagatgaggttttgccctgttggccaggctggtcttgaactcctggcctcaggtgatctgcccgcctcagcctcccaaagtgctgggattacaagcatgagtcaccgtgcctggctaaatgagctaattcttacgaaatgtactcaacaagcgcttggcacataataagcactcagtggctgtccactttccttatgtgactcccacggtagttccaatctgctcagtctcagagagatcagctagcagctagctcccagcaaaggcaaacttctttcaagagggagacggcagatatgagcccctagactcttaggggaataaggtctcatagagtccggtagattatattcttgcccagattaaacagactctttcggaaagtcccctctcccttgctctggtcggaattaattcagtcttgtctctgtgatcgccactgaagagcttatcacctctgatcaaggtgtgtttaattggtcaggctccctagcagattttttgaggtctggaactaaattcgagtcattctcctatctcaaacaaacctcaaaacaaaaagattttgatgtgggcaattcattcactcctcactgcacctctgaggagaggtctgcaggaagcttcccaggggaaagtctccctgtggctcagagaagaaagcacttaaaaaggaaccatggccgggcacggtatactagaaataagaagaaaaaaggattaaaacatgctcatggcaggttgcggtggctcactcctataatcccagaactttgggaggccaaggcgagtggatcacctgaggtcaggagtttgagaccagcctggccaatatggtgaaaccctgtctctcctaaaaatacaaaaattagccaggcatggtggcaggcgcctgtaatcccagctacttgggaggctgtgacaggagaatcacttgaacccaggaggtagaggttgcagtgagctgagattgtgccactgcactccagcatgggtgacagagctagactccatcacaaacaaacaaacaaacaaacagacaaacatgctcatggccaggcatggtggctcacacctgtaatcccagcactttgggaggccaagtcaggcagattgctggagtccaggagtttgagaccagcctgggcaacatggcgagatccccatctctacaaaacattaaaaaaaattagttgcatgcaataacaaacctgtagttccagctacttgggaggcggaggtgggaggattgaacccaggagatcgaggctgccgtgttcctgccactgcactccagcctgggtgacagagagagaccttgtctcacacatacacaaaaaaaggaatcagaaagtaagttcctacccttggactctagtctcagtgactcagtttcttcatccatacttgcaaaataagaaagtaacctccacttcatcacctccctgggtgggtaagaagtcaaatgtggtgaccctcaggacagtccagtgttttgtagatgtctccatcagacatttcattcctagtggtggggaagcctcgcctcattaaatgtcctttggcctctgttcagcctccaggagtgggtgttccagtagaattcttctttagactttgagtgtcttcatttagccaaaggaaatcacagaaaagctatatgacccaggccagagatctcagagtcttccttgcctgtgagcaggagggctgcacagccctgcctatgggctgtggctctgctgtcagctctttcctgaggaatgcagcctgggccaccgcctgtgagggctcctgctgggggagtccattccccttctcccttcctccatttgcaatcactatttatttatctttggaagttcaaggaaccagagagcctgcaactgggggagatctgtggagccagggagggaaagtgaagaagccaacatctaggcccctgcctgccgccaacgccaacgggcaagagaagaaagccattccctgcatagtcagggtagacttggctgacaggcacaggggccctagaaaaggcaccaccgcacatcagcagggctaagctcactaaagaatgtggcattcaccttggggaccgcttgggtggtagagtgaaggagggggaacgggagtcctgccccatcccggcagctctattaagcaacagaaaggtgagcttctgtggggaaacagaggaagcagacccctgggctgcacttcttactgcctgtccccagccctggttccggtgtactgcaggctgttttttttttaattaatttatttatttattgagacggagtctcactttgtcaccaggctgcagtgcagtggcacgctctcagctcactgcaacctccgcctcctgggttcaagcaattctcgtgcctcagcctcccaagtagctgggattacaggcgcccaccacgacgcccggataatttttgtatatttagtacagacagggtttcatcattttggccaggtggatctcaaactcctcacctcaagtgatccgcccgcctcggcctcgaaaagtgctgggattacaggtgtcagccaccgcgcccggcctgcaggcagctttatacccaccactagttgtcaaggtcacccctgccaccaccagtcctctgcctttggaaaccatgtgcccctcccccccaccacactctcttattctaatgccacgatttactgggcatctaatgccactctataaactggggagcaggcagagccccatttcaaccccagagatctgctaccccagcaagctaggggctgtgtccaaggtcagacagtaatgagaggcagagccgagtctggaataggggtctccagactcactgcgcagtgctctttccacaccctgctgcaaagccctgctccttctcatctacttttcccttgtcccactcactgtccccgaaacacacacacacacacacacacacacacacacagcgttgtggaaaatgtaggaggcccagtctagcctctagccttgtctgccttggcctttgacctctccttggccgaatgacatgcaccccccgctgagcgaggtcaccgcagcggaggagggtctgctgcctccttgtctcggctgccatcctcctgcggctgcctccaccggagctggaaggagagtgagagccgacttccagactgatcatcgtgtcaggggccaaaggaaacctcggagccttccaccaagttcaacccaaaacagggcgccccagacgtctctgtccaagcccgcgggtccaggagggccccagcagcctggagacgcaagctgcaccggcacggacgagggaaattttgtggaaggtggtggtggtcggctcagaggtctgagatgggttgcggaaaggaagggtcctggcccggggcgcggggacaagcgggagaggagtgttggtgcagggcgggcgcggggacgcagggtcctcgaaccagctggcccgcccccactcggcagagggtctaggcctggccgcgtgtcggtcggcgctagggccccgcggaaggcccgggcgggcggggaccggcggcgggagcggcgcggcgcggagctgcctccatccatggcacggagcggcggcggcggcggcagcaggagcccggcgcgatccgctaggtcccagcccagcgcccagcgagcaggcgacgcggaggggccgggcctccagtgtcccgagggccgggcgctgagactccggccgcgcagctgggagctgcccgcgctgcgctgacagccgcgccgacgtcctccccgccggggcgctcgcaggacatgcccccggggcgcggcggcggggaccccggggctcgcctccgcccagggcccccctccacgccctcgggagccccgggcccccgctgagcactcctcccgcacgcctgggtccctccggccggcgcgcagcccggccccagcgctgtgggtccccgcggggcgatgggttgatgggcgccgggggacgcaggatgcggggggcgcccgcgcgcctgctgctgccgctgctgccgtggctcctgctgctcctggcgcccgaggctcggggcgcgcccggctgcccgctatccatccgcagctgcaagtgctcgggggagcggcccaaggggctgagcggcggcgtccctggcccggctcggcggagggtggtgtgcagcggcggggacctcccggagcctcccgagcccggccttctgcctaacggcaccgttaccctgtgagtaccctaccaggccagttccgtccgagccgggactggggacgaagggaggcgagacgggaggggtgggagcagggggaagggggctatccccccacttcagagatttctggacaggcctgggttcaggcccccagaggggaagattggaggagcaggggagagactggggctccaggagcgtggaggcgggaaggggctgcgggggacaggcgcaccccagagaaaggcaccgcaggcgcccactcacctgcacaggtgaagtggagagcacgcctgcagggcacccacgccccggatttccagcctggactagggttgcggactttggggacctgagaagggtgagagcggggaatgctcaggaaagatcgacgctcgtggcccaggagggggctgtggtcctaaccactacggtcgcgtcccggactgggctggaggagtctccggatttacctggctggccttgtcccttcaattggggtcatcccatccttgccccctggcctgccagcgccgcttccagccggtctccttagggcaaggggaggctgggctcagaaaagtcggcccttggaataccggcgctcctgggctgcaggagacc

SEQ ID NO: 11758 - DNA, 6000 bp, Homo sapiens
agggagctgacctaccccagctctgctgagcgttgggcttcacagggactctctgtggtgcctcacaccctcggaggcttttgcactctgcgcctttataagggcactaattcccttcatgaaggctctgttctcagaacctagtcacctcccaaaggcccatatccaaatactatcaattgaagattagctttcaatatgtaattttttggggagacaaaaacattcagaccataacaaccctaatactatctataactacatttaatatactatgaactcaatacttcaaagacattgtcagattggattaaaacaaatgttctaatgcttacatgggacccacattaaatacaaagacatagaaagatttaaagtaaaaagattttttaaaaaaagctgttccatgataatattaatggaaaaacagttaatgtagctgtaatgatatcaaacaaaagtggccacatacagcaagtaggaaatggctgggcgcggtggctcatgccggtaatcccagcactttgggaggccgaggagggcggatcacgaggtcaggagatcgagaccatcctggctaacatggtgaaaccccatctctaataaaaaatagaaaaaattagccaggcgtggtggcaggcgcctgtagtcccagctactcaggaggctgaggtaggagaatggcgtgaacccgggaggtggggcttgcagtgagccaagatcgttccattgcactccagcttgggcgacagagcgagactctgtctcaaaaaaaaaaaaaacaaaaaaagagaaaaaagaaatagaaacctagttaaagatgttataatgataaaaggtaatatatacagataatattataattatatgtgatatattctatattataatgttaaatgtatgatcatttgataaaatcaaataacatgatgataaaatcattataattaggctatcaagatgaaagggtaaattccacaggaaaatatagcgatcttaaactcgtgtacccttaataaaacagcatcaaattatgtagtgaaaattggccagtcatggtggcttgtgcctgtaatcccagcactttgggaggccaaggcaggcggatcgcttgaggtcagaagttcgagaccagtctggccaacatggtgaaactccatctccacaaaaaatacaaaaaaaaagaaaattagctgggcgtggtggtgtgcccctgtagtcccagctactcgggaggctgaggcaggagaatcacttgaacctgggaggcacaggctcccaccaccacacttcagcctgggcaacagagtgagtgagactctatctcaaaaaaaaaaaaaagtaaaattacgtagtacaagttgacagcatataatgaaagcgtaagtagagaaattcacactcattaattgaaattccccccccccgtcctttcagtaactaatgagacagttagataaaaatatcagcagaagccaggcacggtggctcacacatgtaatcccagcactttaggaggctgaggttggtggttcgcttgagctcaggaactcaagaccagcctgggcaacatggtgagatcctgcctctacgaaaaatacaaaaaattagcctggtgtggtgatgcgcacctgtaatcccagctactaggggtgctgagaggggatgattacttgtgcccaggaggttgaggctgcagtgagctgcaattgcaccactgtacttcagcctgggtgacaaagcaagacccagtctcaaaaaaaaagaaaaaaaatcaatagagaaatttgaacaacatagtaagtttgactagttgacatatgtagagttttgcacccaacaagtgcaaaacaatttttcaagtacacatgaaataattagaaaataactatatactggggagtaagtttcaaaaaatatctatgaattgaagtcatattgagtatgttctcagtttacagtgtaattcaactggaagtcaacaataaaaaggctagaaaatctccaaacggttgaagatgatcaactatatacatacatgtgtatatatacacataaacatatatggacacacgtgtatacatacgtgtatatacacgtatatacacatgtgcatatgtgtatacaaacattcacacgtgtatacacacgtgtataaactatatacatgtgcatatatacacacatacacacatgtgtgtatatatgtgtgtatatacacacgtgtgtatgtgtatatacacgtgtgcatatgtgtgtgtatatacacacaagtgtgcatatatgtgtgtatatacactgtgtatgtgtgtgtatatacacgtgcatatgtgtctgtatatacacgtgtgtatatgtgcgtgtatatatgcgtgtgtatatatgtgtgtgtatatacacgtgtgtgtatatatgtgtatgtatacacgtatgtgtatatagttgatcatcttcaaccgtttggagattttctattatatatattttttctttaacattatatggtgttttatcatatagtgtttcttacggacatagcttaagaatcatctgttattttgtttcacagaaagtgtgaaactgcaggggagccgatttgtatagatcctggtaaaaagataattgagtaggtaaattccagggagcttttggacagtggatccccctgtcagtggttttggagtccctagtttcagttactcgtggtcaactgtggtctaaaaatattaaacagaaaattccaggaataaacagttcctaggttttcaattgtgttgacttctgattggcgtgatgagatccagccatcttactccttcccacagaaagtgagtcctccctttgcccagcgtttccctgctgtctacaatatccacctgttagtcacttcacaatctgggttattagatgactgtggcaatgaccagtgtggtgtcttcaagttgccttgattttactgactttttgcccttatttctctctggctccaaagtgcaagagaagtgatgctggcaattcagatatgccaaagagaagctgcaaatgcctcctttaagttaaaaggtaaaaattctggacttaataaggaaagaaaaaaaatcatatgcagaggttgccaagatctactaaaaacaaatctatccacgaaaatgtgaagaagaaaaaagaaatgcatgctagttttgctgttgcatcatttttggatggaagaacagaaacatgttcccattgaccgcaatgggtactatccatggtttcaggcatccactggggctcttggaacctatcccccataggtatgggggggctactgtatttctggccccacagtcttctactgccgactttaggtctctctggatctcaggcccccttctctaagatgcatcctagaggaccaaaaatacactttatttgggcttcgcctgcttttgtggaagggtagtttactagaggatataatctcgtgttttaatttgctctctctcctaaaggaaatgtggagaaaaaaaaaaagcagaaattggaaataaccaatatttagtttatttcattcgattcttaggggaactggtgaggagcctaagatgattttcccttcctagagaaagaatccaaagtccagggaaatagcgacaggggagttcaagactgcccctgctagtccttccttggctactctccgctgcgatcgcaggatagctctcattagcaggagaatcgggcaagtgtgtggataagtagagagtgtgttgaacaacttgtaacgttttatgaaatacgcattgtcatggttccctaaaaggctttgcggaagccgtttgtctttactaatcaagtctttacttacacaaaagtagaagtagaagtagttttagaaaacatactaacaatcttctatccccttgaagaccagagtagcagaaaacaggtgatttgcattataaaattgcactcactttttcctcctttcagatttcacattacattagcctatttgtgttacggtgtataaaaaatggaacaggcgcctccactacattgttctcctttaaaaatagatcacttacaccctaactttgttttccttaaattcgattcttaacaggagagctttctattatttcagatggagtgaggttgcacgactgggatggaagaaaggaatcccttaaatttgggggaatttctgttctctgttctaagaccattttacttggggtgtgggggtgggcgcggcggtcagggcagtggaacgcagtcgcggctgcgccatccctgcacttccaggcgcgcgggagggaccggcggggacgcgagctgcggactctggcgaactcgggggaggcagacagggggaggcggacacccagccggcaggcgtctcagcctccccgcagccggcgggcttttctcctgacagctccaggaaaggcagaccccttccccagccagccaggtaaggtaaagactgctgttgagcttgctgttactgagggcgcacagaccctggggagaccgaagcttgccactgcgggattctgtggggtaacctgggtctacggaagtttcctgaaagaggggagaagggtttgcatttttcctatggaggattcttctctctctagcatttcgtttgatgtattcaactggtagaagtgagatttcaacaggtagcagagagcgctcacgtggaggaggtttggggcgccgcggcgccacccccacccctcctcgggaccgcgcctatttctaaagttacacgtcgacgaactaacctatgctttaaattcctctttccagccccgtgagtccgcggcgacattgggccgtggggtggctgggaacggtcccctcctccggaaaaaccagagaacggcttggagagctgaaacgagcgtccgcgagcaggtccgtgcagaaccgggcttcaggaccgctgagctccgtagggcgtccttgggggacgccaggtcgccggctcctctgccctcgttgagatggacaacgcctcgttctcggagccctggcccgccaacgcatcgggcccggacccggcgctgagctgctccaacgcgtcgactctggcgccgctgccggcgccgctggcggtggctgtaccagttgtctacgcggtgatctgcgccgtgggtctggcgggcaactccgccgtgctgtacgtgttgctgcgggcgccccgcatgaagaccgtcaccaacctgttcatcctcaacctggccatcgccgacgagctcttcacgctggtgctgcccatcaacatcgccgacttcctgctgcggcagtggcccttcggggagctcatgtgcaagctcatcgtggctatcgaccagtacaacaccttctccagcctctacttcctcaccgtcatgagcgccgaccgctacctggtggtgttggccactgcggagtcgcgccgggtggccggccgcacctacagcgccgcgcgcgcggtgagcctggccgtgtgggggatcgtcacactcgtcgtgctgcccttcgcagtcttcgcccggctagacgacgagcagggccggcgccagtgcgtgctagtctttccgcagcccgaggccttctggtggcgcgcgagccgcctctacacgctcgtgctgggcttcgccatccccgtgtccaccatctgtgtcctctataccaccctgctgtgccggctgcatgccatgcggctggacagccacgccaaggccctggagcgcgccaagaagcgggtgaccttcctggtggtggcaatcctggcggtgtgcctcctctgctggacgccctaccacctgagcaccgtggtggcgctcaccaccgacctcccgcagacgccgctggtcatcgctatctcctacttcatcaccagcctgagctacgccaacagctgcctcaaccccttcctctacgccttcctggacgccagcttccgcaggaacctccgccagctgataacttgccgcgcggcagcctgactcccccagcgtc

SEQ ID NO: 11759 - DNA, 6000 bp, Homo sapiens
tacatttccaaataacagaaagttaaaatgtataatgtgactaaactacagcaaagtggaacttaaaaataaagttcaggagaaaataggtcatttcataaaactaacttcaaattctatttgaactgtgactttaattctaaagagtctcagaaatttttggtacaggagtcatttattctgctatggatatttcctttatgaaatgctgctatttaagcatgaatgaaaaccttccatttgaaatgggcaagacattgttcatacggatttaggctgtggcgattttcgtctgcataaaggcactctggttgctgttcagtagccaacatgattgattagggaagtggtggttcaatcagaataaagtattccccaagtattctggatccctaaggaccagtgcttccaggaatacggtactgatgattccattttgtggctattttttgacagtcctcagactgtcaaatagaatctggcctaaaaggaggacaaggctctctgaagtgcagcccttcgggcagctgaaggtctttctgcagataacttttctcagatcgaattttttggctacattgatactcttcggctctgtccttgccagaagttcggaaggattccagcgccccacaccttgcttgattcaccctcatcccctcccctaactggagaagccgctgggtcccgcgccaggctcgcggtggcttcagagtagcaggggagcaggcggctgatccggaggccagtgtggggccggcaagcggtgactgtctccagaggagcaaaggagccgagtcttgtttttcttggatcaggtttgggacttttattctgtctgaccatttccaccacttgcctcacaagagtctctgtctcgaagcacaggaccgaagcaaaatgcctaatgaagcgtgcctgaggaaggggcaggggcttgcaagtgacttgggaagaaggactggggcgaagggagaaaggaggttacgagttcgcacgttctcacaaaaccatttgaaaacatgagctggagacgccaaattctgggacccacgaaaggctttggagctcgctcgggctcctcgaagttgggcgtgcgtcgcagaacagtgctgggcgctctctttcagcattttcggcttttttcaagcccttgcgtagggtcgggaaggccgtgggtgggctcagtcaggctttaggtcgccaggaacccggctggtcctctctcgacttcttagcgtggggtcccgccggccctgccgcccgtggccgccgaagttcccgccctcgccgagggccctcgctccggagtggggcgcagacgcggccgccggcccgcagtcccccgcaggtgccgcccaggactagctgcccggcggaggccgagcacgcttggcggcagctgagcctccaccccaagccccagccggaggggcgcgtcccctgtcctcctcccgagcgagacgaacgctcagcagctcgttccctgggcgccaagaccgatttccaagtcgcccactttccccctcgagggagctgttggcgcttctccagaagcctcctcggctcccagctccagcccctaaaataaaagcaccttgccagagagcgggggaggggagcagctgaacgaggagaatgaaaatactgggagaacgaccccattctccaggaaaaggtaatgaggggaagtgaaacagtgtgaacttactcggaaatgcaaaccgagttcaactcacccaggagcaaacaaacgacagcaagacaaatcagccaccgcactcgcggcttcccagaaagggcctcatgaatgagaatgggttgctaggtttccttccctctctcctgacaatcgcttcccacaagacttccaccgccgaaagaatacaggccgggcctggtgactgcggagtgagggaaccgcgccaggcccacgaggccgctcgcgaccgctcccgccttcaggaccctggagagcggccgccgcgcccctgggacccacgcccaacccagaacacccgcgctcgcctcccgcgcctcaccaccccagcactttattcgctgcttcccgcctccaccttcattttttttggcaaccaccgctcttgtttttcacagacagattaaattgttttttgtttggcatgagggggtgtttggattggccgagctacattccggtttgtaactacactaaacgttagtgtaccaagaaactaagagcgtctcaaagatgacagtctgaacgtggcaggtgaccttaaaaagccactgagttcaacccctttataaatgaactcaaaaaataaagagacattcccaaggttagccattaagttagtggcaaggttgagtgtagaaccgtgggtttctgacttctaaactagtgcttccctccactttccaaaagaaaaaaaatatctcattgcttaggtctcctaagcaacaagtggaaggtggaaaggccggtgttcccgggaataagaaggacacatggagtttggaaaggaggtctgcagagggttcacttgtagtagcagccctaacatggaatcccggtgtccccagctccacgcaacatacctacagccgcactggccagtccctttttccaaccagcctgtggagggtctgaggcccttcagccaccttcagccactatctggaccttccatagacaacaatcccaatagaatctagtagccaaggccaactctgtgcctctggcaggcagagccctgggcacttagggagatgggaaagggcagggggaacaagggaagaccagagaagggaggggaagagcaacagttacaaaagtgaactaagattttcatccaaattctgaagaaccaggcgatgtgaacacagacccttctgcataccgcatgtcacattcagcgcgcatggtagtcccctgggaatgttaccatgcagattccgatgcattggctgggtggggctcaagagtctttatttctaacaagctcctaggtgttggcgaagctgctggcctacggaccacacttcaagtagcacggagttaggaaatacaggagtgggaggggaaagaatctaactataggcctttccttctgctttcaccgaccttctcttgcacccccaaagtaacgcttcaaaattctgtagtaaagagccccatctaagcggccggacaccacagtaaccgtatgctggttttgtttctctctccccaccccagtccttcccgcctgcacagctcccagactcgcccgccgccccgaagctgttcggcctcctttctagcccgctttccagcctcgcaaggttcttctctcaccttctccggcgaccccctcccgaggctccccggaggcgcctggacttctcccccctgcttcccgccctgccggccgcccggctctcgagggggcacgaggagctgccgggccgcctctcgctcctgctcggggcggcgctggcactgcccggccgaccctcggggggtcgtccgctgaggcccccccatccggtagccaagcccagggaagaagacgccaccgctgggcagagctcgcctatgccggtgagtaccgtggtctccactacgccccacacccagcctccccaggacaccagcctctcccgattcttcctaaccccaactgacccgctccgctggggctagcagtagggagggtggcaaggtcgggaaggccgggacgtggctgggcaagtcctaggacgggacattggcggctcccgggacaccgcccctccccgcgggaagacactccaagctactttttcctgggccatttcctttccatggtccaagaaaacgggagggagccctcgctcttccccgaggctgcctttcaaactctcagcgtgtcgctctcctccgcctactccgagcctcccccaaacgcgcctccgcctgctcccagcgctcgctctcccactcccctgccctctcggcaggcaagggaggaaatgacgtgatgttatttttgtgtcaggtcagtttccagcttcagcttagccctccgggctccagggaactaaccccgcggccccaccgggtcccactcccgaagggacgctgcgggctacggggacacgcggtgctgcgagtccggagagctgggcggctgggttccccctcccgctgccccctggtctactcctttccccggactccggagtccctggagaaggggacgcggagggcgactgccgagggtctcagcgggatctggagtcaggggttagttcccccccttatcccccgctcggttgctgggtggggcctccgcgctctggctagctgggagggggcgagggccgctttccagggcgggaagaccggaggcctaggctgcgccggggtggggcggggacagagctcagagaggcgccccgggccggggagaaggtagggggctgccctccagagacgcgcagtccacagacgcgaagctctggggaccaagcgccccctccatgcctgccgcccacccccgctccttcctcccgctcccttcattcacgaggtccgagcacgcagtccagcacactctagtctcgctcggccccgcgcgccgaggggaggcgatgacacagagggcttcgcggacgccctctacgcgcgcctggcttcgcatccacactcttgggacttgctaatgcggggctggagcagtggggctgcggccggggtggaggtcgcgccccgcgtggggcctcgggggtacccctagcacccgcggcggtggagtgcgccgccgctggagggaggcgagacgtgggattgcccggccgggtaaaaggagtgagggggcggggaggaggcagagcaaggggaggaagaggccgggagaagagggctagagcaaagaccgagagccggagaaaggcgaaaggcgcggtgagcaatcgccgacgtagagagggcagccctccgcgctgcaatattgagaaggcacccgcgggacgcatgcgcacggcggacggaggcgagccggccggggcttcctccccggccggcagggtggacggtgggctcgtgagtatcccagttcctcgaactctctttcttcgtctcgggctcgccctgaggcttcgtgctggaaagtggccgaggctgggaggggcgcgccgctcgtccggacctcagggtgtcgccgttgctgcggggcgggagccggtgcgagtcgggggttccttcccgcagtgcgagtttgggggagtggggctgcgagtgcgtccgcgtgcgaagaggggcatcgcgccaccaggatcaatatgtcccgggcctgccagggcgtccgcgattccacctctgcggcttcgcgtcggtgtcttggtggggaacgcgggagtctagtctttagaccctagaaatcgcattgaccacccgaagcgtatttcggaaagaccaggcgggtggaagcgtcggctttctcacgggatagggagaggacaaggaaggggttgggcgcccggggctggtggtttgagcgccgctgggaagggtaaggagacagagcctcctggaatcgtagcgcctccttttaggagaagtgcaaccagggcaggggcaccgaggggcagggtgaggaagtggacgccccacgcgtggaccctagaagaccgactaggtatgggcgttcactcggagcctctgttcacgctcttgaaaaccgaatgaacagagaagtgccctccacccttcgcctgcgccagggcagttaacgtgcaggcgccgccgggattttcctggaacaaacccgggcacttgatcttccgcaccctcggagctgccctgggaagtcgaaacaagtctgggcgcccggactgcggagactggaaagcagggggcggagggcgggagactgggggcgggaagtggaggtgcaggctgcagctggggaccgcggtgggcgttggaggggagggtctgtgtgcgcggctgtcctccagcgctgggggagcggacgggccaggggcctctag

SEQ ID NO: 11760 - DNA, 6000 bp, Homo sapiens
atgtatttcaagtgaaagttagtttttaaatagaaactatcctctacgtcatgcgcataaacttccctaaattaagtcagtgcatgatcaaattcacaatgttacatggagggagtgaagccatgatagagctttcaagggttagggaaagaagtattagggagagaacttcatgagggaaggggttcataccactggaagttctaactgcttcctcccaagttcctctttgcttctgtactcttctatgcctctgctcagcccagcctcctccagctggggtccctctactgctgtttgttcctcaaactgctaatgtctcagcatcaggtcagtggccacaagccggcctatcccccagtatgtgtacagggcccaggcaggagtacaaaggaggacaccatgctatatgtctacatagctaaaattcatatatcaaactaacaaactgctacttgaaatatgttctatcctcctaccttgaaaaaatgtacctttataaagacagaaatgtttttaatgtgtaaagctatgttttaatgagtaggcaaaatatcaaaagtagataaattcaattattatggcacgtgtttgcatagtccggtgataggctggagatgtttgggtaagtaattaaataaaaacttacacagtttacaagttacatatttacccctgtgaaatttactttcttcccttcattttagcaaaatcccttaattatattgtcataataaaaattttcatatagtcagtcttctatgaatactaatgccaaattacataacttttctgaattattgcagctcttgggatttttcaactcgattttaacttggagaaactttgctctgctaaggcagtagcaactggaattatcaataaaattcttaaagtcatacctatttttaaaaatgagaaattaaggtttgtagtgtggcatgtaaggagcttagctgttactctgtcctgacaaaaagtagaaagttgaacaaactgaaaatcaacaactcttcctagatctagcagagaagtaaggacacagagcaagccactgcccccaaagttggagagacaaacaggcagatacacagaatcacaatttactagagcagaaacccgccggcagaaacctccaggggcatgagtacagggtaggaagaccagaactgtaactgatgaattgctagaggctcagggtggtcaagactaagaatttaaaactccagggggtcagctgggcacggtggctcacgcctgtaatcccagcactttgggaggcctaggcagggagatcacgaggtcaggagacagagaccatcctggccaatacggtgaaaccccgtctctactaaaaatacaaaaattagctgggcatggtggtgtgcacctataatcccagctactcgggagggtgaggtgggagaaccatttgaacccaggaggcggaggttgcagtgagccaagatcacgccactgcactccagcctggcaacagagtgagacacacacacacacaaacacacacacacacacacacacacacacacacacaaagggggagggggcctagtctttggagggcacactcacacttttgtaagttttacctccaggagttcttccaggttctctcagtgaaaatcaaagaaaaatcacctcctacatccaacagggagaggtgaaaagaaccattttgaaatatgtcaaaatattctgttctttttaacaaggcctgccctcaagagaaactaccagagcctaacctattacagttttagcagagcctaaccaagctgatagatgggaaatatccaaccccagccccctctagacatcctgtcccacccaagaagggggataaaaactaagaagcacttgtgaagtttccagcctagggacacaagctcactaagactgaaatctaatcataggtctatagaatgtttcccctcctcccacatcttaacaccgcatcactgaagcccatttactccagtgcctttcacccagtgcatcatgtccagctttcaactaaaaattacaaggcacactacagagcaaaaaacacagtttgaagaggcaaagcaatcatcagaactagactcacatacggcagagatgttggaattatcagaccaggaacttcaaataactgtgattaatatactaagggttgtaaaggtaaacgtagacaacttgaaagaacagacggttaatgtaagcagaaatgaaaattttaaggaagaataagaattgctagagatataaaattctataacagaaatgaagcatgcctttgatggattcattaatagactggacatggttgagaaaagaatctctgagtttgaggatatgtcaatggaaacttccaaaattgaaaaataaagagaaaaaggacttaaaaaaaagaaacaatatccaagaactgtgaaacaactacaaaagtataacatatgtgtaacaggaataccaggagaagaattagagaaaggaacagaagaaatatttgaagcaatagtgactgaaaatttccccaaattaatgtcagtcaccaacaatgttagaccaactctctaaaatctcttccagaagatagaagcagggggaatacttcctagcagcattgccctaataccaaaaccagacaaaaacattactagcaaagaaaactataaaccaatatatctcttgaacaaagatgtaaaaatcctcaacaaaatattagctagtagaatccagcaatgcataaaaagaattgtacagcataaccaagatttatcccaggtatgcaaggctggtccaatatttgaaaattcattcatgtaatctaccataccaatagactaaagaagaaaaatcacatgaccacatcaatagatgcagaaaatgcatttgacaaaatccagcacattttcatcataaaaactttcagcaaactagggacagagggggaactttctcacttgctaaagaacatctacaaaaaccctaaggtaacaatatacttaatgatgaggagcttacctatagaggaacaaaaataaagaatgacatccaacttctcagaaaccacgtagacaagaagagaggtggagtaaaagtgttcagagaaaaaaactaccaacctataattctgtaccttgcaaaattagcctttaaaagtaaaagtctgtttcttctacttttggtcaccactgtcccctagcatcagcccagaggaacaatgcaaagagaaagagaaggaaaatgaggaaaaccgtcagatagttccatatttacagatgaagaaactaaagaggatctgaataatttgctcaagttcacacagcaagtaaatgctggagctaggttttgaacccagggattttgaactccaaagtttgtgttcttaatctcgtaccattgggatgaaattgtacagtgaaagacaagcgatgatatagatgattgcctaagtattccaaatccatcctgacaaaaaaaaaatcattctagttcatcactgctcactatataattaaatacaatgaaaaataaaacaggctttatttacttctgtataaatcaacttactacaatttttccttccaaataatggaacaagtattcacttgaatttcaaaactatcgttttcaaatgatactttaaaagtatcgttttcaaacgatattttaaaaagtatcgtttttaaatgatacttttagtgatacttcactgcctggtagtcactagagcctgatcacaaaaagatctcattaagttcgtagaaactggagagaaatagtcttccaatgtagaaaattagaaatttaggggaaaatattcttcctacatagaaatttattctgcaatacatcaactatccagctcttaatgatgttaatatttcttcatcactacctgtctcccaacatcagtaagcttttgataaaactggggaggaattccccactccaaattcgtctttccccacagattccaaaactcttactctggttgttcagggttgtccttctaggtatggaaatatgacattccttttctgcaacaggatgatttatctgacaagaatagcctccatctacaagttactttgcatttttcaaagtacttctacaagttcatttgcttctcatactattctgcctgtttcataggagggccttacaggttaggtgtaaacacttgtaacgaacttggcactatttgacttacagccagtgctcaattaacgttaaccatcattacaactattgtcattcctatattgtgaggaaactatgccccttaaagattagggtaatttatctaatatctatgacagagttggtaccccaaactaggttgatttctacagcagttcaacttcctattagggtttgtatcaataaaactgtgggacccgccagggctggaatcccactgctacctgagcatccagttggtgaccaggctccccgaattaataaaagtatttgttgttgtttttatagcagttgtccaggaagtatctcctttcgaactcaagtcacttgggcaattggctttacaaagcaaattggctccgtttaaggattcttgactcctgaaatccgcaaggaagtgggttcttttagagccagcgccaagagcttcaaaaaatccttctaaggtgaacccctccggacccggatagcgagatggggctcagccttgcgcctcgggggtcgtaacagacggcaaggtggaggtggcttcccggccccgcagccggacctcggcaccccgagcccgttcaccggggccgggtcctggcgggccgcggagtgaggccgggcggcgcagcgcaggcggtgcccgggcgcagggccagtcccgccgccgccgccgccgccgccgccgccgccgccgcgagcccggacctgcccgcccgacctggcggcgcagtctcgcgggatcgctcagctctcgctccccgtgcggctctcgaggcagctccagtcccggacgcaaccccggagccgtctcaggtccctggggggaacggtgggttagacggggacgggaagggacagcggccttcgaccgccccccgaggtgaggcttccacggctgggactgggcaggggccgggcgggtgccgggggaagcggggagggcctcgaggggcgaggggccgcggctgggatgaggcgcgccgggagccgcaggtgctggggaggcaacggcgggacggcccgcacctgagtttcctcggaagcgggaaccggctctgaaaggcgatgccggggccccgcggcgccgcgcaggccaggaacgctgctgtctggctctaggcctggggcaggttcccgggtgtggggcgctggcggaccgggcatcagtgtgtgttggggcgcgggtaattcgtaatccggggcctacagccttcctcccgcaaggggactgccttcgcccttcccccgggacagatttgcgcactttcctttcgacggcagcactacaccctcctagccagtgaaaactgcaatgttgctcctccactggaggaatcctaaaagtctccctctagttggccttacgaaaatcgagaaaactacatacccagaagactgccacaaaaactgactcttcagagtcttttacaagtttaagaactctttgggtcttaaggaatttcccagggccttagttttcttgtacttaataagctttccaacaggggcccttagattgtatgcttatattaatcctttataatttactccgaatcaccagctttccttttttcctccatcttactcttgccattccctctttttaaccctgtcttccatacagcaccaacctcctagcatcggtttcctagaggtgcagcttccttagcaaatgatatattccatgctaaggcaggtggaagagtatctcgttaggacagaattttccgttgtttttccagtgtttgttacctggggtgaaaatcttaactctgcactttgactccacatttgagt

SEQ ID NO: 11761 - DNA, 6000 bp, Homo sapiens
gcaccacattcagcacttctaaatccaaaaacctgaatagttatttctcacaggaaccagagtctcgtgccagtgctctctgttgccaaattttctacagctgtcacctttctgaacattggtggttacttaagactcagtttatttcagctgcctggccctcccgcagcctggattagcccataccaccaatttcccgtctccagacaccaaattttattggcacggctcagtggttctcaaacatcattgtacacaccaaagcttggatttcactttatgactaattagctaagaatgtctgagagagggacccacgtttctgtaattttaaaaactctccagttgattctgaaattcagccagggataagaagcctgagaatagaatgaggtaagtgatggcacaaagtgtagggagctccaaaaaactcagctatcaagataacattttactattaaaatacctttaaaaatcaaaatcactggaaaataatccataataagcaaaacatcaaaaatgtaagtaagggattagcacttggagtctgaggcaaaaggcaaaaatcataatactgatcttgccttttaaaaaaagaaatgttctcccatttttgtgcagttgtttgcacatagggaacatttatattatctgagtttacaaatagaaaacctaccttatgaaatcatgctttgaaaatataattttgcaaagagcatgaaattgattgaaagtttattgagaagatgaaagttgattgatagtaccgtactgaataggcaagtctggggtggtaaactcagaaatgtagcctctccagagttgaaagaacaagtttaggggtagaaggaagcgggaccaaggacagtctgagtcagtgcacaagggagagcgcctttattagaaaacctgcctggtggtcatcagatggttgtctcatcaccagctcaaatgcctcatggccaaagctgaatcataaaatcactcccctgtctccccaaatccctggccattttacacagctgactcttgtaatattctattacttctagtcagaatgtcttcattttccccacctttcaaaggaaagctgtgcttttcttcaaggctgttcctgagaacagaagttctcagaggttacgttgccttagaagccctctctgtgcctcagctgactgccctgaccacccacaaatgccttcctttcatagtccaaaccctgtgattgcacatttttagtgcatatctctctgtaactgtttacaaacctgctgctcccaatagaccacaacctacttggaggtaaaaacaaaattttatgtactagctgcctgacacatagtaggaccttaataattatgtgttaaaaaaaacagagacacagaaaagagactccgaataatggccttgcctgtaagtgttgaagaatggcaataagaaaagaattggagtggaggtggaattgagacagcaggtagcagtatatgggttctctcctctcatcttgacaactcaactataagatttgaagtaagctgtttttaggaggcctgaaggccaactaaactccttaggggaacaagatgggaagatgggatttacgaagtaagacttttcaagaggaattttggtttggaagtggtggtggtagggtgcagtaaggaggaaacaccttcatcttagaaagcatttttcattctgaaaagcaggaggctagacaagagacaagcttttcacagtaatctctgtcctctaggccagggagaaaggcatagggaatatccattgtccagcctcctaaaccaggtggaggagaaaactaaaactcagacaaaaatcctgcttgggataaaagaatgtgcatttggctggtgccctccctgtctctctcaggaacttgggtttgatgcaggggtcagaactcaaacggtggcagaaggcaggtatgcatgactgagagatgctggaggtagtgtggagtgaggaaccggatgcacttcctgcaccagggacccctacaaactcctgaccacaacacccactcagccacaaatgattatttctgtgaagaaatgcaagcccctggttgccagacctttcacgtgtttctgataacaatccctaaaatttaatattcaatttctcaattttgaaaggtaaaaaataataaattgtgttaaatcccttgggcttaccatgtacaggccaaacaatacatgtctgaaggctgaacgtgggctcataactacaaataattgggaaggagaaatgggtattcaaggattcctcaatggttcaacgggtgaaagccattcaatatcatccagaacttcactttcaccttcatctcattgttacccatccttgtgcatgtttttgatatccctatggtcctgtctactcaaaatagactcttccattgacctcttctagaggttttggtgttttttgtttgtttgttgttgttgttgttgtttgggtttttttggtttttgtttttttgagacagagttttgctcttgtcgcccaggctggagtacaatggcgtgatctcggcttactgcaacttctgcctcccaggttcaagagattctcctgcctcaggctccccagtagttatgattacagacgtgtgccaccacacccagctaatttttgtatttttagcagagacggagttttgccatgttggccaggctggtctcaaactcctgacctctggtgatctgcccacctcggcctcccaaagtgctggtgtgatcacaagcatgagccaccgtgcccagcctagaggtctattcttaatccaccagttaccttacaggaaatttagctaagggtatttttcattgtcagttaataaaataaaagtggagaagcatcagcatttgatgtattcagttggtatcttgagaaaagatacatgttttctgagcttccattaaaaaaatagatttaagacaaggcatagtgcctcacacctgtaatcccagcactttggaaggctgaggtaggtgggtcacttgagcccagaagttcaagaccagcctgtgcaaaataacaagaccccatctctacaaaaaaatacaaaacttagctgagcgtggtggtgtgcacctgtagtctccgctacacaagaggctgaggtaggaggatcacttgagcccaggaggtcgaggctgcagtgagctgtgatcatgccactgcactccagtctgggtgacagagtgagatcctgtctcaaagttaaaaaaaaaaaaacaaactgtagatttgcccactggctactttagagaaataataatgctgaagtgtacttttcttcaaaagatgtgtctattaattttcatttcagaggtttggtaacagaatggcactggtatagatttttactagatgatttttccacctagaaataaactgagacaaaacattgctaggtggttcatgtgactggaaatccagaggacaggtgaaggtgaaaagcacccagggccgatagagagattctataaagtggtccagaaataagagttgaaaaacttaacagaccctacgcagtttaaattgatgttcttagctcaaagaggccttttaaaaataattgttataagcatcagaagattgcagctgaaatggtttgaaatcaactttaactaattttccattcacaaaatatgagaggaggaagccaattgtactgattcacttgagaaacagtacaagggttttcatagtagagaaagaggttgatttcagctcagacagatatttcaagcttcaagggccatgtctagactgagaaggatttgctaaccccaaagtcctatcaagcaaggagtgtaaatgtatttcagagcagctcaggtactagagtttctgcagaacttagatgataagcaacgacaaagccagctgcttctagacccctggcttatgatttcagctttccaaattaaagactgtctcatcagcacatttaatagtaaatcctccaagagcagaagactctgaatcagtgaggactgactggcatctgtgagtgtgtgtgaatgtatgtgtgtgtgtgtgtgtgtgtctctgtgtgtgagagagcgagcgagcgtgtatgttctcattaggggacgatctatgatttgacagcctcactgctgctgctcctgctgctgcttctgcttctgccgcggctgtatggtttgtcattagttggaaagggctgtgagggtttggagaaactgcagttttaaagactgagcactgctaagtggtctccctctcaaatagagtagacaagattttctgcaagattagaaacttggaactattaccacttcatctacccagaaaatcaggcagcgctacagaggataaggtaagagaagaaattgtcctctcttgaatctgtggggcagggggcatggggaaatgtcatctcaaaggcttgctattttataccaaagacatctcaccctctgagagcaaaagaggcaacagctaaatttgtaacaagcttgattattgagcttcttggctttttcctctggtatctttttcttctttattatacttttgccaggcatctaagaggtgtattcatatttatttttcagttagcagatatttagtttttttcaactgggcactgtttcaaaacaattagtttttactgtttctctttccttaagcatttttctccattaagagggaactggtccctcttaatgtgagctggtcaaaacagttactccattctacactagagatgcaataaaagaagttttaagaagtacacatgagccctattcccatagaaaaatgggaagtgaaaggagtggaagtgacggttatttgtgattgggacttgatcagaaattgtaacactgttaatgaatatgtactatgacccttcacagggggatggaactgctgcaataaaggtgggcgctggaaagaagatgttttgagaagtcagtgtttccgagaaactttaagcttctaaagatggaaaacgagacagtcagtgaactgaaccaaacacagcttcagccacgagcagtggtggccttagaataccaggtggtcaccatcttacttgtactcattatttgtggcctgggcattgtaggcaacatcatggtagtcctggttgtcatgagaaccaagcacatgaggacccccacaaactgctacctggtgagcctggcagtagctgatctcatggtcttggtggccgcaggcctccccaacataacagacagtatctacggttcctgggtctatggctatgttggatgcctctgcattacttacctccagtatttgggaattaatgcatcctcttgttcaataacagcctttaccattgagaggtacatagcaatctgtcaccccatcaaagcccagtttctctgcacattttccagagccaaaaagattatcatctttgtctgggctttcacatctctttactgtatgctctggttcttcttgctggatctcaatattagcacctacaaagatgctattgtgatatcctgtggctacaagatctccaggaattactactcacctatttacctaatggactttggtgtcttttatgttgtgccaatgatcctggctaccgtcctctatggattcatagctagaatccttttcttaaatcccattccttcagatcctaaagaaaactctaagacatggaaaaatgattcaacccatcagaacacaaatctgaatgtaaatacctctaatagatgtttcaacagcacagtatcttcaaggaagcaggtaagcaaaactgaaactccaagtcaatagaggaaatgtgggatagagttccttggagatgggaaacaacttttccctgtttagctgatggcgaaaccaaaatacaatcatgcaaatgtttcacagtgtaagcttctgcctaacatattaaatccatctctaaagcaactgaagatctaaaaatagatagggaaaatttgatagcacatc

SEQ ID NO: 11762 - DNA, 6000 bp, Homo sapiens
ccacactggtcccccagcaatgggggcaacccatgagcctctcccaccctgtcacctgttgccgggatgcccggagctttctgtcctcatagtggaggcctggcatggggtgggctcaggggtcagcccggcctcaaccttcagggtccctgactgctgcatggaacacgcctttggaggatgaggctggaaaagcctgctggggaaatcaaggcatctgacggagaagcacggagcatggattttgagggaccagggccaggtccaacccccggggctcccaggggatcctcccaacccaggggatcctcccaaccgaggggacctgggagctggtgtggccgaggggaggagggtgagccagcccaggggagccgaggccagaggtacagctgtgcagataccacagcagctgccccagggtggagccattgttggctcaggcctggacccctttctccaaggccgtgactgtgtgtggttctggctaaatgcaccctctggggcacaccctcctctcccagccccgtctctgtccccgctgccctcacatcccagcaagtacagcacgaagcccaggctgtcccacagccacgtggccttgtacaaatgtgccgcatgtgtgtgttcatgctcacatatgcacactcacaggcacacaggaacacatgcacacacatatgcacgggcacacacaggcacacacgtatgcacacatgcatttgtgcacacattgacacacatctgcttctccccttccacatctcagcagaggccaccagcccctcccccatttgctctctggaagtctcctgtgaccctgtccacattgaccttcctcctggcccagacactacacaggcccgcccctgcccccagcaggcagagggacccactcatcctcagggccccactcaggcgctgacgcctcctggatgccaccctgggtgccaggagggatcaggagtctcccctgcacgccccaccccatctcagctagactgtcggccaacactgcagccatgtgacctgggctgcagtgcccggctcgggcctggcgtgggggggacaggagcctgaagagatggtccctggtcacccccggccttggccagctctctgcccgcctgggcctgccttggtgtgagaaggctccggggtggccccgttggagggtggcgggcaggtggggtgcaggagacctcggctggctcagggatgggtgggtctgctgggggcagggcagggggtgagtgtggcaggtggggaggcccgtgcccactggcaggctcaggggccatcagccaagacaacggcctgggctcctgcccagcattgcccagtggcccatccagaaaaggcaggtttgggccagttctgtgggtctcaaattcatatcagctgggccggccttccggccaatatggcctctcccaaggcctgggcggggagcagctcagtccgagatgttctaggggatgctggggagccgggaagtaacctgagccctctctccccacacccccctgacttgctgatggcccctgtggtccctcctgtggaaccccagggcttcaaggtttaagaatcccagggatggacacttctgggccatctcctggccccaagacagtctgccgaggccccaggtccctgccagggcactgggcagttgcgctgcctggcccttagcccctcctccctgaaggtacctcctccctcctccctctccaggccagaagtgggccgtgtgcaccttccatgcctggctggtcctggggcctcccccttccacctcctgagcactctccttccccatggccactcctggccctcatgccactccctcgccatcaccccagggtgaccccagcactgccagggtggcccttctaaggggcggttctgataggggcactggctgcttctgatcccctctgccacctcttgcctacagggtgggcctcataccctaagagggttcaaggcgtggagtcagctggtgacaatgaggggcgaccggtgataccagggccctaggggatgccaggaggtctccactcggctcagctctcaagggcccggggacagtggcaggggtaggccctcgtccacctgctctggggccatgctgggccgtgctgtgcagagagcatgggcggtgacccgcaggcctgagctgcattccaggctcaggtgcccagtaccggctgtgagcctccaccaaggcatggcccctctgtggacctcagcatgcccatctgtcaaatggatctgtaacagggtgcctcagtgacagagtgcctggcacacatcctatctccctgtgaacctgggatggactcttccgtgttttctcaccaagctggagcctgtcctgggacacccctcccaggcctgcacagtccacacggcgttgcggacaccagccgcgtcgtggccagctgggcttatgaggctgcgctccccttccaggctgccaggctgtaccagtttccaggtgggatgaccgaggccctagactccgtgcccggccgcaggcccacagaggctggtccttgtacaccccagctcctgtgcctgctcctggcaccgcaggcccctagaacctgccccgccctgggaatgctatggggtggagctgccagggcctgggatgaggaggggaaaggtgggccttggcatcttgagctgtgcgggtccctctggggtgaaggtggtgcatctggggctgacaccaactcggggtcagggctaacaggattgcctggggcctcctttgcacttggaggggcatatggggcagtgaggctggctgacctgtggaggagtcaaggccacgtgggttcagcaccaggtgggactggcactctgccaggctctgccgacactcagccaggactgggctcaccccgggactgtagcgcaaggtgaggctggggaggccttctggctgtgggacctgcccacagccgctccctctccatgagatggtgagggggcgcccaggacagcccggcttttccatgccttgtccaagcccacccagccaagcgtgtctgggggcaggactggaggagggcttccaggaggcaggggacatggcagcatcttcccaggtctgccacgaatgcgccaggatgggaagattgttttgtaggtttgtccctttctaaaaaaattttctcttgggagcccggaatgtttgccaggaatgagaccacagagggccaggttgggccatgtctgttcccagatccagaagccccagccagcttcctccccctgctggaagcacttcctgcagccccctggctaaaattcccccacccagctcttaatctcttgttgagagcagtggggtgcccatcccactttacagatggagaaaccgaggctttgtggtgagagatgtgtccgaggccactgtgcagtcaggagcacagcccaagtccagcctccggcctcctggctcccatgggctcagagcctctgctcaggctggggccagacctcgaggctgcctgggcccagctccctgctctgcctacaaggctgtgcaggaaggacgccaggaggggactgcagagcagtgaccgaccttgtcttgccagccagctgggcctgggcagcaggaagcggcaagtcccgtgggcgggcgaccggcatttgtgcggtcagcagagcggaggcatccccaccaggaggccgggtggcctgggggagggggactggctacagctcccctccctcctgcacaggctcaactgctgggtgggatggacggcctggccagaggccttgggggtggtgaggagactgaggtctgtaggcagaaggaacttgccaaggtccacagcgaggtggatgcccgctgggcccagggcagccccggatccagggccttcactgtacctctgctcacccgtggcgctgtgagtgggcagtcactcaacctgggccctctcctggagctgggaggtgtctcctggtggcacaaatttagggtcagcctggggctcacgtatgggttctccgacccactcactgtgacgggtaaattatggattctctctgtgtctcagttttcccatcatgaatgataggaagtaatgctagccttgcagaggaagggcagaggtgaggtggctcctggtggctccatcccccctccatccctccccaggccctgtgcctgtagctttagggcacgagggcacacgtgggagggccgaaagagagcttcctggcaggagcaccagctgggcacaggctgctggaggctgcagagggcagtcttgggggggcaccaaatctgaactcccctcaccccaaagatccagtcattgctattgaggctctgcacccccttcctgctctccaagcctttagaaagggctcgggggccagacgggaggctggggaatggcccgagtaacctttctcctgtgctccgggcccacttcccttcccacggggtttgcagaatcttcctgggaaggaggaaggttagagaggagggaccaaggtcagcaggaaagacagagcctgagagagctacaccctccactcacagaggggcagccacgcagagcgtggtgagcgagtgggcaggcaggccagggcccccgggagccacgccaggctgcgtgggcaaaggggtaccaccaaaagccccaggtggactgccagcccctccctgctcaggcttgggtggaggcggaggtactttgttccccaagctgggccgctgcccctgcaggtggtcacattggtgagtggcagacagacaggtggacggagcaggtgcctgggagggtgccagggcctgtgtctgcggcccaaagtcctcctgccctcgttggtagcaggctaagctgcctcctctgagagagcccacccccatgcccagagcccacgtctccccaagtgctcactctgaccctctgctctttctcttccagctgctgctggtggccacaggctggcaccagggccctggactttagaagccgttgctgccctctctgtcacctgaagcggggccctctcccatcccacccttgccccgcctccctgcccccaccgggccggccctgcccgccgccggaccctggcatgtcaagacctggtccgcgcctgcctgcccagcccgcggaaccccggcggccccgcgagctaggatgaggggccaggccgccgccccgggccccgtctggatcctcgccccgctgctactgctgctgctgctgctgggacgccgcgcgcgggcggccgccggagcagacgcggggcccgggcccgagccgtgcgccacgctggtgcagggaaagttcttcggctacttctccgcggccgccgtgttcccggccaacgcctcgcgctgctcctggacgctacgcaacccggacccgcggcgctacactctctacatgaaggtggccaaggcgcccgtgccctgcagcggccccggccgcgtgcgcacctaccagttcgactccttcctcgagtccacgcgcacctacctgggcgtggagagcttcgacgaggtgctgcggctctgcgacccctccgcacccctggccttcctgcaggccagcaagcagttcctgcagatgcggcgccagcagccgccccagcacgacgggctccggccccgggccgggccgccgggccccaccgacgacttctccgtggagtacctggtggtggggaaccgcaaccccagccgtgccgcctgccagatgctgtgccgctggctggacgcgtgtctggccggtagtcgcagctcgcacccctgcgggatcatgcagaccccctgcgcctgcctgggcggcgaggcgggcggccctgccgcgggacccctggccccccgcggggatgtctgcttgagagatgcggtggctggtggccctgaaaactgcctcaccagcctgacccaggaccggggcgggcacggcgccacaggtgagtgactggcggggaaaccttcggacaggg

SEQ ID NO: 11763 - DNA, 6000 bp, Homo sapiens
ttaaacagtgatcggtgtcatcgtgtcctgaggagggcgcgtgtctgggcgggacccacctcgtagtgctccgacagctgcaccagcaccaggggctccaacctgtggccgccgaggaccaggtggaagaagcaccttccgtgggctgcggggagagcggacttagccagcctggccgcccctccgacctcccaagctgcctccccgtccctggcgcaccctcccggcccgttaccatcggagctgagcgccaggcgcacgtagaccagatgcaaggggccctggcacacggtgcggccctggatggagaagtggtacacgccgcgcgtgtggttcagcaccaggcggcgccgcggcagcgacgagatcacgagccacaggcccacgcccacgccgtacacgaggaagacccaggtctcttgcttctgcacctgcgggcgccacgcggagagtctgagcggcgcggggccggccctcaggggaggagggcggtgggggtcgggcccaggggctcacacctctctcagggagctgaagctgaccaggaccacgctgatgatgaagagcagcatccccttccacagtgtgtccaggtagtattcgagcacgaagactgggggtggcgcggcgcgtgaggacgccccggccctgcccgcagccgggggtggcggtgccaaggcttggcccggactagctgggtccgcgcagggctcgcggaggcgacgtctcgcctgcggcctctccgtccccaggagcaccggccggccccacccagggccctggccctgcctctgcccacctggctccgccccattcaggcctcgggcccgtctccctcctcccccgccccgcccttcccagccccgccccgccccgccccgcccagcctcgcgcgcaccgtttggctcctgctgcacaaatgggtagaagctattgttcttgaggcgtctggccaggtggcgctccgggcaggtgagtcctaggaaccagagctggaagcgccagccgatggaggtcgtgggcaggctgccggcccggcccttaggcatctgagtcaggcagaggtggtcagcctggccgctcgtccgctgccgccgcccactgcccacagcggcactcctacctcggtgagcaaattctccagggctgcaggcccaggaaggagcaggagctcacaggcgactgacagggcagcgaggccagggagcggcccagggtggaccgcggatgggttctagaagttctgggcaggttctagaaggggctgctctgttgaccacctcttagggagtccagggtgaggtcctgcggtaggcattaacttcttggccagtccatccactggaggccccctgtatggcctgttcacagtccccatgtgaagggtggatgggtggacaccctaggcctgagctggagagaaatttgcaggcggcgaccactcagtgagccccacagctgggcggggccccaccccctcccaccccccacccacatgcaaccacagacaagctcaccagtgtccccgaggacggaacacacacactggacccagcagtgggcaggcaaaggcatggccacctgcaggctcaagagcccatgggaccaccctgaccccacaacacacaggctctgggccggctgtagccccagtggctccatcaggtataacctgttgcccaaccctaccctgaggaccacacacacagaactcctaaaaatgttttattttaacaaaatgctcaaatatctgaaattgggcaaaggtggagggtgggcaagctggctgaggtgtcccaggtctgtggctgcctagctgggtgaggggctggtgagcagctgctccagacaccactggacttcctccaggccccggtaggcccgcttcagaccccggggaaggcagcggcaggactccaggttgaggtagagcaggcccgggcagctgctgatcacagagctgtggggagggcagaccacaggaagttgagctgttgcctcagaagggctgggccaggctagggagctgtgcctgctggtgttcgacacctggctctgccacccatagccaccaaggccaagcccagttcccctggtgtcctcaggcccaccccacgcaggggcttggacagtatgcatgcccctctgacccctggaggtctcaggccaggcaggacacaacttccaggccccaggcagacacagtgacagccacactggctccagggactggggtaggggatgctgacctgacagtgcttggtgtgacccgggtgcccctgaggttaagagagcacagggctgggtgtgagcccccaggggtgcttaagaaggcagccagggcctgctccaggtccttctcactgaacccctggccactcaagtccagttctcgcagtgtatggcaccacttctgggtcaaaaaggggctgccctccttggctagagtcagccggtctgacgtgccatacaggcccagatgaagctgctccagctctgcagtgaaaggagtgagcataagctacaaggtgacaagggcccccacacctcacccgcccggccaccacccaggactgctgaccccgacatggcagatcctgaaggccagccggcgtgatgcgcgcacagccacgaagatccagtaagcgcaggttgggagagccgtggagtaggcggcccaggacctcgttgctcacaaagttgcaggttgagctcgccaggcagagctcctctaggctagggaagcctggtccgggagccacccctcgtcccggaggcttgggcagccacatcaggttcaacagccgcagcacctgggggcaaggtccaggctgtagatgggggagggtgtgacaggtgggagaggcagggcgccaggtacctggagctgagggcagcctttctgcagagcctcgacaggcagctgaaggggaatgctattacggttgatgccggtgctcacctccaggacctggagctgggggcagcagctgccctgcagagatggggggagggggtaggtcacagggtcagtggcctggcagtccccagctcagcatctgcctctgctcccaccaatgccaacttaccagcagtgcgcccaggatggctgtcgtctgggagctgtaggtcagccacaacttgcgcattcgggaccctgcctcctccaagaagctcaccacagctgtggactccacctggggccccaatacaagagcacccgtcaccccggcctgggttttttcagggccccttgggacacagggctcaccatggagtgctgtaggtccaggctatggagctggcagcaggctttggctagcatgaccagagcgtcagcagtcacaccgtggcagccggagagcttgaggaaagtgagccgaggacagcactcacctaccagctgcggggagacagaggggcagctggggttgggagacgacaggctaagatccacaagggaaacagacaagtggctggtgccaaccccactctaccgccttagctgtgacctcctttctgcccatgccaggcctacttgggtgtccccgcctctgatacctccctgctggaggaaacagcaggaaaagagaaccaggcaggcaagcagacatccccacggagcagcgttgggcccccaaggtgcctgacccacttcctagagtactgaacagtcccagagtgtcacagctgatgtgcaggacagcctggagctctcaccttcaacacggggtgtacctgagacttccagtggatgagggtcagcctctggagctgtgaaaacctgggccgacagcggaggcagagctgcactaatgttcccacacgagtccttcccacccaacaccttggtgcagggagacggaaggagcctggagccaggggtaaggaagagagggaacccctcaccgattgggcataagccactccagggaagcaaggagcttcttctccgccttgaccccgcccttggcaggccggccgaccagcggggacgacagggtcacggtgtgccagagcgcgggttgggaagcggcctcctgccagcggcggcacacgcgcgcagccctgggaggacagcgtgctgagggtgccggcccctccgtaggcgatgcccccctctcgcagcgcagtagacaccccggctcaaagccgggctcctgggactccaactgggcgcctaaggggctgcgctctcggactgagcggtgcgcgctccgatgctttcgccctccgcccccgcccgggccaccgctcggaccacgtctggcccaagccgctacgctcggcggcgggcccggcaccagcgttacctgcccaggaagggcatggggccgtccgccgccaccaacaacccgaaaatctgcaccaggatttccaagggaatgcggtctccccagcccgcgtcgggcccttcctcgggcgtgggcgtgggtgccggtgcgggtgcgggcgcggccgccgcctcggacctgagcccggccttgggcttggccgcggcgctggggccccggggcggctgccggggagtgcggcgggaagcgcgccgctgtgcgcggggccgggcggggccgggttcggacagcaccagcagcatgctgtcggactgcagcaggtggtaccccgagcccctcggcgccagccggtcccaccaccagtcctcggccgagcggggccgcggcgctgcccgggctctgcgtcggacctgccgggaggctggggcagccatgaccaccgacggcgctcggggaagccccagggagcggaacgggcgaggcttatagaccgacaaccccccggttcctctcaacgcccgcccgcccgccgaccagcttccggggcgggacttccggtcgtgggccatgccgggggcgggcccggaaccgccacgggtgagtcgggtcgtggctgctgccgggtcctgcgcgctccggactgaggtggcgtccctgggccggacggcggtgtcccggcgtggcgggaagccggcactggagcgggagcgcactgggcgcgggaccgggaggcgcagggaccggacggctcccgagtcgcccacctgacggtaccgagagggcggcgcccctccgagcagagccgtcccggccactcccctgggatctgacttggctcttgcggtcgcgggcaccgtgaagccctggggtgtgcgtggctcctcctggtaggcgccctttcccggcgtccggcttggggtggtggtggcgttgactccagccccgcctctccctggagaggagggctccactcgctccttcggcctcctcccctggggccgcagcgactcgggccggcttcctgcttccctgcctgccggcggtcccgctgggtacgttttagccaatcctccccatctgcgctcctgcccggggctcccccagttcccctggtctcaccctgttctgactccggctctgcatcctatctgtttctctgtttctttcaagctagaagaagtcttcacttcccaggagagccaaagcgtgtctggccctaggtgggaaaagaactggctgtgacctttgccctgacctggaagggcccagccttgggctgaatggcagcacccacgcccgcccgtccggtgctgacccacctgctggtggctctcttcggcatgggctcctgggctgcggtcaatgggatctgggtggagctacctgtggtggtcaaagagcttccagagggtgagtgggagggaggtgcaggtgtgcccaagactcctgggctgcggtcagtgggatctgggtggagctacctgtggtggtcagagagcttccagagggtgagtgggaggaggtgcaggtgtgcccaggaaggtgggctttggcactcttcctcccttgggcatcatgaccctgacatggcctcctcccttccctgcaggttggagcctcccctcttacgtctctgtgcttgtggctctggggaacctgggtctgctggtggtgaccctctggaggaggctggccccaggaaagg

SEQ ID NO: 11764 - DNA, 6000 bp, Homo sapiens; identical to SEQ ID NO: 1292

SEQ ID NO: 11765 - DNA, 6000 bp, Homo sapiens
cttgactaggtaatctgaatgatatttgctcaaatcatgatttacctctatatttcttcattttccacagttgtaattttacatttatttctgtgtctacttgattaatgtggagagcaggagctatgtgtgggtcagctccctatgtagtacgaccagttcccagaagagtgcttggtaccttgtagaagctaatgaatatttgtgcaacattcatacagggcagagattattctggtgtcggggctcatgtgtagattccatagggagtaaatgtaatgcataaaatttatgccataagttaaagtcattgaaagttgcaacagtgttgatgtcagctttcgactgtgtaacaattaatagcacaagtctagtttgcatttgaacaggtatatgctgttcttctactggagaatcctgtgggaccatagactacccataaaactttgcttttgtggtttagaattgtaactgtaagacttatacatgtttgcagtcctggattgtgggagcaattgagccagcttgttcctctattagccatcaaaattttctgctcagtttagactagtaaatccttttgcaaagactgttgtccagtttttatctgaattttctaatagttctcaaccacagcaaaacttaaaaacaggacaacagacttttaagatagaataagaagaatatatatggtgttttcttacttttgtagtgtatgcgctatagttactgctaaatgatactacagaaaatgacatggttaataattatctaacatcatacataatcttaggattattctgggaataatgttaaatctagtgatgtcagttctgcataatgagaaactctgggtgtagatacagtttcaatcagttcatgacaattaattacttcaggaagcaagaacgacaaccttctatcacttatctttcaaatctcactgttaacctcaagccttcttatcttcatcagggctagggaacaaggacgcatagaataatttcatgaaaagatagactgtgcatttatataaatgcaactactgtattacaattaagcaatacacacactactgctttgtgtcaccagcaaagtaaataaaatactactctgcttcttacagtttggagatgagtcccctggaagaaaagccacagtttgtttttaagagatctaaactttaatgtccaattaatagtgaatgttattaataacatattaaaattccatatgaattaggccaaacaattcaacatgcagggcataaatacattaattcagagtaatttattataatgctctacttctccaaatgtggtacttatcttttttttgaggaaacatagatattgtatttattagacaaaggctttatgtcaaccatcgttagcatattaaaaaaactaaaaataaaaacatgaacaaaaagtaaagcaaatgaagagaacaatgtttccctaaacaaagtatgtcagtaaacaaataattcaaaaaataaacaaatagaaattctggagcagaaaagtacactaacttaaataaaaaaatttactagagtgatttaacagtacatttgagcaggcagaagaaagaagtggtgagcttgaaaatgggtattcaaaagagtataccaaaaagtcgtttaaaccccaaagaaggaagtaacggagaaattgagaagcaaaacttctagatttcctagaagtctcaggtcatcatccagttataaatagatcaaggcatcaagtggagcatggcctaaaattaaagctctatattatgcgttgcctggatgtctgaaatcaggaggaccttaaatgatctaactgcaagttcctcctctcagtggataagatcctctagccatcagtttttcctatctgggaatcatagttttttgtttatccctatgttgaattttcctgccagaccacaattattgaagccagtcaatcacgtctgctgcaggaaccaggtcttatctccataaacgtggttcttatctgactttcatcaaagtaacctattgtgccagttcttgtctgacctctaaactcctctttcttctccccacctgccagacctaatgaatcaggatcttgatacgcaggacataaacatcagcattttaaacaaggctccagggtgattctgatacccaataaaatttgaaaaccacagaatgatttctagggactgagactgttgacaaatatttgtttctagttctaggttttcttctgccagggggcagtgttctctgaaatatggctgggctaataaaccatgttggaatttaatttttcagtctttcttatgcacttcttgtttactgagccagccacatgtgtccttattacaaaatcttaaacaccatagcaagtgaacttctcataatttagttttcttacaaaaggttttggactaattccagtcattttagttgaatttcttaacctactttatgcactgtgaagcttttttttgtttttttttttcagctttaggtaatgagggataattttattttgtagttaatttgatagccgaggtagggactttggtcatcttggtcattctcctgacagttaatttataacaataatcttgtagtaaaaatctgtttaactgtggcaaaatgatgtgtgtatgcacatatatgcttgtgtgtgtgcgtgtatgtgttcatgttaacatgttccttatgcacaacaagctggtaaaagacaaagttctttggcagaacggttaacagaaatagtggctgagggccaggcacggtggttcacacctgtaatcccagcactttgggaggctgagatgggcggatcacctgaggtcaggagttcgagaccatcctgaccaacatggtgaaaccctgtctgtattaaaaatacaaaaattagccaggcgtgttggcatgcacctgtaatcccagctactcgggaggctgagacaggaatcacttgaacccgggaggtggaggctgcagtgagccgagatcgagccattgcactccagcctgggcaacaagagtgaaactccatctcaaaataaacaaataaacaaacaaaaacaaaaaaacaaagaaatagtggctgaggtcaactcttttggatattgggtaacaagcagatcaacttggctattacagcttttccccctgcccagctagtctgcatataagagaaaaataaatggatgatgttcagctcctgaaccctaactttttttccaagggaaccctcattgtcttctagctaggtttatacaatcaaatatcagacaaagtcaaaagttgttagactctggcaaggcaaaagaagaggctgtttttgtttttagaacatttagagcactgtggcatataatgaaataacaggattgccttgatatttttctttggggtttattgttttcctctatcatgtctggcttgtatcttgaaatttaacataaattataggaaaatctttcatggagttaacatcttttataagccttgctaaataccctactccaaatttgttcagtatggcatacagacaaaagcaagaggcttacatataaaaatgtataagcctgtcctctttgcaacagtgcaaaactaaaaggattttagaaaggcaattaacagtttggcagtatgtgtattttctttttttcaattagatattactagattctaagaatctgtaatgaaacccaggcctactgtacaaccccctataaacaagtttttgcttttgtgctatcatgttttatttgagcagagccactactctgttactaatttgttgcatggtaagtctcgtatttgtttacgcacgaacacatgtgctgcggaagaaaagatggtcactggacctgctgaggaagaggccaaaaacaaatctttttccctcatttgaatcctgaaggcatgtaatatttaaacaactttcagatttagagcccttgattttttcttttgaaagtgtgctggttgccaaattgcttagtaaagaaactttagtacccacaatagcctcaaaggacacagtatttggtggctacatttaaccaagaaataactagggaaacaattcttgacatttcaattcttgctgccattgagatttccttcctaaattcaattgctaataaagcttcccatgccatccccttcccccacccatctgcctctcaaaaaccgccccctcctccgccccgcccgaaacaagctgacagtctttacgggaagaagaggcagagactgaagttattttgtccgtcctcccagggcagaaggactttatgctgcgtggctggcatttccagtattttgataaaagttacttctctaaacttgaaccacagcatggggaaaataatgttatcttttatgttagttacaattttgcgaaatttcatcatgagaaactttcaaggaggcagaagtagctgagaatgtgatactagggacagggtcgctcaaactgccagcaaaataaatagatgggaaagacaggaacgttattaggtttataaatgataaaactttccttgcttaaaaaaataaagtggtgaggttgacgccattgaatgactgcattgtaaaccttaaaagcttaaagctggtggaaagcccttgcacagccctgttttcatttttatcggatgaaatgcatttggtttctttttgacaaaccatgtttttgtgaggaaaggaaaatgaacatgcactgttatgggccacggcaatgtaacaaaccctcctgttgccagaggataccacatgaaagtgtctgtgggttaggggagggacctgtaagggggcggggataagggggatgatagcttaagcctcttaggctcagagctgcgatttgtgaacaccctgtgatgtaatcaagctctggacaaatcagaggagtctgtcaacctcccaggtgggattgcttatagttaatagactaaacccagagcctcaaagcagtgcactccgtgaaggcaaagagaacacgctgcaaaaggctttccaagaatcctcgacatggcaaggaggagctcgttccagtcgtgtcaggtgggagaacggaggaatgacgggggacatgcttgatcttcagaatcagtgactgattggcattttcctttttgttgtgcaaattaagatagcaccttattatgcattttggaagtggtaggattgggtgttgatattgaagccatttgaatcacctttgtgtaatttgatttagtcttctccagctgtatttgacaacttggtctctttattctcttagataatatccctgttcacttttgccgttggagtcaatatctgcttaggattcactgcacatcgaattaagagagcagaaggatgggaggaaggtcctcctacaggtaagtgtcaaaactatttgcattttcaattttttaaaaatattacatacggggtaatcaatgtaagcttattaaaatatttatttttaatacaatcttgcagtataactaagttagtcctaaatttctctgggtaaaaccacctatgtgtataattcaggtgggagagtgtggttttcattagagaacatttatgattgtttcataactggctatttccatttttgtactcaaatttgtaaatgttaggatacaattaaaactcttgttcacagacaaggctaaagtagaagtggtgagaacaggtgttggtttaatattggagctacccaaatctgatttgctgtcacatgatataggatgtagtatttgccactagaaagttctgatgtaggaaaaaggaatggaagtaaaaaaggcagtgagctatctttatgaaacttcagaaatttaggactttaagatttacttaaaattggaaaaacataaaagagaggaggtgtttaaagagttttcaggattgatttgtcctcattgtgtgtccttatggcaaaggaaaggtaagttttaatagtgtaccttgacttaaataatagaaccaaagtg

SEQ ID NO: 11766 - DNA, 6000 bp, Homo sapiens
gctaatttttttttttttttttttttgagatggagtcttgctctgttgcgaggctagagtgctgtggcgcaatctcagctcactgcaacctccaactccctggttcaagggattctcctgcctccgcctcccaagtagctaggattacaggcatgtgccaccacgcccatctaatttttgtatttttagtagagatggggggtgggtttcaccatgttggccaggatggtctcgatctcctgacctcgtgatccactcgcctcggcctcccaaagtgctgggattacaggcatgagccaccatgcccggcagtctgtgtgtattctttatccacccattactttctcctagcttagtagtgaagttccttcaggaagtttctccattcccggactctattagggaaaaagccaagtgtgtcttggttctactaccagctatgggttaagagtggacatctctaaaggtttcgctcagagaaggccagagaatcaaagttaaaaaaaaaaccacaaagggtgccaggcgtggtggctcacacctgtaatcccagcactttgggaggctgaggcaggtggatcacctgaggtcaggagttggagaccagcctagccaacgaggtgaaaccccgtctctactaaagatacaaaaaattagccatgcatggtggcgtgcgcctgtaatcccagctactcggaaggctgaggcaggagaatgcttgaacccgggaggtggaggttgcagtgagccgagatcatgccattgcattccagcctgggtaacacagcaagactccgtcaaaaaaaaaaaaaaaaaaaaaacacatacacacacacaaggggaagtgaaactcttgggagaatttttgtgagctcttctcctccctagaaatgacagagtacagcagttaaaaatttggtctctaggccaggcatcatggctcatgcttgtaatcccagtacttagggggcctgaggcaggaggatcacttgaggctgggagtttgagaccagcctgggcaacatagcgagaccccgtctctacaaaaaattaaaaatttagtcgggcatgctggcacatgcctgtggtcccagttactcagaaggctaaggtgggaggactgcttgagcctgggagttcaaggctgcagtgagctatgattgtaccattgcattccagcctgggcaacagagagagaccctgtctcaaaaaatttttcgactttggttccaggagtccacatcttggttccattacttactagctatatattcttgggtgaggtactctttgggttccctgtctgttaaaaaaattgtcctaaccgctaggcgcggtggctcacgcctgtgatcccaacactttgggaggctgaggcgggcagatcacttgaggtcaggagttcgagaccagcctggccaacatggtgaaccccgtctctactaaaaatacaaaaaaaaaattagctggacatggtggcgggcagctagttgggaggctgaggcaggagaattgaaccttgaacccaggaggcggaggttccagtgagccaagaccatgccattgcactccagcccgggcaacaagagcaaaactctgactcaaaaaaaaaataaaaataaaaataaaggtcctcactctgttttgagaactaaatgagctaattcttttttttttttttttttttgagatggagtctcactctgtcccccaggctggagtgcagtggtgcaatctcgactcactgcagcctccgcctccaaggttcaagcgattctcctgcctcagcttcccaagtagctgggattacaggcgcccgccaccacacccggctaatttttgtatttttagtagagatgaggttttgccctgttggccaggctggtcttgaactcctggcctcaggtgatctgcccgcctcagcctcccaaagtgctgggattacaagcatgagtcaccgtgcctggctaaatgagctaattcttacgaaatgtactcaacaagcgcttggcacataataagcactcagtggctgtccactttccttatgtgactcccacggtagttccaatctgctcagtctcagagagatcagctagcagctagctcccagcaaaggcaaacttctttcaagagggagacggcagatatgagcccctagactcttaggggaataaggtctcatagagtccggtagattatattcttgcccagattaaacagactctttcggaaagtcccctctcccttgctctggtcggaattaattcagtcttgtctctgtgatcgccactgaagagcttatcacctctgatcaaggtgtgtttaattggtcaggctccctagcagattttttgaggtctggaactaaattcgagtcattctcctatctcaaacaaacctcaaaacaaaaagattttgatgtgggcaattcattcactcctcactgcacctctgaggagaggtctgcaggaagcttcccaggggaaagtctccctgtggctcagagaagaaagcacttaaaaaggaaccatggccgggcacggtatactagaaataagaagaaaaaaggattaaaacatgctcatggcaggttgcggtggctcactcctataatcccagaactttgggaggccaaggcgagtggatcacctgaggtcaggagtttgagaccagcctggccaatatggtgaaaccctgtctctcctaaaaatacaaaaattagccaggcatggtggcaggcgcctgtaatcccagctacttgggaggctgtgacaggagaatcacttgaacccaggaggtagaggttgcagtgagctgagattgtgccactgcactccagcatgggtgacagagctagactccatcacaaacaaacaaacaaacaaacagacaaacatgctcatggccaggcatggtggctcacacctgtaatcccagcactttgggaggccaagtcaggcagattgctggagtccaggagtttgagaccagcctgggcaacatggcgagatccccatctctacaaaacattaaaaaaaattagttgcatgcaataacaaacctgtagttccagctacttgggaggcggaggtgggaggattgaacccaggagatcgaggctgccgtgttcctgccactgcactccagcctgggtgacagagagagaccttgtctcacacatacacaaaaaaaggaatcagaaagtaagttcctacccttggactctagtctcagtgactcagtttcttcatccatacttgcaaaataagaaagtaacctccacttcatcacctccctgggtgggtaagaagtcaaatgtggtgaccctcaggacagtccagtgttttgtagatgtctccatcagacatttcattcctagtggtggggaagcctcgcctcattaaatgtcctttggcctctgttcagcctccaggagtgggtgttccagtagaattcttctttagactttgagtgtcttcatttagccaaaggaaatcacagaaaagctatatgacccaggccagagatctcagagtcttccttgcctgtgagcaggagggctgcacagccctgcctatgggctgtggctctgctgtcagctctttcctgaggaatgcagcctgggccaccgcctgtgagggctcctgctgggggagtccattccccttctcccttcctccatttgcaatcactatttatttatctttggaagttcaaggaaccagagagcctgcaactgggggagatctgtggagccagggagggaaagtgaagaagccaacatctaggcccctgcctgccgccaacgccaacgggcaagagaagaaagccattccctgcatagtcagggtagacttggctgacaggcacaggggccctagaaaaggcaccaccgcacatcagcagggctaagctcactaaagaatgtggcattcaccttggggaccgcttgggtggtagagtgaaggagggggaacgggagtcctgccccatcccggcagctctattaagcaacagaaaggtgagcttctgtggggaaacagaggaagcagacccctgggctgcacttcttactgcctgtccccagccctggttccggtgtactgcaggctgttttttttttaattaatttatttatttattgagacggagtctcactttgtcaccaggctgcagtgcagtggcacgctctcagctcactgcaacctccgcctcctgggttcaagcaattctcgtgcctcagcctcccaagtagctgggattacaggcgcccaccacgacgcccggataatttttgtatatttagtacagacagggtttcatcattttggccaggtggatctcaaactcctcacctcaagtgatccgcccgcctcggcctcgaaaagtgctgggattacaggtgtcagccaccgcgcccggcctgcaggcagctttatacccaccactagttgtcaaggtcacccctgccaccaccagtcctctgcctttggaaaccatgtgcccctcccccccaccacactctcttattctaatgccacgatttactgggcatctaatgccactctataaactggggagcaggcagagccccatttcaaccccagagatctgctaccccagcaagctaggggctgtgtccaaggtcagacagtaatgagaggcagagccgagtctggaataggggtctccagactcactgcgcagtgctctttccacaccctgctgcaaagccctgctccttctcatctacttttcccttgtcccactcactgtccccgaaacacacacacacacacacacacacacacacacagcgttgtggaaaatgtaggaggcccagtctagcctctagccttgtctgccttggcctttgacctctccttggccgaatgacatgcaccccccgctgagcgaggtcaccgcagcggaggagggtctgctgcctccttgtctcggctgccatcctcctgcggctgcctccaccggagctggaaggagagtgagagccgacttccagactgatcatcgtgtcaggggccaaaggaaacctcggagccttccaccaagttcaacccaaaacagggcgccccagacgtctctgtccaagcccgcgggtccaggagggccccagcagcctggagacgcaagctgcaccggcacggacgagggaaattttgtggaaggtggtggtggtcggctcagaggtctgagatgggttgcggaaaggaagggtcctggcccggggcgcggggacaagcgggagaggagtgttggtgcagggcgggcgcggggacgcagggtcctcgaaccagctggcccgcccccactcggcagagggtctaggcctggccgcgtgtcggtcggcgctagggccccgcggaaggcccgggcgggcggggaccggcggcgggagcggcgcggcgcggagctgcctccatccatggcacggagcggcggcggcggcggcagcaggagcccggcgcgatccgctaggtcccagcccagcgcccagcgagcaggcgacgcggaggggccgggcctccagtgtcccgagggccgggcgctgagactccggccgcgcagctgggagctgcccgcgctgcgctgacagccgcgccgacgtcctccccgccggggcgctcgcaggacatgcccccggggcgcggcggcggggaccccggggctcgcctccgcccagggcccccctccacgccctcgggagccccgggcccccgctgagcactcctcccgcacgcctgggtccctccggccggcgcgcagcccggccccagcgctgtgggtccccgcggggcgatgggttgatgggcgccgggggacgcaggatgcggggggcgcccgcgcgcctgctgctgccgctgctgccgtggctcctgctgctcctggcgcccgaggctcggggcgcgcccggctgcccgctatccatccgcagctgcaagtgctcgggggagcggcccaaggggctgagcggcggcg

SEQ ID NO: 11767 - DNA, 6000 bp, Homo sapiens
aaattgcaatgatgtatgagatttattgccccactcgaaaacatttggtcaatttaggaagttgcctttctttttagaaaatttaacagctttgttaagctgtaattcacataccatgtaactcacccatttaaaaggtacaattcaatggtttttagtatattcacagcactatacaaatatcaccacaatcaattttagcccattttcgtcactctaaaaagaaacctcttatccattagtagtcactttcttcctctccaaaaacccccctgccctaggcaaatactaatttttttatatctcaagatttgcctatccaggagatttctttaataaatgtaatcatacaatatgtggccttttgtggatgacttctttcacttagcataaagttttcaaggtttatctatgttgcaacatgtatctatacttcattcctttttatggctgaataatattccattgtatgatgtaccatattttgcttatctgcttaccagttaatgggcatgcagattgtttcaattttttagacatttgtgtgcaagtcttcgtgcgatcgtaggtttcatttctgttatttgagtagatacctaggagtagaattgctggcttatgtggtaactctatatttaacattttgaggaactgccaaattgttttccaaagtggtcgcaaggccttgcattcaccccagtaatgaatgaaagatctacatttctccacatcctcaccaacactgtcattgtctgtctttttagttaaagcaaatccatttgggtatgaataggtatctcactgtggttttgacttccttttcccaatgtctaataatgttgaacatcttttcgtgtgcttatttagcaatttgtacatcttcttgggagaaatgtttatttaaacacttcacccatttttaattggtattttttgtttgtttttgaattgtaagagctctgtatatattctggattacaagtcccttattatttacatgatctgcaatattctcccctattttgcgggttgccttttcactttcttcttgatgtactttaaagcacaaaagtttttaattttgattaagtctaatttacctactttcttgtgcttttcatattgtatctaagaaggctttgcctaatccaaggtcagaaagatttaaccttatgttttcttctcagagtttcatagttttggctattacatttgatctatgattcatgctgaattagtttttgtaaagagtgagaaatagaggtcctatgtaatttttctgcgtgtggataaccacttgtccccacaccatttgctgaaaaaacaattctttccccattgaattgttctggcacattgtcaaaaaccaatcgaccataaatgtatgggtttatttctggactctcaattctgtcccattgatctacacatctacatacctatccttataccagtaccacacagtcttaattactgtcactttttaaaatttttttattttaatttttaggttctcaggtacatgtgcaggatgtgcaggtttgttacataggtaaacgtgtggtttgtggcacctatcaacccatcacctaggtattaagcctagcatacgttaactatttttcctaatgctctccctcccccaaccccacccccaacaggccccagtgtgagttgttccccttcctgtgtccacatgttctcattgttcagctcccacctgtaagtgagaacatgtggtgtttggttttctgttcctgcatttgtttgctgaggataatggcttccaactccatccatatccctgcaaaggacatgatctcattcctttttatggctgcataatattccatggtgtatatgaaccacattttctttatccagcctatcattgttgggcatatgggttgattacatgtctttgctattgagaatagtgctgcaatgaatatacatgtgctgcaagtatctttgtaatagaatgatttatattcctttgggtatatacccggtaatgggattgctgggtcaaatggtatttctggttctagatctttgaggaattgccacactgtcttccacaatggttgaactaatttacattcccaccaacagtacaaaagaattcttatttctccacaacctcaccagcatctgttgtttcttgactttttaagaaattgccattctgacttgtgagagatggtatctcatgtggttttgatttgcatttctctcttctttttttttttccctgagacagcgtcttgctctatcacctagcctggagtgcagtggcgtaatctcgggtcactgcaatctccacctccctggttcaaacaattctcctgcctcagtatcctgagtagctaggactacaggcatgagccaccacacccagctaatttttgtatttttagtagagacagtgtttcaccatgttagccaggctggccttgaactcctgacctcctggcctcacctgcctcggcctcccaaagtgctgggattacaggcattgagccaccatgcccagcctgatttgcatttctctaatggtcagtgatgtcgagcttttttcatatgtttgttggccacatgagtgttttcttttgacagtgtctgttcatgtcctttcccactttttaatggggttgtttgttttttttcttgtaactttgtttaggttccttgtagattctggatattagtcctttgtcagatggatagactgcaaaaatgttctctcactctgtaggttgcctgttcactctgatgataatttcttttgctgtgcagaagctctttagtttaattagatcccatttgtcaatttttgcttctgttgcaattgcttttggcgattttgtcatgaaatctttgcctgtgcctatgtcctgaatggtattgcctagattttgttctagggtttttatagtttcgggttttatatttaagtctctaatccatcttgagttaatttgtgtataaggtgtaaggaaggggtccagtttcaatgttctgtatatggctagccagttttcccaacaccatttattaaatagggaatcctttcccagttgcttttttttttttttttttttttttttttcagatttgttgatgatcagatggttgtagatgtgtggtcttatttctgagttctcttttctgttccactgatctatgggtctgtttttgtaccagtaccatgctgttttggttattgtaaccttgtagtatagtttgcagtctggtagcatggtgcctccagctttgttctttttgcttaggatcatcttggctatacaagctcttttttggttccatatgaattttaaaatggttttttctaattctgtgaagaatgtcaatggtaattactgtagctttgttgtaagttttaaaattgggaagtgtgatccttcaactttgttctttatcaagactgttttggatattttgggtcccttataatttttttttttttttgagacagagttttgctctgtcacccaggctggagtgcagtgacatgatctcggctgactgcaacctctgcctcccgggttcaagtaattctcctgcctcagcctcctgagtagctgggactacaggtatatgccaccacacccagctaatttttttgtatttttatttttattattattttttgagatggagtctcgctctgttgcccaggctggagtgcagtggcacgatctcagctcactgcaagctccgcctcctgggttcacgccattctcctgcctcagcctccggagtagatggggctacaggcacccgccaccgcgcccggctaattttttgtatttttagtagagacaggatttcaccgtggtctcgatctcctgacctcgtgatccacccgcctcggcctcccaaagtgctgggattacagacgtgagcaccatgcccagccttttttagtagagacagggtttcaccatgttggtcaggctggtctcgaactcctgacctcacgattcacccacctcagcctcccaaagtgctgggattacaggcgtgagccactgcacccggccccttataattttatatgaattttagaatcaactatcaactcctgcaaaagaaaggagctgacatatgatagccattgtgttgaatctgtaaagcaattttacaaaaggaaacttttccagttcatagaccccagtaatacacatcccttacctttgtgcaccctcaaacccaacagaagctattgggcattagttgcctcttgacagaaaggtattctaccttttccactctgtttaataatcttatatttataaagcagtttataaatatgaagtatagtgttagaagccaattcttggcttactcattgggtacctagtcatctcataagaaaatcaatttaacttactccacatgatgtatgtaaaaagaataataattcttgagtttaagtttgggtatgagttttgcatatgttactagctacaaagatgactgctattaagatgaccttttaagaaacctggaaagattaagccaaccatctgcctgtcaattgcatagcccaagattgtcaagtactattggctatcacacaccactaacacaagaatttttgccaaacaatctatttaatttatcactatatgctaagctgtatatcacttggatcatttctttccattttgatttaggattacattttaattaagaatacatttctgcctttagagggcactcataacatacagtacctagacattcaaaataagcagctctaccaggaatagaacatgaaagatctgtggataagctgctgatccacaaagcaggtaatccttttgctttcattagtataacttttggagaagtctccccacagattcagagccagcccagcattaaccaaacaaagagaagcagagtggatcctgtgctaatattgggaaaaccaggcaacaggactcatttggggcctttattgtgaaaacatgccccagctttcccaagataaccaagagtgcctccagaaacatttctccaggccgtctatatggacacagtttctgcccctgttcagggctcagagatataatacagacattcaccaaatcacagaaaatgaaggagacctcagggctgttcctgatatcaaggtaaggtgatttccacaatccatgatcctttcccgtcaagggaaagtgtttacccagaaagaatataaaactatactcaagctttagtgccattgctcacttatcttaatgttttatcaaaaatgttttcaaaccatccccaagggaaatctagaacctagatgataattacctgatctatctagttttctccaatctaaacagattccctttaccaaaataaattattatgtattgcttttttgtttgtttgcttgtttcaggtgataacattcaacaaatctagacagattttgtggctattagtgttagccctaggatatctttctccgatataaatattacatcccatataataatgaaagaaaaattatagaccgctttctacaaaaaattccttgggaaaaaattgataaactaagaacataagaacattaaggagctgaggggtgttttttccaaattcaaagtttccaaaggtgaatttcctaagcatgagtttctatcagtaggtaataacattatttctccaaaaagtgacaattttcctgctggatgttgtgtgtatatttgaaaaaaatacagtttgagtctgtaaatcctcttagctattaatagaaccatctcataaaaggttacttggcatagaatatggacatgtgttaatgtctaacaagcaatgagcacactcaaaattaaatgctgcaaaactataaaactgttcaaatactttaacaccagaaaattcacctgttcttttgccgcggctcatatcctgatatcattatttatttgcaaattctttacaaaattctctaggtctgccctttctcct

SEQ ID NO: 11768 - DNA, 6000 bp, Homo sapiens
ttaaaaaaaggataacatattaaatatttaaaatgaccagatggtaggtttgaatccactgaaaacaaacccagcagggcaaactcacaggcacaaaatgtaactcaaagcattaatagagctgaggctgtttttctttagcattatgaatctcttatttgcaatgactataccagagctccaaagaggcagtcttatacatcaaactgtcattaaaatatgtggctctttcctgcagtgtcatgttactactgcactgaaaattttatttttccagtaacactggaggtagtaattagaaggtctattatttctggccaaccataatggatacaaccataatggacacaacccaaaggttaattgctgtgctacaaacactgcagcaattagctttcagagtagggagtgacagggaatgtatttcaagtgaaagttagtttttaaatagaaactatcctctacgtcatgcgcataaacttccctaaattaagtcagtgcatgatcaaattcacaatgttacatggagggagtgaagccatgatagagctttcaagggttagggaaagaagtattagggagagaacttcatgagggaaggggttcataccactggaagttctaactgcttcctcccaagttcctctttgcttctgtactcttctatgcctctgctcagcccagcctcctccagctggggtccctctactgctgtttgttcctcaaactgctaatgtctcagcatcaggtcagtggccacaagccggcctatcccccagtatgtgtacagggcccaggcaggagtacaaaggaggacaccatgctatatgtctacatagctaaaattcatatatcaaactaacaaactgctacttgaaatatgttctatcctcctaccttgaaaaaatgtacctttataaagacagaaatgtttttaatgtgtaaagctatgttttaatgagtaggcaaaatatcaaaagtagataaattcaattattatggcacgtgtttgcatagtccggtgataggctggagatgtttgggtaagtaattaaataaaaacttacacagtttacaagttacatatttacccctgtgaaatttactttcttcccttcattttagcaaaatcccttaattatattgtcataataaaaattttcatatagtcagtcttctatgaatactaatgccaaattacataacttttctgaattattgcagctcttgggatttttcaactcgattttaacttggagaaactttgctctgctaaggcagtagcaactggaattatcaataaaattcttaaagtcatacctatttttaaaaatgagaaattaaggtttgtagtgtggcatgtaaggagcttagctgttactctgtcctgacaaaaagtagaaagttgaacaaactgaaaatcaacaactcttcctagatctagcagagaagtaaggacacagagcaagccactgcccccaaagttggagagacaaacaggcagatacacagaatcacaatttactagagcagaaacccgccggcagaaacctccaggggcatgagtacagggtaggaagaccagaactgtaactgatgaattgctagaggctcagggtggtcaagactaagaatttaaaactccagggggtcagctgggcacggtggctcacgcctgtaatcccagcactttgggaggcctaggcagggagatcacgaggtcaggagacagagaccatcctggccaatacggtgaaaccccgtctctactaaaaatacaaaaattagctgggcatggtggtgtgcacctataatcccagctactcgggagggtgaggtgggagaaccatttgaacccaggaggcggaggttgcagtgagccaagatcacgccactgcactccagcctggcaacagagtgagacacacacacacacaaacacacacacacacacacacacacacacacacacaaagggggagggggcctagtctttggagggcacactcacacttttgtaagttttacctccaggagttcttccaggttctctcagtgaaaatcaaagaaaaatcacctcctacatccaacagggagaggtgaaaagaaccattttgaaatatgtcaaaatattctgttctttttaacaaggcctgccctcaagagaaactaccagagcctaacctattacagttttagcagagcctaaccaagctgatagatgggaaatatccaaccccagccccctctagacatcctgtcccacccaagaagggggataaaaactaagaagcacttgtgaagtttccagcctagggacacaagctcactaagactgaaatctaatcataggtctatagaatgtttcccctcctcccacatcttaacaccgcatcactgaagcccatttactccagtgcctttcacccagtgcatcatgtccagctttcaactaaaaattacaaggcacactacagagcaaaaaacacagtttgaagaggcaaagcaatcatcagaactagactcacatacggcagagatgttggaattatcagaccaggaacttcaaataactgtgattaatatactaagggttgtaaaggtaaacgtagacaacttgaaagaacagacggttaatgtaagcagaaatgaaaattttaaggaagaataagaattgctagagatataaaattctataacagaaatgaagcatgcctttgatggattcattaatagactggacatggttgagaaaagaatctctgagtttgaggatatgtcaatggaaacttccaaaattgaaaaataaagagaaaaaggacttaaaaaaaagaaacaatatccaagaactgtgaaacaactacaaaagtataacatatgtgtaacaggaataccaggagaagaattagagaaaggaacagaagaaatatttgaagcaatagtgactgaaaatttccccaaattaatgtcagtcaccaacaatgttagaccaactctctaaaatctcttccagaagatagaagcagggggaatacttcctagcagcattgccctaataccaaaaccagacaaaaacattactagcaaagaaaactataaaccaatatatctcttgaacaaagatgtaaaaatcctcaacaaaatattagctagtagaatccagcaatgcataaaaagaattgtacagcataaccaagatttatcccaggtatgcaaggctggtccaatatttgaaaattcattcatgtaatctaccataccaatagactaaagaagaaaaatcacatgaccacatcaatagatgcagaaaatgcatttgacaaaatccagcacattttcatcataaaaactttcagcaaactagggacagagggggaactttctcacttgctaaagaacatctacaaaaaccctaaggtaacaatatacttaatgatgaggagcttacctatagaggaacaaaaataaagaatgacatccaacttctcagaaaccacgtagacaagaagagaggtggagtaaaagtgttcagagaaaaaaactaccaacctataattctgtaccttgcaaaattagcctttaaaagtaaaagtctgtttcttctacttttggtcaccactgtcccctagcatcagcccagaggaacaatgcaaagagaaagagaaggaaaatgaggaaaaccgtcagatagttccatatttacagatgaagaaactaaagaggatctgaataatttgctcaagttcacacagcaagtaaatgctggagctaggttttgaacccagggattttgaactccaaagtttgtgttcttaatctcgtaccattgggatgaaattgtacagtgaaagacaagcgatgatatagatgattgcctaagtattccaaatccatcctgacaaaaaaaaaatcattctagttcatcactgctcactatataattaaatacaatgaaaaataaaacaggctttatttacttctgtataaatcaacttactacaatttttccttccaaataatggaacaagtattcacttgaatttcaaaactatcgttttcaaatgatactttaaaagtatcgttttcaaacgatattttaaaaagtatcgtttttaaatgatacttttagtgatacttcactgcctggtagtcactagagcctgatcacaaaaagatctcattaagttcgtagaaactggagagaaatagtcttccaatgtagaaaattagaaatttaggggaaaatattcttcctacatagaaatttattctgcaatacatcaactatccagctcttaatgatgttaatatttcttcatcactacctgtctcccaacatcagtaagcttttgataaaactggggaggaattccccactccaaattcgtctttccccacagattccaaaactcttactctggttgttcagggttgtccttctaggtatggaaatatgacattccttttctgcaacaggatgatttatctgacaagaatagcctccatctacaagttactttgcatttttcaaagtacttctacaagttcatttgcttctcatactattctgcctgtttcataggagggccttacaggttaggtgtaaacacttgtaacgaacttggcactatttgacttacagccagtgctcaattaacgttaaccatcattacaactattgtcattcctatattgtgaggaaactatgccccttaaagattagggtaatttatctaatatctatgacagagttggtaccccaaactaggttgatttctacagcagttcaacttcctattagggtttgtatcaataaaactgtgggacccgccagggctggaatcccactgctacctgagcatccagttggtgaccaggctccccgaattaataaaagtatttgttgttgtttttatagcagttgtccaggaagtatctcctttcgaactcaagtcacttgggcaattggctttacaaagcaaattggctccgtttaaggattcttgactcctgaaatccgcaaggaagtgggttcttttagagccagcgccaagagcttcaaaaaatccttctaaggtgaacccctccggacccggatagcgagatggggctcagccttgcgcctcgggggtcgtaacagacggcaaggtggaggtggcttcccggccccgcagccggacctcggcaccccgagcccgttcaccggggccgggtcctggcgggccgcggagtgaggccgggcggcgcagcgcaggcggtgcccgggcgcagggccagtcccgccgccgccgccgccgccgccgccgccgccgccgcgagcccggacctgcccgcccgacctggcggcgcagtctcgcgggatcgctcagctctcgctccccgtgcggctctcgaggcagctccagtcccggacgcaaccccggagccgtctcaggtccctggggggaacggtgggttagacggggacgggaagggacagcggccttcgaccgccccccgaggtgaggcttccacggctgggactgggcaggggccgggcgggtgccgggggaagcggggagggcctcgaggggcgaggggccgcggctgggatgaggcgcgccgggagccgcaggtgctggggaggcaacggcgggacggcccgcacctgagtttcctcggaagcgggaaccggctctgaaaggcgatgccggggccccgcggcgccgcgcaggccaggaacgctgctgtctggctctaggcctggggcaggttcccgggtgtggggcgctggcggaccgggcatcagtgtgtgttggggcgcgggtaattcgtaatccggggcctacagccttcctcccgcaaggggactgccttcgcccttcccccgggacagatttgcgcactttcctttcgacggcagcactacaccctcctagccagtgaaaactgcaatgttgctcctccactggaggaatcctaaaagtctccctctagttggccttacgaaaatcgagaaaa

SEQ ID NO: 11769 - DNA, 6000 bp, Homo sapiens; identical to SEQ ID NO: 1290

SEQ ID NO: 11770 - DNA, 6000 bp, Homo sapiens
aaaataacctatatttgaaatttcattgaaatgattttaactaccaaaatgctatatgctacaataagatgaattcagttgaaatttgtgctttatttgctaaatatttgagtccacattttttcagaatgattctcaaaagctattaaatgagatgaccaaacattgagttaatagttcaagaaatggtgtattgctcctggtttcagagtgtaatggtgaatgttcaaaaatatgcttgcttttgattattggcgcaatctttttctttttgaccttctatgctttttctgtgaccccttgttcggctgctcttccgggcctacaggcagagctttggctggctagtctctaccttcagatggcaaagtatcctgaaatgcagggaaatttgcacctctacctcccatcctcttaataacctcaggctaaaatttctaaattcaggctaaagtatggctggtcagtgaaaacttagctttcatgtacctctaacatttgaagaaggaaatacatgcgatataatcactggatgaaaacccagtttgactaaaccctactcttctgctcctctaacctgctgcaattggaagggctcatctttggagtctttggaatgttgaggtctcttgcaaatggcatagagtttgatgggccgacttgagcgctagcagaatgtattcagtgaccatgaaacggaaaatcctcttttccttttgctgcttttcttatggagatttgcctaaaactaggagcattaaaaaacaaacaaacaaaaccaaagtctttggggctgtgtcttttgattgctttggtggagagagaggatgagacagaaacagaagtgcctttgccatggcttgccctggaaacagtgaaatcgcatggcagatgttccccttcttggatacactaacattgttcctcctcccgccccttcctgcatctgaatggctctcaagacattccccccacccaccctccgagagaagtcagtgaggtagacagcaaggcttgctgctttaattcacctttgcaccatcagcaaatcaggggcctgtttttcctccagcatttggaaatcccaaaaggttatcttcagtttatgtgtcaacttcactgctctctggattttcaaaacaaaacccatagcatgcaacgccccttaaaagcaggtttctgatagcaagagcataaggagactctttcttggtctgtatataccaagacaaaaaagagatgactttttgatgactttttagattttacctaattttaaaaggactttaacttagagttcctctgtactgaaaaccttaattgtcagtgagttctctctcctgctgaaagtcctgatttgtgggagtacgtttatgattaaggaggattacttattatttatgtttcattccgtccttggttttaaaatttttcactggatccttgccaatgaaggtgacagttgctttgacatagttgctgacgtgaacagaaagataactgtcagattctgaattggaatcacttacatgaacctcattgtcctcttgaaatgaccaagtggctagtatttagcctacttttcagttagttctttataaatggagagcttttcataaccaaagaccagtctctccctaatgcaggagttatggaatacagagcttgtctaatgccaccttcccatacatccataaatatcagccaaaagaaacccacatgactagattttcttaaattggattcttgttctcagcgaagaagctgtgacaacagtatcaacatcaatttaggaggcttctctccatagagttcctctaatcatccatccctcattccaattttttctcacttaaggagccttagttattctgagactctgctgatcccagatgggaaagtgtaagctttatatctgactcagagggacagacgacttctgagtccagacatctctatccgccagtacaggagagtagttatggctcaccttttactccggctaagagacctaagaggaaagttgcccctaagaggagacaggaaagaccagttgctcctccaaagaaaagaagaagaaaaatacataggatggatcattatgctgcggaaactcgtcaggacaaagtaagtttatctattgttccaaagctttgtggcgggcaggtctgagttgaaggttgccttcagtgccttggttggaaaatcggctgagcaagttttagaaaaactctggtgcattgaccttggctttgagtccagaagaatgtggtacttcagaggttaacactgatgtgaagactgcctgaactcaacatgacaggaaaaaaagaagtcttttcctttttttaagagttagttgccctaaaactagtattaacatttaggctggagtgactattaagagtgcacttattcacagaatcagtcacatggtttgtggccctggttcttgagaacaaccctgcaaggtaaaaggaggtattctcaaagacaatgtggattagaactcaataggaagttggcttagattaggggtctgtaccttcagagatcagaaaaggtgtaggttatagagaaggaaatagctaagacagaaagaaagagaaaataatgggcggatagagttgtatgtaatttccacaagtaatgtctactcttcccagtatgttcagaagagcctatcggttgttgcttttcctaaaacctttgaatacctctgaggcagtatcttatttgtgatcctctgaactgatccctaagaagtaggttctggattttacctgagtcatcctgctgagtaaaggaaaataagtcattgccaaagatcaaaacacattgttcatttggtatttctttacctagacagagatcttggagcagagcatgattttctcagaagcaaataccactttgttccacacccgttagtcccttccgattattctgcacatgtctttctgaaactttcaactgtggcttcctccttgggataggacttgaaatactgactcccgtcatgaagaaaaaaacaaaagtttacacctgatttcccaatgaaataacaggaggaaaggtcttgattcatctgagaagatgctagtggaagataatattatgtgtccgagtaaaaatgatattcacatcctttctgttcttatcttaatcatcttgggtatatttatgtgattgttagctaagctataaaattcatctaaatatactccctgtatctttctattctttgtctgatcagatgtttcttaaaaatctttccattgcacagctaaagatgaaagggggatggagagcctctagtatgtgaggacattcatgctgttagaaacttccatttgaagtaagaaaatgagatatgggtaatgttttttaggctttggaaatggtcttcagaaaagaattgagttttcatattttgttaaagaagaaaccttctagaacaaactcatggttcacttctttttaagttaggactcttatagattcttgtttcactcaaaatcagctttaaaagaactaaagtgagaagcaataacttgtttcttagaataggttcttctgttaagaatctattgctttcagatgccaacagttaaattacttagaacaagatggatctcattgtattaatgatattctaatttattatccagtgcaacgttgtgattttaacctcagaacagctttgaattcacttagcgtctatcttcttgccatagttcaaaatctaatgtgatttcacttagggactttctgtttactctcaaaactcttggatttaaaggatgctgtcacatattagaaagtcgattttctctcttaaagaattttcattaacaatatttttgacatttttatatcaaagaatctttaaagggattggatgaggagaggttttaattctgtcaaaagaatacaaatataacgtgcttagaccagatttcattaagaatggcaggcaaatctccccagacaaagctctgcctctgggccggaagttttctttccaaaatgttctaggggtagaagatctatgagagactgaaagggaaagaaagaaaaccctgtggggactaacttgcttctttttcctagatgacaaatcctctgagggaaatcgacaaaattgtggggcaattaatggatggactgaaacaactaaaactgcatcggtgtgtcaacgtcatctttgtcggagaccatggtaaagctttgttttttctttgctaataggatagatggataatgtttctgatcatattgaggaaaagaatccttgcccttagaagccaagactccattcttaacctcatccccgctttctttaagatggggatagaaatcaggccatgattgaaaagtatgagatgacctgagagatccctgggttcattttgatcaaaagctgggacttcttatatatttctgttatttgcaggaaagacctttctacaaaaatctgtctctctttaaagcaacacagacagtttccttgtgacattaatagcttcttctgtgaatgtgacatatcaggtgataatctcctatccctgccagccacatccccaaaacgagcccatggagtttatatggttaaaaaatacatctaaatatgataaagaagcagagatatgggattcttgtcaaagaagtggcgtgtaagtcaaatcatttccccgaatccactgagggaagtcaaggtccaaaccggaaggccctgctgtaattcagatgactgttaaagagaggaagaagcattataggaagtagtttttctaaatcccactttatgaagtagaaaaatttatgatcaattctttgaggagatcaagagcatcataaacattatatgactgtagagctgtgcagggggtgggggctcagagacatgcagactgagttctaaagggtatctcctgtattccggaactattagattgaaacagtagcattggaatttggggcttctcccttctagtggagttcggaggatgaaaattggctgactctttggcagttctgttaagaatggtaggcaaatctccctagctctggtcctgaaggtctttccagaatgtcctagaagatctatgagaaattagaaaaaaaaaaaaaaaaaaaaaaaaaaaagccaaagggattagctttctcctcttgagtgggctagatataaccctttgcgaagtcatgctccatgcattcggcttagtggagagctacacacaggtcagagaagttggagcatgtgtcacagctgattcaatttaagttgcccagaggtgtcaagagcatttgctcacatgctggagccagacatctaagtagaagggtcccaatgatatgtgctgaggcattgtaaaggtcatggataggttaaaaccttggcttgtcagtgtgtaggcttccaagatgagtagatccatttggtttgggacaactacagcacttcttcttcttcttttttttttttttttttttttttgaggtggagtttcactctcatcgcccaagatggaatgcaatggtgcaatcttggctcactgcaacctccacctcccgggttcaagtgattctcctgcctcagcctcctgagtagctgggattacaggcacctgccaccaggcccggctaaattttgtatttttagtagacatgggctttcaccatgttggccaggccggtctcgaagtcctggcctcaggtgatctgcctgccttggcctcccaaagtgtacagcacctctctcttaaaagatggtatggtttagtgttttagggcatggtctttggagtcataatgaattttagtggagttcaaattgcactgtgtcatttaacagctatctgacactatacaccttttgtggcaagtctcagtttcctcatctgtcaggtgagaacattaacacccctccacaaagttagtctgcagagtgaaggctgatgacgcttgaggagcacttagcatagtgcctgatggact

SEQ ID NO: 11771 - DNA, 6000 bp, Homo sapiens
atctggaaacctaactcacagcaatagtcttagactcatttcggttctctcattcttgagagttgttttttctccttgttggaattatgtggcacctttccctacataaactgaaagtctgaatcagtcagtctctttctctctctctctttccctctctctctctctctctctctctctctttccctctctctctctctctctgtctctctcttttcctccctcccctctatctctcagccctgctaaattcatagaactaattgtctggctttcccaggccccagggctgggggtccagggccccagtactagtagccttttaatgagttatttcatgagcaaattgtaatttcatcatatccaaccttgtccattctcatcccatgatggcacctaaacacacaggcacacaccttctcacctttatggatccaacatcatttttaaagcacaatataagagcatttttaaaaatcagggataatatggtttgtgcatctgctaaaataagaacaggaggaagcaaagcacaccaaaattcagaccctcacatctagtttcactcacactcctaactgggtcttaagtgactgcagacaaatattagactgggggaaaatctttccattttttgacttctgcttcttgtcatcatccattagaaaccacctcaccacttaaactatctatacagtgctctagttaaacatgcagggtctcgaatcttatataggccccacctctcgctagctgtgtgacctcgagcaacttgcttaactcctctgtcttctttacttcacctgtaaaacgtggtgatgatagcgttttcctaggaagtggttgtgataactaagcgagataattcatgtaaccaattttagtgcaatgcttggtacacagtaaattttcaataaatcgtggttactattattactcctaggtgtctggagagcatactgaaagaagggacctgttttaggtttgtttggtttcttttttttttccccaataagttctcctcctggaggatagggagaagtggcctgggatggagtacagaacttgctttctttataaacctaaagcgtccttcattcactttgggcagagtttatgcctgttctcccactctcaaccataggcttcaggtgtaactttggggtttccggggtaaggaaggctttttacagatactgtacaggagcaagtcgcccatgcctcctggactgacttcggggctcctttccttttcttcgctcctccccttgggggacccccggctccaccgagccaggccagccccactcgacggcgatttaaacatcccttaggcaaggcgccaagttagcgctgctggcccagctctaggcgggccgctgctctttcctcctcgccaggccgtccacgcgttgggggaggggaccctaggggggttggcgcggttaagagccccacgtgagaggggcggaagtccttgccaggagccggggatgcgcggctggcgggtcccttccatcacgggagacgagacaccgtttgatgtgttatgacatgaaccctcaattagatcgctgagttgaaacactccaatcaggggcccgatgctaagcaagccccggaaggtccagcctgaggtcaccgccggtgacacatcaaatcaaaatcagtgagagggaaagtgaggctttccctttatcaagctggggctgcagccagcaacgcaccccctcctctgcgcacccctcccgcccgtggctccgcactccttcacccccgcgcggcgtgcgacaagccgcaccgccttcccagtcaacgaactgcctttcttcgcattttctgagaacccggagacgcggaggagacagcgcctttgaagatgctgtccgggtggtcatgcagcgtctcctcccgctgtggaccgctcgcatccccagccctccaccgcattccggggttgtagcggtacttgtggatctcggtcctgctagtctggaggccttggctcgggaacagaggcctccccagactgggtgcacatgcaatccctcctctatctccaggatcgggggcatacagcgcagtggcggggatgggggtggggaggctacagggcaaaccagggtaaagtgatttcgcgtctacgccggattggggcccccaagacttttccccaacccttgtctgaatgccacaggcttccggagacacctccgaacagcccgcagggtcttttggtcctgtgccaaattcacagggcgcagcgaaccagttatggtgcccacttgggggaggggcagagattcttgccacttcattcccgggcaaagaaaatccgcgcccaaccgccggccagcctaggcctctgggacttcttctcttgaggaagggcctcttgagcagtcttctctgagcttccttagcctccttccgcaattgtagtagagaaagtgcacgattaacagaggactttgagggacagaaacaactgtagcaaggcgtgcgtcgtggggagggttggcgagctgcacgggcagcacggaggccagggactcagttgcactactacgaagaagccacatgtctttgcaaaggtgactttagtagccctaaaatcatcataaaatacctggcgttaatttgccctctggacctttcagcagctcatgaacctcgctgacctcgggctgcagcggcgagaccctcgagcaaggaacgcgactatgagtgagaggcggggactggagccggggaagagctcggggctgggggcgggggggccgttagcctgctctaaaaagcttaagagatgtgcgagcacccagggtagcagtggctgaagcagcttccgaatcccgaaccccagcgctgcaaggtttccgggcaaccccacttaactgggagcaggtcaaagtcatggagctaagtctagggaggatggaggagtggatatctgcctaaatcgcttttatcccgtcattttcttccttccttctctttactcttcctttcctttttctcccttcctttcctgtctccttccacattattgtctctctcctttaggagcttagtttccgatgcctgtggatccttccctgatttctgggaccagaggtggtgcgaggttttcttgagggcactggccacgctgcagatcaacgccggtggcaagaaggggccgcaagggtttccgcagacacccacacatgcaggcgttcccacagagggtaccagggatttcccagacccccaccagccctcaggaatagcgtagagagaggaacgtcgcctggctgagaaaggtggatgggcatacccatgtacctttgtgtattaagtacccacaacctccgaacttagccgtccctgtcccggcccgcccaactgctgccgccgcatctgcagaaaccactcgtgttgaggcctcggagcagccgggagcaccacgctggagcaaaaaagccggagggcgcagggctccagcccggctgaccatcccacccagcgcagggaccaacggaaaacccgcgcggcgccaggaccagggggctgcccgacgccgctcgcggactagttcctcagactgtgggactccctagtgccggctttgcccagggctttccaaggctgtctcatgccctagatctgccccagcagctcaggccttggactgcgaacccagtatcccgagacaccgattccatcagtccccatcccgacccctctccagccgggttcatccgcctgctgcctcccgtcctccacgtttcccccaccagccaccaacaagcggcaaccacgctgccttctgcaaaagaggaagaaggaaagaagggagagagaaagaaagggggggaaaggaagggaggtttagagactggaatagaatccgcagccacattcagaaacttactcgagcttgagaaaaacaatttaagaaaagtaaaaaggaagtgtccagagcaggaagggaattcacaaatgtagcctccagcgggaacagctccctggctgccgagctccagcgggaggggagtcgagcgttttctttgccacttacctagtcccctgtctacaaagctggtgatcgtattagccgacttggaagactggaaaaagctggcattgatgcccagcttctcagcgatggagtaagtcctgtagattgacagcatgtactcgtggggcaccacgcgcggacccctgcctggcggctcctgcgcccggggctgctgagcccggggttcgtcctgaggccgcggctgtggttcctggccctcccggcccgcgtcactgtcgcgcggcgcccgctgcatcttgccttccttgcggcttcgcatgcccttggtggaacccagctcggcggacgacgaggaggatgagatggaagcctgctggaaaccgggcaaatcccacagaaaactgatgaggaagacggccgagagcaggaccctgggagtatccatggcgggcaagtggctgcgtctccccaggaggcggtggcggcggcgcaggacgcgcggggcacggagcggctggacagcggccggggcccggctcctcgggcggactcggagtgcgaggagccgggtcccagccacacaaaccccggccccgccacgccccctcccgcccctcgccgggaggggaggaatggggagggagggcagaggaggggtggggagggtgggaggagagccgggtggtgcgggccggaggtgtgggggagaggggccgcggtgcgccggtgtggcaggaagacgcagcgcccccgcgggacgcgcgcggggttgccgggcggtgcgcgcggcgcgggccgcaagcgctgaccgggggaaggcgggcgctgccggcccgtggccggggagcaaaggctggcccgccgcgccagggtccccctcgaactcccggaggtgtggtccctccgcagcgcggccccggctctcggtcctcgccagccgcctccactttcctgggagcgagcggccccggaggagggaagcggcggcggcgcccccaagagacagcttggagcaggcgcctctgctgcaggctgcgtgctgcctcggggcggtggtaccctccctcctcggccccaaccgccaggcctgccgtttgcgcccctcaggggccagcccggagccagagaagcctcgccctgggccaggcgcagggcccagctcggaacagccccattttctcggttgggtatcgctctccacaaagacaggcgtctattcccgaccctcgaggtcaggcaaaggccacgagtctttagagtttggatcgatgctaaaagctgctgcgctcccctgcaggccccagcctctcctctcgcagtccccaacctcttctgacgcagactttagctgctccacttcttcgtctgctcccgggatcctctccctctcgcggcctgccccccgcctccactgcatccccattttccctctcttctttccctcccgcctgcaggacttcctccttccccaagttccttctgcattccaatccctcttccccagcctgcttttcttctcacactgccctcccatctcacactgccttcccaccctctctcttcccggcctcccccctcgccttccagtggacccctccctttgcagctctaccccaatctgtttctcttcagcccagcctcgccccatcacgagtttcctttatctgtccccagattccccgtgcctgtcttccccgcccactgcctcgctcattcctgggcctgcacgctgaaaggcgatgcggcgtagcgctgcttctgtctgccacagtgctctgccctggactgctatgggcagaagagtttccctcagtactgattgggtgctcaggcaccaaccataaagtaccctcctttaatcgtgccaacagctttgtgaggttggcgttgactattttcaccttcacggatggaaaaaaaaaagactcaatggaaataagtgacttttccaaggccactctgccaagaggttatgc

SEQ ID NO: 11772 - DNA, 6000 bp, Homo sapiens
tgcgttccaggcacaggccacgctgaatatggcatcgttcatgttgtagcgggcatgggggccctgcagggggaccggagggttaatgaagttcctcatgaaatctctccgaatgccctgctccatgggctgcaccaatgaggccacgctggcaggcaggaagatggtgaaaacgttactggacaccagctcggcctcctgcgggtgagcccgggagctgtccagcaagagaacggctttgctgtcttccggcaaacctatggttctgaagtgctctctcaccgagggcacaaagatatgatggaaccaatcggaaaaaatctccttgtccacccaggcattcccctgggccttataggcgacgggcaggtgctggatgcctttgaaagccctgggaccgctgcacttcccgatggccaagggcttgagcctgtgggagcccgtggcgttggcacacatcagcacggtcagccggtccttgccctgcttggggccaggcacagccccgccttccggagtgggatttggcaggcaccgccagaaaaggccggtctcatcagcgttgtaaacctgctcggcggacagcccgtgctcagcagccaagctcctgaaaaacgcacagaactgctccgcggcctggtggtcggctgactgcttttcactggatgcatctagctttttaatgccgtgtctggccttaaagcgccaaagccaccctccggagaacacgcagggctcagtgagctgcatctgctcgtagaagtccttggccttctcgatgagcatggggcctgacacggggacgccctcggagcgcttccccaggaaccactcgtacaggacgcggtccaggtgctccagcttgggcgtgtgcagcgtgcgccgctgctccagcgccttgttggagtccgagctggcgaagaaccggagcagctgcgccttgtgggccctgatgtcgtagagggtggacatgcccacattgtactcctgcatcagtgccttccggctctcgcccttctccaggcgcgtgcagatgtcaatcttctccttcagtgtcagcaccaccctcttccgcttctcccctctgctcttcccggcagccggcttggaggccatggggaggggtggctggtcctagcacttgcaggacacacgcctggcctgggctgctgccactacttccctctcctcctgctccccttctggggctccgtctctccctctccactctgcctgcctgctctgctgatcctgagcacaggccccagtccctctcgggtttctcactccacacgctgcacctcctgcctcaggtatccctggtcttccaggctccacacacctaggccttggctcctggcagtgcagtcagctgccaattctctctgtgtaggaggtgaccctgtcagactcccctctgctgctccacacggctggaactccggccttctctgtggatactatggcagcggctcccctcaaactgaccaggtttggggtggtagaggttttaccgcataagcagcaggtgcctctccagggtccacaatggtatctccaggcacagcacttcaggggctggaaagcagagggaacagagaggaaagtgatggggcgcgcccaggacacacatggcgtcctcacgactctcctcaccgggacactccagctgaaactcaagggctgttgagaggacccatgcaagtgctggcatgcaccgtggggagagggtggccccgggagcagcccagcctgcccagcccctgcacgtgctgctcaggtggactctgcccaactcccaccaagcaaactgaagccattcgctagggctggaaacgagacgtggctctcattggagcagcccggcctttcctggggaagcgctcaggcagaagccatcagaggaagccaggaagtccgatgctgggcggacccaagaacaaacctcccacccgcccagcctaagcttcttgctgtaactgctcgctgggctgcctgagcttctcaaatcccttattcctccctgaggagcagaggcaggggtggagggatgcagggaggaggaactcctcactaccctccccgccaaagatcttacaaaccccatctggagcaggtctctaaactcctctctccgacacagagcgccaaactgcctctagaaaagaaggcattagaagtttctctagaacagcaggcctcaagctcctccaagggctaggaggtgctgccagtttctcaatcaccctctgacctccctgactgcacacactcagatgcgtctacaaggagccgcagcagacagacagctgtgaccattccaggcctcttccagaggggacccctcaagctcagctcagggtaccctgccccaggcagccacactgagccgctggtctctgaaaccccaggctctagtgctgcccgcccacctggctccacaaccacggcagggccgcagagcctgccagacatggacggacacggagacacacacacacacacacacacacacacacacacacacacagccacccaacctcactcacacatacacgctcagaggacacaggaacaagctagcccagagcaggaacttctttagcatttgctaatttgggaggctctatgaacaaatgactaatttacgccagaagcaaatgccaggaaacctgatagccccctgggagcaagggttcttcctgggccagctgtgcaccctacgaaaagcttgcttttaagtttcacacacacctttgaccaataggaagaaaaatgacatagaaatgtcacagctctaaccaaacacatctttctgttggagttttgaactaacttctcacccttctcctatataaagacaatgcgggtcattctcatcccttctaggtggacaatttcaccctctcataacaactctgcgaaacaccccacaaccctccctacacccgagccgactggcagggcacagagggcgcacccctgtgaggccagggcagcctatggagtcagggcctgcaatgcacttcacccagttaagacactgctgagggtggtgagggctgaaaagctgtttgcccaaacaccgggcagctcagctggccgcctcagtgtggcgtgcgtgctatgggcaggggtctccctgccctcactcctccgcaggccagcagtacttgaggatggactcctggagttcccacctccctcccgcgtccttaccatagctgcttctgccaactccatgcagagcgtgtggccaaaggcctacttacatgtggagcgcagaaacgcagccctttgaggccagagctcaagggaaaggaggagtgcaatcaaatgcagcaaaagctccaaagaaaaattataggcttgttggctgccacctctgggtgagtactgtcctcttccggagtcagtttcctggtctgcaaaatgtgggctggtcccttaaggatcctgcattgttcgctgagggtgacggtgtgacgtgtgtgcggtctggcacagcacagtgagctatgtgcatctcaccatggggaacaggagggaaggcaaggccacaaaccaccctccagatttttaatatgaacccgctgtagaaaaactgggggagacacggaatcccacagtagcttatgagggactaactggggactgggatgcagagaaaagcttcctggaggagactcaacaccagacacagctcctcgcggacacgtctccatgcctgacatgcaggtgtagcaggatgacacaaagtggctgaacttgtttcataaggaatatctgaattttatttttaaaggaagtttttggtcttgcaagtgggacaacagtgtgttctgccagtttgtgtcatcctgccacacctgcacgtcaggcatggagacgtgtccacaaggagcccgtgtctggtgctgagtctcctccaggacgcttttcccggcatcccagtccccagtcagcccctcacaagctactgtgggattccctgtctccccgaaattagggtggtttcttgccttgcgactggagaggaagcactgatccccaaggccacgtgaacacgggatgaaacgtgcaattctcctgtgcccaaggcacagacaagaaacgggaggcctgaggggccagcgctggggctgactccgtcctgtgtgaggctaagaggccctgagaaacgcggggggaaagcgggaaacaaccttcgcaggggcatagtgtgtgtgtgtgtgtgtgtgtgtgtgtgtgtgtgtgcgtgtgtgtgttggggggtatggaggatatgaaggagaaatactcaaaaaacaagtcgcattctggagctgggggaagaggtgagctgggggtcagaaggagagtatgggacagagaaggaggggacagaaagcctggggccgtgcgccccgcagagagcgcccgagagccggcgccgagttccgctaggagccctccacgctgggggatcctggcgcagagacagcgctgggctactggcgaggctcgcttaaaaagcgtccgtaccccagggtccccgtttgtgggtagaaattcagtctgggacaagaacaagaacaaaaacagaaatggagaaaaaaaagtctcggtctggttttttaagggcaagcggacctcgtgaccaagcctctctgagagtggaagcgcaggaagggtccgggctggggcgtcaaggccaggcctggcggcaaggggtgggtgcggctcgggggccgcgcgctcaggccgcgggggtcgcgcgggaagcacagggcttcgggttccgagcgcggctcccgggagggggcgctgccgcccgcggctgggtccggccccgcagcctcgcgaccaaccccgccccgccccgcgcgcccgcctgcccagactgcggctcccgcccgcgccgcccgcgcccaccagggaccggagagcgcccgcacccatccggcccggcccggccgcccagcgcctcaggccaggaccctactcaccctgctcacccggagcagccgccgccggccggaagtgccggccactcggttctcctccagtccgcgcctcgtcgccttcccccagctacttccgggacgctctagacaggctggaggactcagcactcggtggtgtctgggagccagacgcaggctttcaaagagctgggtggccgcggagggcgtgggaggagaggaggcctggaggagaggagtgggggggtcccagggtggggggaggcgtgggaggggagaaggcgcgggcagggaggggagaggggaaacggggcgaaggcggggcgcgcggcctgggccccgggctccgccctgctctctccatctgtagaatgggcgcagggcgtcacattcctttcatgacagtgaaccctgcgctgaaggcgttggggctcctgcagttctggggcagccacaggcgcccagggtttcgtgccgatcagcccaggacggtcttcccggtgcagtttctgatgcggggagggcagtgctgccttccggtcaccaggaccagtgctcagcccgcctgcttgacccccttacttagctggggtccaatccatacccaatttagatgattcagacgatgggatttgaaacttttgaactgggtgcgacttaagtgagtatggacctgagttggtgctgtaatgagttgaggctgtggaggaccttgagatgggtgcgtggattttgcccatgggacctatgcaaattttggaaactggagggtggactgtggtgggcagaataatggccctccaaggatgtccacatcctaacttccaggtcttgtgaatacattacttacatggcaaaagggactgcaaatgcaatgaagttaagattctttaggtggagagattcttatgtttatcagggtgagcccaatgtgcagtcgtccctgggtatccatagaggattggttccagcacttctcaaggatgctaaaatccttgatgctcaaatcccttacataaaatggcttcgtatttgc

SEQ ID NO: 11773 - DNA, 6000 bp, Homo sapiens
gatgatttttacccaaatgaacatcgggaaggtaattaccgctgtgatttgggggtgaagtagcacgctttgtttcctcaaggtgttacttctctgtattaacagagccacatccaggccttggaatgccttgttaagagaagaatattctctttctttcaaagctgccaggcatatgtttctttatattttccttcttttaagaaagaaacacaaactggtttttttttttttttttttttttgagacggagtcttgctctctcgcccagcctggagtgcagtggcgcgatctcggctcactgcaagctccgccccccgggttcacgccattctcctgcctcagcctcctgagtagctgggactacaggggtccaccaccgtgcccggctaattttttttgtatttttagtacagacggggtttcaccgtggtctcaatctcctgaactcgtgatccacccgcctcggccacccgaagtgctgggattacaggcgtgagccaccgcgcccggccccaacactaaaaggatgcacaaacagattgatatttctctcccaaatgcggcagttacgaagaatgaggcagatctgcgtttattgagtagaaaaacagaaaaaacatatttcagaacaatgggtatttagtccttgcattttttctcttttgtctcatagctttaataattatctttatgtggacaaatattatatttatatcttcagcttggatctcttccctgagcccagattctgcccaacatctccactatgaagtccaacaggcatctcaaacttaatttgtgtggctgggcgcggtggctcacgtctgtaatcccagcactttgggaggtcaagacaggcagctcacgaggttaggagaccgagaccaacctggctaacatggtgaaaccccgtctctactaaaaatacaaaaaattcgccgggtgtggtggcgggcgcctgtagtcccagctactggggaggctgaggcgggagaatggagtgaacctgggaggtggagcttgcagtgagccgagatcgcgccactgcactccagcctgggcgacagagcgagactccatctcaaaaaacacacacacacaacaacaacaacaacaaaaacccacttaatttctgcaaaaacaaatcatggcattcctccctaccttgcttcatccatgacttctctcagttaatgccattctaatcttcagctgctcagtcaaatgtaagtgaacaagcaggtaagcaggaaaaaaaaaaggccttagagtcatccttctcttgtctcttaccctacattgaatccttgaatgggaccagccctcaccatctctgtagctgttgcagggctcctaacatcatctctctggcgtgatcacagctcactgcagcctcagtctccctaggctcaggtaatcctcccacctcagcctcttgagaagctggggctaccggcatgtaccaccatacttgtctaatttttttgtatttttggtagagacagggttggccagactggtctcaaactcctgggctcaagtgatccgcctgcctcggacactcagaaagcgctgggattacaggcatgggccaccatgcccagccacacactgatctttttaaaacctaagacaggtcatgtcactcttctgttcaaaatcttctgtagacataaatgaagaccaactgagaaaagcaaaggctatttattcagcgcttgctatagcaaggcagtcagccaccatcacttgtgtttgcagagtctcaaaggcaggtaggggaaacagaaaagctttatagcagaaaaagggaaggcttcaggtcggtcctgaatggaggctgctggcttgggaaaactgtaggtggctaactgaaggaaagcacctgatgtgattggttaggggtgtgtatttgacttttctgcttggtcctaagttggaagtgagcataaaaaccagggaagctgtcagttactaatcaagttcttcctagccattttgggccagtcgttatagctggtgttatttagcatcccgaactgttttagagatagagtgtggcttctgcaagtctgagttaagcatgctggatccctgtgctgttaattgtagataagggattgattttctgggcaggtggctgcaggttgtcggtcagagttctagtttatttatttattagagatgaggtctctcaatgttgcccaaagtgctgaactcaactcctgggttcaagtgatcttcctgtctcagcctcctgagtagctgggtagtcccagctgtggcaccaagcactgctcagagtactctttttatttgtattattattaatttatatatttatctgtttttgaacaaggttttgctccgtcacccaggctggagtgcagtgtggcacaatcatagctcactgcagcctcaaactcctgggctcaaacaatcctccttccttagcctcccaagtaactgggactacaggtgtgcactaacacacccaactagttttaaacattttttgtagctgggcacagtggctcatgcctgtaatcccagcacttcgggaggccaaggcgggtggatcacctgaggtcaggagtttgagaacagcctggccaacacagtgaaatcctgtctctactaaaaatataaaaaaattagctgggcatggtggcacacacctgtagtcccagctactcaggagtctgaggcaccagaatcgcttgaacctgggaggcggaggttgcagagagcagagatcgtgccactacactccagcctgggcaaaagagcgagactctgtcttgaaaaaacaaaaccaggccgggcgcagtggctcacgcctgtaatcccagcactttgggaggctgaggcgggtgaatcatgaggtcaggagatcgagaccatcttggctaacgcggtgaaaccccgtctctactaaaaatacaaaaaataagccgggtgtggtggtgggcgcctgtagtcccagctactcgggaggctgaggcagtagaatggcgtgaactcagaaggtggagcttgcagtgagccgagatcacgccactgcactccagcctgggcgacagagtgagactctgcctcaaacaaacgaacaaacaaagaaacagacaaaaaacaaaccattttttgtagagacgaggtctcgctatgttacccggggtggtctcaagctcctgagctcaagcgatcctcccatcttggcctcccaaagtgctaggcttacaggcgtggactgccacgcctgggcttcttgctaccccttaacaataaggcagctcctcctcaggctttcacagtcagctcttacttctactccaatgcttttccttcaggaaatcccaaggtcactgtagataaataaaatagattttttgagctcctttaaaatttttatttcattgtttaaattgacagataaaattgtatttatcatgtgtagcatgatattctgtatatatacattgtggaatgacaagatctagctaattaacatatgcattacctcacatagctatcatttttgtggcaagaatgcataacatccactctgttggcatttttcaagaatacattatattgttattaactacaggcaccatggtgtatggtggagctccttggaacatctctcaacataggctgatggcataacagcaatgaacggacacaaaattatatggtctacatttgtcattctctgaaggtctggctaatagataaaatgttgactatcagggtagaattgaagggctccatttatttcaaaacattccctaagtagacagctttttgaccggcgtggtggctcaggcctataattccagcactttgggaggtcgaggtgtgtagattgtctgagcccaggaattggagaccagtctggtcaacatagagagatccttcccttctctcccttccttccttcattcctttctttttaaaaatcatttttatggctgggcacggtgactcatgcctgtaatcccagcactttaggaagctgaggtgagcagatcacctgagatcaggactcgagactagcctggccagcatggtgaaaccccatctttactaaaactacaaaaattggtcagatatggtggtgggagcctgtaatcccagctacttgggaggctgaagcaggagaatcacttgaacctggggagcggaggttgcagtgagctgagatcacaccactgcactccagcctgtgcgacagagcgagaccctatctcaaaaaaaaaaaaaaaaaaaaaaaaaatatatatatatatatatatatatatataattattattattattattttttgagacagagtcttactctgtcacccaggctggagtgcagtggcacaatctcggctcgctgcaacctccgcctcctgggttcaagcagttctcctgactcagcctcctgagtagctgggattacaggcatgcgccaccatgcccggctaatttttgtatttttagtagagacggggtttcaccgtgttggccaggctggtctcgaactcctgacctcgtgacccacccgcctcggcctcccaaagtgctgggattacaggcatgagccaccgtgcctggcctattattaatttttttaaaaaaaagattttgctcgttccatgcgaacctggtacctctcttgtgaagctacagctgaggagactctgatgctcaccatagctgacgaaaagcccaaggaaggagtcaaggctgagaaccacgatcatactaatttaacggtggcagggaaagatggttctgtgatgcagtttaagattaagaggcatacaccacttagtaaactaatgaaagcctattgtgaaagacagggattgtcaatgaggcagattagattacaattccacaggtaaccaatcaatgaaacagacacacctgcacagttggaaatggaggatgaagatacaattgatgtgttccaacagcagacgggaggtgtctactgaaaaaggaacctgcttctttactccagaactctgttctttcaagaccgaggagattacattctcaattagaaaactgcaatttggttccaccacatcctgactactacagtatagttttctctattctttcatttccccttttcccattcctttattgtatgtaaagtaattggtatatgtgcacaagcatattgcatttttttttaactaaacagccaatggtatgttttgattgacatcaagtggagatggaatggggaaaaatactgattctgtgaaaataccccctttctccattagtagcatgctcattcagctctttatattccagtaatttattttactctcactgttttaacaaaaaaataaataaataaaaaataaaaatccttgcatactttgttcaattggagaattttactgtttttcatttatcattgtaaaaccaaggacaattttataacttttttctacgtagctgttacatgtagggcaatctgtctttaagtagggataaattactctaaaacaaaaaagaatcctagatagttttcccttcaagtcttgttgtttaaataaacttcttgtttaaaaaaataagtgaataaaataaaaaagagtttttactaagatggggggcttaccatgttgcccaggctggtcttgagatcctgggctcaagtatgttttgtggttcatccacattcatgtattagtacttcatgcttttttctttctttctttctttcttttttggagatggagttttgctcttgttgctcaggctggagtataatggcgtgatcttggctcactgcaacctctgcctccaggattcaagtgattcttctgcctcagcctcccgagtagctgggattacaggcatgtgccaccatgccctgctaaattaaatttttagcagagacagggtttcgccattgttggtcagtctggtctcgaactcctgagctcaggtgatccacccacctcagcctcccaagtgc

SEQ ID NO: 11774 - DNA, 6000 bp, Homo sapiens
tctggaaagtcccaccgcttcctgcgaggggcatccgggctggggggtctccccggatggtctccgagtggagctcttgccagggggctgctagctgggatcgcggcgggcgcaccggcttccctgggagtcttttagcaaccttagaaaattcactctcggaatcttggagggaacttttctaaagagtttccatggcaggaggctgttgacgacagcatatgtgatgtgtgatgtgtgatgtgtggtgcaggctcgcaggttgcagggtagccccagctctcaccacatctggccggggttttgcttcgcgatgggcgcggtctttccggactccgagacccccaggcccctccgaggcccccaggcccctccgaggcttcccagcgcttctcacttccccgtccgcgcgggctgcgtccctggagcgcggggccttggtcggtggggctgggacgccccggttcgggggcaggtgctgcaggcattcgtggaatgaacacacgatctcgagtgggcgagcggcgtgtgtggagaggaagatgaggaaggacgcgctgtctgcatccagcggcgggggaggccagtatgcagaggccgagggagcttcggggctcggggaggctgggtgggcgtcccgttcctgcgctgcccctgacggagtccccgtcgcagagggcctgtgggccggtgactttctgcagctgctgctgcgtccctgacacccgcacggctgatgcccctcccgccattaagcaaggaaagctcttggtacagccgagccctgtttcaggggccgcaggtgcaggggcttccctaggagcctcccctgggcttggctgtgtgtgaatcaccggggctgcagctctcagaccctccctctgccgccgggagcggccgcttcaatgaacctgaaacccaggacccgggtaggtctcctcctccttcccgttttggcgctgcttacccaaggagagccaaagccactcctgaggagaggatgggagctgcagaagcctggtggcccggaggagagttggggaggcggcggtggcctcactctggacgcccctgggtctggccgtgggccgtggcacacacagtgtccctgtcaggcctcacacggtgccaggccacacgctcacgtctccatctcacctgcctgggtggcacaacccgtcacacaagaagtcaggcgtctttaggagtggccccgactcccccaaatcccggccacgctctagctcagcgcccctgctcagccccccagcccagcgccccagcctagcgtcccagcccagcgccccagcccagcgccccggctcagcgccccagcccagcgccccagcttagcgtcccagcccagcaccccagctcagcaacccggctcagcgacccggctcagcaccccaactcagcacccccgtttggtgccccagctcaggatccccggctggtgctgacgtctcctttttgctttgttcccaggtggcatttttcatccagcttcattcacactgagagaggttggtagaaaggttctgatttccacgcgaagatgaggaggctgactcaggaaggccctgccgtccactcagggttcccagtcggtccatccttgagttccttgtcttcaccgtgcttaattctccactgttacagctcctcccccgagtcccctccaagtttcaggcaggccagggccccaggctctcagtggtaccttcagaggaagcctctgagggactcggtggtgtcagttaattacagaagttttgacagactttggtttatcctttggtctttcctgggcttgtggatttactggtgaccgcggggaaaagttctctctctttagctgtgatcagcctgtgggttccgtaccccgtgtgtgaagcagttcccgggagcattcacgcgattccccagacacgctggaggatgtcctctcgtggcacagatgcgggctgtgatgttcagagatggcctgctcagccatttcaccgatggatgcacttccagcgacgacggccctcagggagttcgagtcctcttgagaacttgttgtttttaagagtacatgctaggaatggtagaatcataattagaaaccaaattttgcaatgtttttcattccctttcagtctaaagttttcattcccatctcccagcccctgaagacccatcttagatttagactaaattacgtgggcctttcagaaccaatcaggctgtgctctgtgtcccggctcccagagcaagaccagccaacggtggcgctgtgtttgttctggggctgttctcacctgtgtgtcctctttggcaaatgtactgtaggaagataattctaaaactctaatacaaataataataggctcttaataaaaataacacatggcaccatgacaagagaacgtcagccacccacctatgcgtggagcttcgtcatttgaaaagccttttcaacacaaggtcatcctgggatcggagggaggcgatgagggcacttcccattcactgagcacaaagcatgtcccaggcgctatctcagatgctgccggtgttccgtcttgtttagtcttctgggcaccttgtgtacgtcaacagttatcatccacactgttcactgtgccttcaagagtatcaggagttatacaagagacagattccagttttacagaggagaatcctgggcaccaaagtggttaaatcatggcccaccctagcttatggcactgtgcagctgcacagctgccccttgcaggttctgcctgagcatttagtttttctaatagaccatgctgcttcgtatttacagctattaatctaaagctcatgtaactcaaacatatttggtcagcctaaatttgccagtttgaataagctatataatgattttgtggccaatataactttttgaattaaaatgaggcaatgtaaaaaattgccattatggtgcattatactgaggaagcagcagacgtcattatgtgcgtacatgtatctgtgtgttatatgtgcatgtatgtatgtacatatgtaatctaattccctcagtagacagtgtgtgtgaagatgttttattgacttatatttgagattgccaacttttactgtatgcttgatttgcaattagtgtcactataccttggatcattggggtttattaatgtaataattatacctttccagtggtgtgtatgtgagtggctttctaaagatagtgttttcctatatataaactgctctcttttcatggctttggacgatacctgtgaaatgaatggtttatgtggaagccctgtatggtgccaggttgtttgaacccgcagacggccgttgcactctgtgtttagtgagtgacgccgtccacggcagctttgacctttgtgggctgcgcacccagagccacgcgggtcctggtggctccgagtcacacagaccccttgaagtctcctccatgattctgtccacatcgacaactgcacagttttttttcttgtgtgttggtcactttggggaccccgttagtgggattcttacttcctattttccaaaggacatgcttagagggttcggcctgaccagtggaactgaaaatgagtaaaatcaaaggaaacttgcatggactgacccctcttaaaggtacagaactttgtatgtttttctcttcctttccctgtatttctgcagagatgaaaacactttcttgttaacctcgatgtcagtgagctttacccaggagccacactgctctgttacccttgaggagggaagaacgtagacctggtcatttgacacctttaagggatttgtgtgatccttggaaagatgtctgataaaaaatacagacaaggttgaggtctctgcatttagtcaaagctattataaatgtgagcaattgttttggttcttgttccatctatgaaatcaaattactgctttatctgtctcaagagtctcctgttgtttaatcctttaaggaaacttgtaattaaacaatgtaagaagaggtataagggatactgattttgattttcaggaaatcgtttactttcaggactgatttattctgtgggatcaaaaatgcatctcagagcccaggttagtgagatgtatcgtatgtcgacaattaatacgcagttatcagagttccttacgtatggagcattgcacttggtttatggagacactggatttttagttattagagtttttactaagatgtgttctaaacaactcacgaagcagcacactcttctgtgtatttttctatctagatttgtacaacagagaaagaatacctgcatctatcaaaaatatctcagaatggaaatattgggatactttggttattttatatacattttcattccgcagatggctggtgcagttagttatacggagtttgaggctatacgatttcagtcatacattgaaaaatactagtgaagtattcaaggaacgaatgaaaagttgctctgtgtttattgattgattacctggaacaaggttgaacacagcccccgcaggggtgtctgtctacaggccccccaacccctgaaggaggcatggacaccaggctgtagaatgctgctcccacctccctgtgagattagaacaaaatttaaataagcatcacctgaaaggtcttggcgttgtggaggcgtctttaagtgtgaggaggcagcaccacctgcacgctgtttgtgatgaccgtcgtcgtaaactgagcccccacggcacctcacaggcggaacttccatctcccacagcccggaagctgacgccgcggcccgtgggttcggaattgctctgaatcgctgtgcactatttggcaatgtaaaactgaggctgctacttagaagtagtcagttcaccgtagaaaacacctgtataaatagcacagtttttcagctgggtggggacctaggcatggaaccacggctttgacatgccctcggcagtcagtgattgacaggtcccgtgcctggttagcagggtccttctggagagtctgaggatcagccccgccccaaactcggggcaaggaagtgctggtctttgccttaaggttttctgggatgtgggcgcgggcgtgagtgtgcacgtgtgcataattttctctagccttggaggtgctttttattcagctaggggagtcttttgtggtcattttttcgactgcagactgagaaggacgtggtccacgtgtttttgctttggatgcctttatcttacactcattattttgccagtttggggagtagcaacttagttctatgtacaggccttggaggagatggctgctctccgctgggccccattcgtttttacttaaatgtgtgtgtaatgaggctaactccaggacagtgcggaccctaacatcagcatggtgcagaccacaaagtgtaaagccaccccgagcctggctccttccatgcaaagcctggcgaggaaggcgaggaagcctggcagggatggttttttcaccacctcgaagaccagcacgcgattccgcctctagtttgactgtttttgttgtttaaatctgagtctagcaatcaggtaagtaactaaagactggccgtcatctgggtttttcacctaaggaattattttaccccatagctgtggcaaaaatagccaccaagatgttggtgaatgtatttcataattggatactattctaatgcatttacttatatccaacttattcctgaaggtacttaaaaaattgataagacactttgcctattccagcaggtttacttttatggctgttattactaaattatcagcagtgaggaatagaaaacggtcttacatttattaacagtttgcattatgtcagcttgtaaacacatcgatgtatcctactatgcagagatgtctttgtggctggcatggatagaaccatcagctggttttaaatacacaagctgaccacaccagcccagggcctggtgtggaacaggcatgaactaggtgttgtaggaa

SEQ ID NO: 11775 - DNA, 6000 bp, Homo sapiens
attaagttattttcaaggaaagttcatctgggaaggtgttttcttgaaatgtaaaaataaattacagaatgtagaataaataaaattagtttattcacttaataccttttgaggaaaagttatatatttaaatagggtttgattaaaatgcaactgagaagtccattgttgatctgtcctggttatggggaagaacaaaaacatcgatactagaaatccatacactagtcccaaatccttcattttagctagagtgttaggtttaatcttgtcctcttaaaactttttccagtggtaacaactaatagtgaaatggctaattagactttcgtttcttttttaaaaatcatttgaaaaaagagctaattagttcttgaatagcaaggcctcaactagcagaaataacatggatgagaaagtccttggacagttcatgaacaagaaaaatgagttaccttaactgtaatgcaaagttaacttaatggacattactataataatatggatacatatagatataggcaaaacatagatatattaatagatacaggctagacaattgatataatcaatgactatcttaatttatccccagattacccccaaacaaagcaatgtataaatctttgtattaactcttaaacatataatgaaattttaaattggctgaacataaaaatcaggagcaaatcacttaattgcattgtcttccttcctaacttaataataccaacttaatatatggcaagtcacatagcaaccaaattgatgcaattttactattcttaaggtctctaactgcaatttatagaaaattcaaacttgtgtgttcacccaagaaatactaagatatataatattaaacttgatagtccctcttactccataattttacaaatgaactactttgaaagttaccagaagtggaaaacatacctactcttttatttcaagtcatatctccaagttttagccctaaactcttaagcaattagagataaaaatgttagttcatttatatttacattgctgactccattgaactttaaaaaacctaacttcatgactaatgatcttttacaggtaaactttcttaggttgtctttaactcttaaaaaccaaaatgactatattggtcatcttaagatttgtctgtttttaaatccactaaataattattcctagatttttccagaaaaaatctatgcattgatattatttcaaattcataaatcaggaaattatttttatgctatcttacaagcaataggtactattctatctgttttattgctaaaacaactattatacagaatacaggttcctttaatttgtggcacgtgtaaaaataggttttccgaaatgttgctcagtcaaaaatgtagaaaataaaaatctccaatatgagaagtattacagaccaaagagaagaattattttgcattatattcaattatccctaaaattcagaaaaaaaataacttatttgtttcaaaacaaaaacctgtcttaatatttggcaggagaaaaaaaagacattctaactgtgtataacaatgatcaatgttttcaaatataggtagtattcccaaaacatttttaaaaataaaaatatcaaagacaacacagtagataattaaccctaaaattatagattgaatatcaatagaagaaagacttttaaaagacccatagaacaatgaaaaatagccatactcaattatttgcataacataattttaaggttatagaaatgatccaactagaggttttcatgtgacaaatattaaataataaatttaatatataatattcttattttaaaacaataattgttttatgcataaaatattgactataacctaccctttataaaaatagcatagaacattaaaatgccaatgcgcaagttaggaattcgtacggcctaaaattgttatatcatctcaaataacaaaatggtaattattcaatatgaatggattccaacttctgggaaagaccctctaccgaactgctaacaagattattctctaaccagaacattttactttcaacatgcatgctaatttccagtatctgcttcacttttcaagaagaaaacattctgcctcttaattcaccctttcattatacttcaccacaaattatttggcacctgatctagaccaaacatttatgcactacgctctgaaaagatcaagcaatctaaaagttttatgaaaactctacttttatggtataaagaagagtgccttttcctaatcttatacaaaaataaattacttgagtttctccttttcaagctctatattaactactagagagcagataatgacattcatttgcaaaaaaaaaaaaaaaaagtgatgtccacctcttcctgcacccatagccaatacacttcagtgtgactggagttggggacatataaggcagtaaacacattactagagacaacagcttgaagaagaaaataacaataaaactgcacacacaacacatttactaatcataaagagatgcattggtaaaagaaaaaaatcatcatttctgtcataaattttgcactgcagccccagaatggagaacaatctgggcaatttattggcatattggcaggaggtgataaggctaaaaacaacaacagcgagcagctgtgcggggagatgggctgatagcatgatatggctcccacaccaaacacctcccgtcctatcagggctttttatcaaaccaggattacaataatagcttatgagagaaagcttctgaggggagggcagaaaatatagtcttggaataggaaaaaaaaatctgaattttgggacaaaacatgggggcaaaatacataatttatcactgtattatcaggaaatccaggcagtctaatcaaggagcactgagtgactattttttgccttatcatccaaagtggtggaaacggagaaggaattatcaggcttctgcagattgctgggctggaattttaatggtaataatcgggtttctgatggtatatcttctccgcttatctttcccattatctcctcttatctggccagtcatcatagcaaattaatggtgctctttcagcgtcgcctttttatcgctgcccggagagcacccaaggggaaagaataagcaaaatattaaaatactgcataaatcacaattttagatagcagggaactgtatgcagtaaaagaaaaaaaaaactgtgcccaacaacctttttgtcctttaaattgactgtcttcagagtttctggtataagctgactttttgcttgtcatagttgcttcaaattgggtatgttttatcagcagtgccaaagctttattttctaatcctggacatttccaagtttaaaatgcagttttattactggcgtgaaatgctattgtttcacagagcatagctttctgagattctccaaacttatatttgatccagaacatcaaaagtaacagtgttgtttgtaatagaaaatggtgcacttcttacgcactactaaaactggggggagagacctacaataataacgactttggatatcaacacaaacttctccatctgcgaaactgcctcttatgcctgaacaggcaaaaggagacaaacgtcaatagattgcaactaaaatgactttaaagctggtcaaacgacatttaagtatctcccccaccccctaaaaaagctaaaagaagaggactactccagtatagaaattcaaagacctttaatttttcacttttcttaacggtggaatggaagaaggggtgtccacatttgcacagattatcactgtgaccccaaattgaatccaataaaagtattacatgcatataaataatacatatgtatgcatatatcagcaggcaatgctcactgtgaataaatatataaatatatttgttcactttcaaatgaaataactttcaagcatttttgatacttaataaatcacagcattcaaataaaccactaaaatgttttatgacttgtaacacaagagtagcatcagcaattagtttcaatgctttaatcttcaattatatgaggtggacatagaaggaaataaaaaaattaatgtagctaattgagaagataacaaagtattcccaagtaaaatcagatggtcttgtgccatacaatcaattaatattaattatttattaacaaacccaggtgacagccatgaactaaaaagcatttgtatctaataatgtttataatcatatcttataataagcacggttttgtattctaagatgcaacatttaaacagaggaatctgatcaattgagtcctaaaaactacaaggcaattggtggaaaccatgaataatcattctgaaaaagtgagtcttcaaaaacgatatcgctacttgattaaaactgctttgagccaaaagtgaagtccagtacttgctttaacccaagttgcatagagtgagaactgaagtataagagaaggaatcgaagaaataaaagctagaaagtcatgtttaagtagcagacacacacacacacacacacacacacacacacacacacacacaaagatctgaatacttaactgttgataactgtttataacctggcccccatttcaaggacaagttgattgataagatttatttttaaactacaccaaatagaattttcaacatttgggggtggggcgagtatggttaataatcaggggggaaagggatactactaaagtcttatccttaaattacatcataatttgtttaaaactaattgcagactctgagcaacacggtgaaacagacacatcataaagctagcaaaaaataaactaataaggttttttcttcttttcggccaaagcgttgaagatatgtcgcaggcctataaaacgctattggaggaattctccccaagccaagaaaagttgaccgacttgatctctgcgagcgtgcctgtttcggaaggtgtctcttgacccgccgtgtcctctaagcaccatcgggacccccgggcacccgggggctcagggccatgcactcccctgcgcgcccaccgccttgaactcacagcttccgcgctgggaagtgactggcggcccctcccagggaggactccgcgcgccaccagggccagacaccacccgaatccccgctcggctgagcgtcctggcggcgtgagccggacccgcccgaagtcccaggacacgacctgccagccaccagcccgcgcccgcagggcagagacgcacggccgcccgccgcagaggcgcgaacttttacacctactttttgtttcgcttcgggtttggtgtggctctggcaccgcccaggatcgggaccctgacgctctgattttccaccgcgtggggaagttacctccctcgccccgaggtctcgaccgcccagcttttctgagaagtttctaccctggttactaaaagtggttcccaagagtagtcccacgtcaatcgcacaaagcaatgacaacaacaataataagcgtctaaaggagcgggactgcccctccggctggacgacagcgccggggactcgcagcgtgcgcgggtcggaattaaaaaagcagcccgggagcgcgagggctgagcggggcaagcatgggctgctcctcgcagcctctctcctgcccgaggctcgggctggccgtctgtctgtctatgactgtctagttgtcccttcgactgctcaggcaaagtttgagacatctaggggaccgggagcggatctcccctagccccgccacccacccaccgctttcccgtcccgcgcaccccgctcctgggcaataatcccaccaactcccggccccgcgcgcaaacttacgtttgatctgccggggtttgctttgctttcgccgggacatctcggcggcggctgctgccgctggggctcccgcggtgcccgcggtcgcggctgccgctccctcggctcccgccgccgccgccgccgccgccgccgctggccaggctcggcccgccgccggccgg

SEQ ID NO: 11776 - DNA, 6000 bp, Homo sapiens
accaaaaccaaaatcaacaacaataaaaaaaacaagaaatgaaattctgatacatgctacaacacggatgaactttgaaaatactatactgaaagaagccagacacaaatgggcaaatattgcacgattccatttatatgaaatatctagaacatggaaattcatagagacagaaagcagatttgagctcactggggtctaaggggagaggggagtggaaattattgctttaatagatacggagtttatcttatgggtgatgacaagctttggaaatagtgttgatggttgcctaacattatgaatatagttaatgctattgagctctatacttaaaaatgattaaaatgacaaactttatcttatcttaaatattttaccataataaaaaagacagtgaagccgggcatggtggctcacacctgtaatcccaggtactttgggaggcagaggcgggtgggtcctctgaagtcaggagttcaagaccagcctgaccaatatggtgaaaccccatctctacttaaaaaaaaggtatataataataataatagtaaaacaatagatgtgactcaagattcctggcatgggaatagactgagggaactatggaaaagagacaaaattcagagggggaaaatgcaaaggcctagaattagaagcaaactaagctcgttgggaaatgggaacctgggttcaatgaagtcacccagggctggcagtgaatgaagctggggagctgagtggaggtcagatcaggagaagcctcacgtccggcacgaaagaggttgaacctggcgcagcaaggtttctaagcaggaaggagcatatggctgatcaggtttgactgtgggcaaaatcactccaaaaagtgtgggggatttatggcctgagaacagtggtgaaagcagtgagagaaccccgcagggtcaggccaggcacgagaaaataggctctagcccagctcccactccccagcggcccctagtgcccctaaaagccagtgtaagaaacaggagacaagccaggcgtggtggctcacgcctctaatcccagcactttgggaggctgaggctggtggatcacgaggtcaggagatcaagaccatcctggctaacacgatgaaaccccatctctactaaaaatacagaaaaaaaaaaaattagccgggcgtggcagcacgtgcctgtagtcccagctactagggaggctgaggcaggagaatcgcttgaacctgggaggcggaggttgcagtgagccaagattgcaccactgcactctagcctgggacacagcgtgagactccgtctcaaaaaaaaaaaaaaaaaaaaaaaaacagcagacccacctgtgtctcagttctgttacctgatttagcacgagttttccctgctctaacaggagaccatatgtccttctcaaggcccacctggataccaagtctctaaactggggaggaagcccacgtagaaattagcttagtgataaaaaaaaaaaaaaaaaaaaaaaaaaaaaaaaaaaaaaaaaaaaaaaaaccctgtgtgagccctggacgctctaacctaaatatctaccttcctggcaaggtctcctgggggagaagcgaaagaagggtgttttcctcccgcctgaaaattcggattgcctctcttttgcgctccgaaagaacacgcttcctccgggtgtgtcggggctacctgccattccccacccctgctgctcctccctggactgacccactgcccatggctcccagctcccctctcccactgctgccagttggaggttctgctcctaacccctaagggctgtttcttctgtctacttttccccgtggtgctcccagatacagctccctgccggcagcctccccactttgagaccctgttaactcagtcacctgggccccagctccttgttcagtgacctcatgtcaggagcttgaaatcagcgagggtggcagtattacagcacaggcatctgcagacaccacacattagcgcttttatttctggagagccagctgtcatccgtatccgtacaccgccgacagggcttctggttctttttttttttttttttttttttttttttttttttttttttttgagacggagtctcgctctgtctcccaggctggagtacagtggcgcgatcttggctcactgaaagctccacctcccgggttcacgccattctcctgcctcaacctcccgagtagctgggactacaggcgcctgccaccatgcccggctaatttttttatatctgtttagtagagacggggtttcactgtgttaaccaggatggtctcgatctcttgacctagtgatctgcccgcctcggcctcccaaagtgctgggattacaggtgtgagccaccgcgcctggccggcttctgattcttgcagacagactcctgcaagaaaaaaactgatcccacagtgccaggcagggcttcatttctctgagatctgctaggtccccaccacctcagcaggcagggccagtgcttcctaacattgtagaacttctcatttcacccctgtggtcaggctaactgagagagggctcagttcacaagcacattctgcaggctcctatggaacttgaactagagctctgagttcttcagcaggatggattgtgtgtgccatccaagaatggggatgctgtttcccataactgccaacccctgtcctctcatgttcctgaggttcaaatgcaagagatgctgcccctacaccggtctcaggcatttggaccggaatccaggcacattacataccccatgtaggcttcatggcctctaggctgtcttagctcattaacatctcgcagttaaactggaaaggccagaaaggtgttaaacagaaacaaaaacactgtaatcaatttggtttgactatatttaaccgtttagcttttcttttgttttcttttcttttttttaagagatagggtctcactctatcactcagcctgtagtacagtgatgtaatcattagctcactgcagccctgaactcctaggctcaagtgatcctcctgcctcagcctactaagtagctggggctatggtgggcaccatcatgcctggataacttgcttatttttgtagagactgggtctggctatcttgcccaggctggtctctaacttctgagctcaagcgatcctcccctctcagcctcccaaagtgctgggatttcagatgtgagccacagtgcccattgttggctttttgatacatttaagatcatgtacattactgttaattatgattgtttttgtcattcagtgtgtgtgattttccaaagattacactttgaatctccaggtgtgcactgaattgtccccctccttccccactgacaggctgaagtcctaagccccagtacctcagaatatgaccttatttggaaatcagatgattgcagatgtaattagttaagatgagggcatgctggagtagggtagggtgggccccaaatctaatatgactggtgttcttataaaagggggatatatttggacacaggaaaaatgccacgtgtacatgaagctggccatctacaacccaggagagaggcctgaaacaatctttcctcacagtcatcagaactggaaccaacactgcccacaccttgaacacaggcttccagcgtccaggactgtgagacagcacacgtctgctgatttagccccctagcttatggcactttctgacagcagcgctagctaaccaatacactccctgctaaatgtacttttccatttgtgccccaccagggtttgcagacaagcaaaattgtcatagttccctaacgcctcagaatgttttcttcctggatcactttttataattattacttacagtgagggaaaactgaaatattgcaatgccatccacaattaggattagtcccaaccactcagaaacgttaaaaactgatctaataaaaataaagaaccttaagacgcattaaactctaagctacttggaagctgcttcttctgtttgtggacacgcagatttgccacagttgaaatcactggccacgtgctgtcttgtgtgtgtttgtcacttaacatcgcatgacagaaatatttccacgtagtgacaatgttcatattcttatttaaatagcgacttactagtcatttgttatattctcatttttcactacatttttgtgtaatttattttttaactgcatttaaactttttcctcggggcatgtacgggaagagttctggattccaattttagcccctgtcacacagaaccccgttcttctctagactgagctgacctgtggtttccccagaaataaaaacgacgcgtgcaggtttctccctccccttgacgtcatttcgtttgatcctttgtaatgattttccctagtttcgaaagcttgccctagtcttaacgctgttttcgcgtttccttatgtcgctaagcgggaggtagccccgcactctaagcatccggctcattttcatgttttaccggaccccagcgaccggcgccctctgcgctaggcgcccggtgccgtatagccctccgccgtgtgcagccgggtgctggtgttgttgcagcggcgcccgccaggaggcagcgcaggctcggcattggctgcggcgtcccacaatgcaccgggctctggggcctgcacgacagtcttgaacccagctgcggggccgcgagaaggcgggcccgggagccggcgagggcggggcctccgaggaaagggccgggagccgacgcggaggcggtgggcggggcgttagggggcggggccgggagccgccgagggggcggtgggcggggtattcggggggcggagccgggagcctcccagggggcagtgggtgggaccgggagccggccggccgggccggggatgcggtgagccgagggcggggcctcagggggcgggaccgtggagagggcggggccgggccgctggcgctgtcgccggctgcagtggccgccgctggagaccgcgggacctggcgctgcagcgaggtaggggctcttcgggatcttccctttcgggggtgggaagtcttttcttcgtcgtgccaacgggagaagcggcgagctgctaaaatttagagacggcttcgcacttctcgctgtagcccgggctttacccgggggatcgattttaaaactctttgtctggccccgtcgtcctgcccgcgggccggacgtggggcgcctgctctgggcgtctggggcgggcgattgcaagctcgcggtccatgtcccctgcctcggagtgtggacgtgaactccggggtgggctgggctgggtttctacagaggcgggaatttgtgagaactgggagagtgtggctgtcggcaggggtccgtatcacactgtgggcgggggtcccgacccctgctgcctcgggtacggggtaagcggcatctgccacgcgcccgcctcgcgcgctgtcaggaggcgctgtccccgtgggtaagcccgtgccgtgggtgccctccagtccctgcagccccaaacacacctaccccagaggacaccacagaatgcggaccccaaagccagccgtacctgcgagcccctcagcacagctgactttaatttgggatcccacaatttgagcttttcaaaagttaagtttggcagattggaagcccgggaatagggggcgctcggaatgctgagttttgttggtgtttgtcctcagcctgtttctgggtcaccctgcagggctccatccgttcagtctcaccccttggtaagcatgtcctgtcctgaaggctccatgctgaaagtctagaccccatctttgcctacttttcaaggcttggcaaagcacgtgtgtcttttgatccttatcccccatgtaacataattcatgtttttaaagatatgtttttatttaaaaccttccccctatattttcattcccataaatacgaattggttgattttacttgtgaactcctttaggcatttagtaataaaggt

SEQ ID NO: 11777 - DNA, 6000 bp, Homo sapiens
gcctgtaatcccagaactttctgaggctgacaccagaggatcaacgtgagcccaggagttctaaaccagcctgggcaacatagtgagaccttgtctctacaaaaaatacaaattaaaaattagaaaagaaatgtacgttattaagttgcatcccaaagcttatgctgtatcagatcctctggggtcgtggtcaggaatctgtattttcttttttgttttttttttttttttttttgagacagactctcgctctgtcgcctaggctggagtgcagtggcgcgatctcagctcactgcaagctctgccttcgggggttcatgccattctcctgcctcagcctcccgagtagctgggactactacaggggcctgcaaccacgcccggctaattttttgtatttttagtaaagacggggtttcaccatgttaaccaggatggtcttgatctcctgatctcgtgatcagcccatctcagcctcccaaagttctgggactacaggcgtgagccaccgcgcctggccaggaatctgtattttcacaagccttccaggtcatcgtgacatacgctgacgcctgcagtgacccttcattcggctacctaactgtgcaaggagagaatttgcagtgttgtcattcctcccagtggatcattcatagtgtgggttgtcccttgacagctcaatttgtcacgtgtatgtgtatggtatacatgtgaaaggtgttaatttatcttataaaaatgggaagatgatgaacatttacttatcaatccagtcaatgaggatagttaaataaatctaaatttacctaaataaatagctgcaaacgttcacagtttttgtttgtttttttaatggcttaggaaatggtctgtgctggagaatgctccatgtgtacgtgaaaggggtgtgcattctgctgctattgagtggcgtcctctatagatgtgtctctctgttctttcaacacaccacagtgggggcatagccccatgtgtgtgtgtcggaaccttggagtccgggtatgcttttcagtcagcaagggataggaggggttggcttttaaatactgatgtggccaaaggtttgagtatcgcgtgcattgtggccctcagcaagacgtgacccctttacgagtcccctggtttctcaaagccatcatgtccttatcactggaaggaggactgataaagacaagtatggtatcaatgaagttatgcataaagtgcctttgtaaacaaaacgtgattgttttgacttctgcttttattccttaagctctctcacacttttgctcacccaaggtagacactgcgctgctggaaacatggattgtgtggctcgaatactgacccctctgtcaaggaaacaagtttccccaattctttagttgccatcagtttttttttatatgtgacattaaacaaaccaaataatgtcacatttagccatcatgacaacacaccaaattttctaagattttcgcacatgtgccgcttttctagctaattagcattctcatctgggcatgttttaaaattttctaattttatctcaactatcatgttcatattttctgccccctcctcagataattccatttaaaatacactctccctcttcagtggctgcacttttcagatgtttatgttgtcatctctccaaccttgtcttaaattagttgctacctgaatttaggtatgtcattatcccttccagaacgtcagcacctctttgcctttaatcatcgcactgctcaactctctgatcggtcccgagtgccaagggtatttctagtgttgcttagccaggtcctgaggctgtggagagtgtgaggcccaggatggggaatggagtcagtatacaagtagagaagtatgatgttccaggcagcacaggccctggcagagaagtggccacagagcttcctggtgtgacgtccctgggcccccacactcactctaaccacgtgtggttaatactgccctaagtaacatgtactggacttctgatatagattaaggctttcgcaatcatttacacatcaaagtgtgtatgtatgtgtcgggggagcttgcagtgttctaataggctcaagctggaccgcaaggagggcacaagagtgttctggaggagattcaaaacgcaggcagggaaccgcagaggaggtcagagaagtaaaacagagggaccactgatctctctgcaaacgccaaacaagaaatattggacgctagatggcagcagagccccatgttttccttccaaattaagccagccttgagatcttgggcgaaaaattcactgtataaacacacaaatacaaccatatcagaaaaccagcttattttatttgtcagccgtttcatacccttctcataatcatgatcaataaacaatttggtacgaatcattgtaactctctaatatacgatcgggccaaagaaaataccccacataaataacagcaaaaaaaatgagtggttattggttatctggaccattatttctcaaggctttgtatcagatagattctttgctctctggggaaaggaggtggcatgggacgtttttcaacagaacacaggaaaagggaagttcagcccggagcctgtcacaattatgtggaaaggtgttccatctctcaggtgacactcaccgtcgttcctgattgggatcctaatcaagtgaaaatcatctatgagtcctagcctaggatggttagatgttggaaacgttttttaatggcagaaatccttcttggtgacacgagccattaggaatggcagtgtagagacagggcaccgtttctcaagaagaagtcagctcttaagctcctgaaaagagatccgtttttccggatgaggcgcttgaaatgaactattggagcacttaatgggtcttggaaagcatttttgttcactcgctgactcacagatactatctgaggtctgatttaaaatcccagagggggcgaccctctgctccacaggcccggttcagcctgaagaatagaactcaggggttctatgggaattcccccgtgactgaggcattctgtcttccgagtgtccctccagggatacatgaggcaagacgggactctgcgctgaggaaaatccaagtcatgttcaggactgcaactccaagagcacgcattctctccctccccacccaccccatatttaaatctcatatatctgcgaggagaaaagggttgtggaggtggccccaattgtggccacctgcaccttaggctgcagggagactaagaaagtcaggcttcggtgtttccatgccaaggttgcagtccttcctggatccattatgcctttctagggtagactaggtcacagaggcaggagcaatctaagaaaattgaaggagggatataaaactttatcaaactgtcaacccatttaatctcaaagactgacagaggaagtgcaggtgggatgaagcggtgggctgtccctcccaccacaggcattcggtgctgtggggataccgcaggtagatggttgtatactctaatggttccaggcctggaggctaattctctcttactagggtatgggatttccacgttctgtcctctgaaagggctaaacctttttggtcaaggatgtcgaatcctttaaatgtccttctatggaaaccagccctcactcgtggtgtttctattaactgaccaccttctcctaaaatgtctctccttacacgttccccaggaactgcaggaatgcctcctctatttggggagctgggtgaaatccagtttactgtatcaagtactgctattctaaagcactgttctctctctgcgggcttcatccttttgcagaatcagggagaacctgtctcttctcttttaaggtcccttcccaacccacagaattttatatatagtttcatcagaagctgtgccaacatgccggctctcacaaccagaccataatattaattctagagacttcctcatgtcacgttttatctgaagctgaagtttgggcatggctaaatctaacacaatccaaagtcaggaaatgtgtaaatttgtgtaactccttgcaaatagtccatcttgcaaaacattatacatatcatcatatatatatatatataaatgtataaatatattcctcccttggagttgaagcttgtgccctttccacctgcatttctgatctaagttaggtagggggctgctctctggtcagcaaggaagggagatcaaaggatggaggcgggactctgcccctgcagaaaccctccagtttgctggagttgccggattacattgttcctccccggtgtgcggcgtgagcttcccccacccgagcgcccaacaagtctcctttctccagcctgcgcgctgctgcgctgaggccgaatgaagcgcagcacggtgcgggcagcccgaggccccgaggctgggctctgtctgtctgggactgcgccgtgcccagcctcggtcccctctctgtgggtaaggatggttgagtccagcctccacggcagcggctccttgtgccactagcagcccttcttctgcgctctccgccttttctctctagactggatctctcctcccccccgcgcccccctccccgcatctcccactcgctggctctctctccagctgcctcctctccaggtctctcctggctgcgcgcgctcctctccccgcttctccccctcccgcagcctcgccgccttggtgccttcctgcccggctcggccggcgctcgtccccggccccggccccgccagcccgggtctccgcgctcggagcagctcagccctgcagtggctcgggacccgatgctatgagagggaagcgagccgggcgcccagaccttcaggaggcgtcggatgcgcggcgggtcttgggaccgggctctctctccggctcgccttgccctcgggtgattatttggctccgctcatagccctgccttcctcggaggagccatcggtgtcgcgtgcgtgtggagtatctgcagacatgactgcgtggaggagattccagtcgctgctcctgcttctcgggctgctggtgctgtgcgcgaggctcctcactgcagcgaagggtaagacggacttgctcctggccggggaggcggtagagccctcggaggccccgtgtgcggacgcgagtgtgcgttttggggaccgcagggtacggagtggccgcctctgcccggcgctgctccatcgccgaagctcggggaacgcgatgcacgggagggagcttccatcgcgctctccccagccctcctgggcccccgccccaccccgccattccttccccctctcttgggctcacaggagagatctctttttctcggcagtacagggtgtcaaggagaaaggaacccaatacgagttgggctggaactgtgctccgccggggcggtgttgcctcctccgagacgtggactccacgggtcggggtggctgaggggcagttcccaggactttctccccggacccgacgcgcctgggaaagcgtcccgggtgaagccggcctggaaagttcgggctctctacgggggttttggtaccaataggcaaaggtctccgccggcccggcctcctcgcacccatacaccccattcctcctctcctccttccctctccaacgtcctcagccggcgaggagtagctgcctctagaaggtcgcccccgctttcctctcccccggacttcgctccttgcaagttgtaaggtgttggcaaggtgcgtgaaacaggctaggagttctggaccggcttccaagtcagatacattcactgtgggcgcacgggtatcctccttctacgctggtcaggggaaggagtttctctgggtggctcctgggcttggggctctgtgagcttggttttctccctgaatgagttggggaatgttttcttctaagtagcctacaggctgcgacctcaaggctggcaatagcttgtgtacttgtttattctccgggaaagaacataagctccctt

SEQ ID NO: 11778 - DNA, 6000 bp, Homo sapiens
gactggctcgtggatcatcccagggttagcgaccacagaagacaccagtatcttccacatcaactccttcaactattgctacaaatttatagagccaaaacattccgtttactctcatttctcataacgtactcctggaaatttatctaaaagtaaacattccagcagaggacagtggaggaactgtgttccccaaatggttgttgcagtggtatcaacactacaaaaataggtaaacaaataaaatcttcagctgcgtaggatttgctgacaataataagtactatacgaatatttgaatgtattcctgatacattgagtgtaaaatgcagaatattaacttcaaggctcattcttatttcattaatgtaacagaaaagatagacagataaagattagaaaatgtatgcccaacattaaaataagaattgccttaattatgaagacgctgcttctgatttttaatcagactgtaccacacttaacctgaactgctctaatcacagcagcagtgccagaggtccctggagcctgggaccttatgtggctactgaggctaggcatcacccagtttgtaatttttgccaatctaaagaagtaatgtgatgtcaggccgggagtggtggatcacgcctgtaatcccagcactttgggagacggaggcagacagatcacttgagctcaggaattcaagaccagcctggccaacacagggaaaccccgtctctactaaaaataaaaaaattacccaggcacagtggcacgtgcctgtaatcccagctactcataagactgaggcaggagaatcgcttgaacccgggaggtggaggttgcagtgagctgagatcgcgccattgcactccagtctggatggcagggcaagatcttgtctaataaataaataaagtgatgtcattcactttgcactttttaaaatattgataggtttcagcatcacttaaattatcttcagtttggaaacattttcttcagtaaattaggccttttcgggtttttctcttccataaattgccttttccccttttttactgaggttgctgcctcctcgtttttgttgaaatataggagttacttgtatatttcatatattaatgacttgtcagtttgagacattgcaaaacacttctcccactgtatctaacttctgtccgttaacgtccacaaggtccttcactaaacagaaggcttcagttgttacacacaaaaaaatgcaatccatttttcccttgtggtttgtgttttgaggtgttgtttaagacatccttctccattactaagtcataaaaatattctgctattttttgtacttctttctgttaaagtcttatctttcatatgtaggtctttactctacatggcgtccacctgtgggcatgcgctaggtggagatctacttttattgtttggatctaatgagctcattttatcacacattcactaaacaatttgtatttctccattgatttgtggtgccgctattggtcatatattttaagttctatgtatttgtaggtcagcttctgagctctccactgcattctatagattttttgtctgttctgtgccaataccataacgttctataaacatgactttttcttgatatatattaatatctagaagggtacaaatgcctctttatccttcttcacaaagtcggctaatttgtggacctcctctcttcattcacattttagagtaagtctatcaagtttcgtaaagatcattttggaatttttaataagtttccactgaatgtatagattaattaaggaagaattgacaattttattaagctgtttgaatcaaaaacaagaatatatctactcagatcatttcttatattctttattagagttttatggtgtgctccagacaaatcttatgtatgttttaaatcaattcctaagcactttatagacattctaactattacaactatcttaatttttccagttttgtatagtacgtgtacagagaaacgctattggtttttgtaagttatattagaaggccttttggccttttttttttttttttttgagacggagtctcgctctgttgcccaggctggagtgcagtggcgtgatctcggctcactgcaagctctgcctgctgggttcacacctttctccttcctcagcgtctcaagtagctgggactacaggtgcctgccaccacgcccagctattttttttttttttttttttagtagagatggggtttcaccatgttagccagggtggtctcgatctcctgacctcatgatccacccgcctcggcctcccaaagtgctgggattacaggcgtgagccaccgcacccggccacgttttgaactatttcatcagcttgacaaggttgattgttctaggtagagaagcatctgtagatgatgagtgtctcacccttcctttctgctagttacatgatcttatttccttcagtttccttatacattaggtataccctccaacacaatattaaacagtagttgtgatactgagcatgcttgtcttcttatctgtgagccactgtgcccaaccaagaaaaatcatttgattatttcaatcctagcacttggggaggccgaggcaggcagatcacttcagctcaggagttcgagaccagcctggctaacatgaagaaaccccatctgtactaaaaatacaaaaattagctgagtctggtagcacacgcctgcaattccagctacttgggaggctgagacatgagaacagggcttgaacccaggaggttgaggttgccgtgagccaagattgcgcctattcactccagcctcatgtcagagctagactgcctcaagaaagaaagaaaaaaaaaggatttttcttgttcaaaatgataatggagtgacatcaaaggatttctgggttgtgaaaattcatagtaaaacccaccttatcatataatactattttaatatattttgaatttatcattttacctaggatttttgcatctgtgcttgtcattaaaataattttctttctatgtatatctttgtttacaatcaaaactacagcagtcttttaaaataagctgggtaaagttcggtctttgtttcctggagcaaattatattaggtagcagttaactgttcattgaaactttggcagaattaatctgtaaaagtacctagacctgaatagtctttgactaccagtttaatttctctaacactcactggactattcaaattctctctctctctctctcttttttttttttttttttttttttgagatgaagtctccctctgtcacccaggctggagtacaatggtacgatctcggctaactgcaacctccacctcccaggttcaagcggttctcctgtctcagcctcccaagtagctgggattacaggtgtccaccaccacacccagctaatctttgtatttttagtagagacagcgtttcgccatgttggccaggctggtctcaaactcctgacctcaggtgatccgcctgccttggcctctcaaaatgctgggattacaggcatgagacatcgtgcctggccaagttctctttcttcttatgttaatttgaacatgctttcgccatgggatgtgcctgctcccctttcaccttccgttatgagcataagctcccaaggccttcctagaaactgagcagatgccagcaccgtgcttcctgtaaatcctgaagaactgtgagccaatcaaacttcttttctgataaattacccagtctcaggtatttctttatagtcatacaagaacagcctattacaatatatgggtatatacatgaatgacaaagaatgtctccctgatcagactctggacagcctcctccgagctctctgcacgactgggcccaacctgggcattccttcctctgttcctgcagagtctagttttagcaagaatcctgctaagtcagtttaatcccaattccccacctcaggtgtctgaataccctccatatctgaccaaattccaacacctgctccaccccacccccatccccgatgtggatcaacttggcccaccctcagcaggaatcctgttaggtcagggaagccagaacccccacttgatgtccccttctcaatgactttccatccaccgtcccccacactgctccttggctataaatccccacttttccttattattttcggaccccaatctctctcccctgctgcaaaacctcagtgcagtcccttacatctaaggaaatggttctgaataaaagtctgtcttaccgtttttaaaacgtcagaatgttttcagatacgtgtgtgtatatatctccatatctgtaaatatatataaatatagatatagatatctccgaagagaaggttttccaatgtgcactttttcttcttgcacattgcgatcttaaccctcaagcacatctggaaaaagcttccatgaggatacagcctgggatggatttgtgggcgaggtgtagaccacgataccgggtaacgtgccctgtgttttctggacacagaactgtaagatttcaaaaagacccaatcaatgattctaacccaactctacatatatttactcaaacacagtattcctccctgactagtggttaacggacttgctttaggcggccccagaggcggtggccagtttagccacctcccgaggaacctgcgcagtcccgacgctcaccaagcgctttcctggcggttacagggttgggggcagcgcagaacccgcttctgcccttatcaggagcccggacctgagctggactccaccacctcgtccccacccaccctggaagccagaaaccccaagcatcctccctccctcccctgctggccactacgaataaaccagacatacaattcgcgcctaacggcttagccagaaatgccacccgcagtcgggccccgggccggaaacctccccgacgcggggccgcgtgcaggggaaggggcgggcgcaggctgcggggtcggcacggaagatgcacgcgaggctcctggggctctcggccctgctgcaggcggccgagcagagcgcgcgtgagtgcggcagcccgaggctgtgctcacccctgcagcccctaaccccaccccggcgccgggagccgcacaggctgcctatgcccgggcgggcactgccccagcctgcgcccagcactgcgcgccggtgacgcacggtggtggccatcccacctgcagagcacgtcctcccgtccttagtagatgcccacgcatgcaccatccccccaaggatgcatgattttcctccacccatgctcggttcccccccctcccgactggtgcttgacttcctcccgcccatgcacgatccccccgccccacgcatgcaagatcccctcgcagaagcaggggagatgtatccgcccttccttccatcacaagctttgcaaagtgctgcgatgccaagatgtgctgagcgcaagtctgggggcgcccgggctctcccccgacccccggccgtccagggggaccctgcgacttggaggccgctcgcagaaggggtggcggggggagggggacagggctccgcatccacgcggccctgtaggacggcgactccgcttcggggtttaggacggggcgggacgcggcccttcgaggccacctccgtcgcagggggaacccagagcccgccagccgcggcggagcaagatggccccatttttcgcgcccttctggtttgaacgcgtaactccttcagtgccgggaggagcgtctccgcccacttccgccgggctccctgcggaagctttttcccgggcagagtccctggggtggaagagggggtaccctgggaacgccgccttgggacttttccctgagttcgcgggcgtccccgcaggtcccgctgcttccgaggcgcgccgagcaggacgcacacggaggacgcgcaagcgccctggctccgcgccccggactggaagggctgagacaggacctgcgggggtcggcaccc

SEQ ID NO: 11779 - DNA, 6000 bp, Homo sapiens
acatgaagctttttatccttacttagacaatacagtggataaaaatataaagaagctcaagaagggtttaaatcaattcacagatgtcggagttataactagtttttaagagacaaaaaacttcacaaaatactcctcagtgatgttgctgttagagaatacagatgtacctacccccgccgattcttaccgatctctgtgacactacatatgggtgcatattccctgcgacctccccaaacttccccccaaacatttattatctttctcccatccttgttcctactcacagcatttctctccaccattaccaccaccctacaggtaatcactttgtttcttaggtctctttccagagttgctttatgcaaatacaaacaaataagaaaagataaccttatctcttcccctttcttacagaaaatgcagcatgttctattgttttgcactttgagttttgtgtaacaaagcatcctgcaactctttgtatatcattaaaaagaaaactatcatttttcaacatcactgcaccatattctgttgtgtggatgtaccataatttatttaactagttcccctttgggtggacatgtgggttttttccttccattctttctctcaattgtaagcaatgctacatgaataaacttgtacacacatactttctgacatctatgtatttatctgtaagataaagtcccataaaagggatggctgtctcaaagggtacctgcatttgaaattttggtaagtagtgccaaattccctttcataaagattttaccattttgtaccaccagcaacaaagtatgagagtgcttgctaacacttcaattcttaacatcgaatacagaaatgtagcttccagggataatgggttctatgagcttactcctcagcactcaaagaagtcctgtttctatagaagtcaataagatacaaggcacagaattgatgaggatgacatccacctactcttttgaagctttatgtaggctcaaactaggaaaatcttacgaaaaatgtataagacagcctctttgtaatgcttttgctgaggcctatccccatattggaattgaggtgttctgtttcctagctgcataccagcattgtaatagggtccctactctgactaacacagtaacactaatttcatttggaagtgccagtagctgcctggcccaggacaatggcagggtaagtagcaggctttggaattacacctgcctggattctaatctatggctccccttacccatgtgactctgggtaactcatttggcagactcgagtctgttttctagaccattaaaatgggaatactaatcctcatgcgtttttggactgccatataattaaaaggagtcacgtatgggagactgtttagtacataatagcattcaacactaactttcctttgtgcctttctgaaaatagagaattgggaagaaaaaccccaaagggcttctaaacatttaaaatttatgtcacaatttctgtatgttaaagctttttaactttactcatagaagaggctctaaaaatctatttagtattattttacatgtaactccaacatgctttgttatttggcttctctgtctatattaaagtgtaaatacaggggccaaagttgttaattaactgaataaacaaagaaagcagagattaaaaaatactgttagaaaaaaccaccactgctaccaccaccaccaccaacctcaacaacagttggtgcttagcaggccggcacaggcacataaatagttagagcctcttagcataaggccacttcaaggtcaagttgtcaagaaaaggtcaactttctgcctgatgtgcagagcacaagccaatgggcaatgcatttctttcactttccccccactttaaagttttgaggtatctccgtaatgattgaattttatggaggtttacatcataaaacgtaaaatacattttttttggcacttaaaggtgaaatttcagttatctggaaaattaatttgcactaatttaatcaatacttatagagtgcccactatgtgttcagcattgtgctaagtgctggcttacttggaacaaaaatcacccccaaaattctaggtaaaagtgtgccatccaaagcacagtccagatttatgttaacttttcagtgagtcttcatgagaggtttattatcattgtaactgattttagagccttctgggttccataatgtatccttcttccaaagaaagtagaaggacaaaattgttgaaacagcaaatgtaaagttgaagtcacttgacagtctgagaatcttacatatctacttgaaacttcaattgtaataaacacttttgactcataagctcatttgtcagccttatatagcgagtgtaatttacttagctaatttcactagtttatgttctttcagggcacacagaaataggaatcataaatacaccattactgcccgcttttgtatctcatttcacagcctcgtagcttaaatagagaaaatatatttgaaagcacaaattaattgcacctattttctagaagtatttcaaaatgctttcttttattagagataccaaatacactcagcgatagaatttaagtagaaacatgtcagtattatgcaaacataataataacaacagtaataataatagcagttactctctagtgcttagctgcctatcaggtatcatattgagatccttgaaaggattaccacctttactctgcccagcaacttttcagaaaagtcactgttgttatttctattatatcaaggtgaaaactgagatttgaagaggtaatcttgctcacattattcatgttactattttagtgaaattggggttcatacctgggcaatcctactctatatttatgccatgtaaggtgttattcattcaaattcagcaaagaaacagaatcccatctatatgcagaaataatctttacctgctggccttaagttttactaccatagggagtatgaggcttacatatgagtatgagttttacataccatagggagtatgaggcttaaatcatagcatgaaatacatggatacagttatatggctggtttctaaaagttgattttggaatcactcccctcttcccaatgtatgggagtaaaaattcactattagtaatttttctaaagtcttcagagatttcacactggcatatatactcatgaaaagctgtgtcctaaaatgtagtatccccatctaccctgccactcccaaaactcataggtgccatagtattcaatagtatcaaagtaactattgaagttgtcaaacgcacctttctgccatagaacctccagccatataaatattacctaatttgtactcttaacattctaaagacagttattggcattattagaagactttagtgaatggagaagtagacagaatcacaaaaatgagttcaaaaatctagggaagtcaatgagaaaattcagggatttttttccccctcattcttttttttaactgtaaaatgttcatttcatctgatcaggaacaactgtaaccatgtagcttgccctattttggctatctggcttcaaaaatactttcactggaagatcattgtaattcaaatccattcagtgctgtttcacttttgtaatttgttagctaagtttaagtagtgtatcctgcacctactttaatgatatagcacattgataacatttttttccttatttaaagcaatgtttacccacagcgccttagcaccaaaaaaattctaaaaggcactccttacacatttaaataacctgaacaaataattgatacaggttaagccctggctagttctgcattttccaaattaagatcacagaatttaaaaattgcatattaaaaaaaaagttggtagaatatatttccatagggcagaaaatatattcaaggtcacaatatgcccattcattccttgctccaacatgtaagacccaaccaggctgatttccaattgaattttgcctgaagcttttttaaggtaatgatggaaactttattacaaaaggtggttaagttgtcagtgacaggaaaatcaggaggtcaacagaggtaagaggagaggtgtctaaatggaagtgagaatcagtaacttgattgtgaaaatctgacttatgtaatttttaaagaccctcaaaataagagaagaataagagaaatttaaaagaaaatagaaacagccaaagaggtgagacatagacattttgattgggggggggtgttgtctaactacacaatgaggtcatcccatctcccggaagtgacacgtaatcacctgctttgcactagctccgccccttccctcagaggtcccgcccctccaccagcagccgggagggtgttagggggcgtttctccaggaggaaagctgtgagctgcgacgctgaggaaggggaccccaaaacgtctggcactgccccctccagggatcactttggaccgcctcactcgggccagccggattctgaaacgccgaggggtcaacctgatgggtttcggggtcaacggaagaggggaaggggagccctggcggggagaaccccccggtcccccgcccagcagctgaggcacaggagggcggccatcttggccgggagggtagggctggggagctgcgggcgccgtgcgattggggggctcgcccggaagtgacgccaactacccggaagcggagggggttccctggcccactcccccctcgttcgtttgctcccccgcttcctccccgccccccttcctttccatttgtttccccccctccccgttccctgcctttttccccccccccccgccgtccctcccccccaacctccggagctgggaagagagtcaagatggcggcgaaatccgatggcggtggcgtgggggtgggcttcgctcagctgcacaacctggacgaggcggtgggcagcggcggcgaggaggacggggagcccgggggaggcggctgcggcggcggcggcgacggcagcgagcccggcgagagcagctcgatgcacatctgccactgctgcaacacctcctcgtgctactggggctgccgctccgcctgcctgcgctccctcctgggcaggaagccgcgccgcagcgccgccgccgacgggggggaccagccgctgcagcctcccgcggcccccggcgccggccgccaacccccgacgccctcggccgcgcggccggagccgccgccgccgcaggtggagcggccgtggctcgactgcctgtggatcgtgctggcgctgctggtgttcttcggggacgtgggcaccgacctgtggctggccctcgactactaccgcaagggggactacgtctacttcgggctgaccctcttcttcgtgctggtgccgtcgctgctggtgcagagcctgagcttccgctggttcgtgcaggactacacgggcggcgggctgggcgccgtggaggggctcaccagccggggcccccccatgatgggggccggctacgtccacggcgcggcccgcggtggcccaggcgtgagggtctcccccacgccgggggcgcagcgcctgtgtcgcctctccgtgtggatctggcagtcggtcatccacctgctgcagatggggcaggtgtggaggtaagagcactgcggggtgggggcgggccggccctgaggagcccccctccgccctcccggtgcttcgcggggcggcccctcgaaagggcccagcgcggggggctcgaaggagggaccggccgcgcgccgcccctggcgtctccaaaagaccggcgtttgatctggatccctggccacgcctttggcccggggaggccgagacctgccgttggcccgtcctcgtccccgcttcgcactcggcggggctcttgccccaacctgccctccccgtcccctctgcagagctccgttcccaagcgtcccttttccctgcctcccgaggtaaccagctgcgggcgccctgggctgcaccccagctcg

SEQ ID NO: 11780 - DNA, 6000 bp, Homo sapiens
acatctacgccaaatcagagtttaattaagaaataaagctttatggtcagttttaaggaaatagtacatgttaacttaaataataatgataataaataggattttttacattctgagagaacttgctatgaattatctaccgttatcagcgtttccaattcatttaaaattatgatattttaatagcttatccaattatttttattgtatgaagcataacatgcctcaatggtaaaaaatggaaacataagatttaacaggacattaatgcagtttgaaattacagtaattttgaaattaaaacaaaaagatggaaaaccaaataatttttataaaaatttctcaacattgaatttgtagattgctttgggaagtatggtcgttttcacaatattgattctacccatccatgagcatgggatgtgtttccatttgtttgtgtcatctataatttctttcggtagtgttttgtagtttttcttgtaaaggtctttaacctcattggttaggtatatttctaagtattttattttattttttgctctatggtaaaaggggtcgagttcttgatttgattctcagcttggtcactgttggtgtatagcagaactactgatttgtgtacattagttttgtatcctaaaactttgctgaattcattcatcagttctaggagctttttggaggggtctttagggttttctaggtatacaatcatatcatcagcaaacagtgacagtttgactttctctttaccaatttggatgccctttatttctttttcttgtctgattgctctgactaggacttctagtactatgttgaagaggagtggtgagaggggacatccttatcttgttccagttctcagagagaatgctttcaacttttccgcattcactgttatgttgactgagggtttgtcatagatggcttttattacattgaggtatgtcccttctgtgccagttttgttgagggttttaatcataaagggatgctaattttgtcagatgtgttttttgcctctattgggatgattatgtgatttttgtttctgattctatttatgtggtgtatcatattttttattgacttgcatatcactgcattcctggtatgaaacccacttgatcatggtgaattatctttttgatatactattggatttggttagctagtattttgttaaggattttaacatctatgtttatgagggatattggtccgtagttttttgttgtcattgttatgtcctttcctggttttggtattagggtgatactggcatcatataattatttatggaagattctctctctctctctctctctctctctctctctctctctaagagtcattctcattctgtcacccaggctgaagtgcagtggcaccatctctgctcactgcaacctctgccttccgggttcaagcaattcttctgccttagcctcccaagtagctaagattataggcacccaccaccacacccagctaatttttatatttttggtagagatgggattttcccatgttggccaggctggtcttaaactcctgacctcaagtgatccacctgccttggcttccaaaagtactgagattacaggtgtgaaccactgtgcccagctccctcttactctatcttttggaatagtgtcaacaggattgataccaattcttctttgaatatctggtagaattcagctgtgaatccaactggtcctggactctttttgttggtaattttttattacagtttcaatctcactgcttgttattggtctgttcagtgtttctaatgcttcctgaattaaactaggaaggttgtatctttttgggaattgagccatgtcctctaggttttgtagtctatgcacttaaaatgttcatagtagccttaaatgatcttctgtatttctgtgatgtcaggtgtattgtctcccatttcatttctaattgtgcttatttggagcttcgctattcttttcttggttaatcttgctaatggcctatcaattttatttatcttttcaaagaaccagctttgtgtttcatttatctgttgtatttttgtttgtttgtttcaatttcatttacttctgctctgatcttggttattttctttcttctgctgggtttgggtttggtttttcttgtttctctagttccttgaggtgtgacctgagattctctatttgtgtttaacaaagcaaacaaaaacacgaagtagggaaaggacaccctattcaacaaatggtgtgggggtaattggcaagccatgtgtaggataatgaaactggatcctcatctcccaccttatacaaaaatcaactcaagatggatcaaggacttaaatctaaaacctgaaattataaaaattctagaagataacattggaaaaatccttccagatattaacttaagcaaggatttcatgactaagagcccaaaagcaaatgcaataagaacaaagataaatagctaggacttaaattgaagagcttttgcattacaaaaggaacactcagaaaggtaaacagacaacccacagggtgggagaaaatcttcacaatctatacattcaacaaaagactactatccaaaatctactaggaactcaaacaaagtagcaaaaaaaaaatccccatcaaaaagtgggtaaggacataaatagacagttctcaaaaaaaagatatacaaatgaccaataaacacatgaaaaaatgcttaacatcacaaatgatcatggaaatgcatataaaaaccacaatgcaataccaccttactacctcaaaaatggccataatcaaaaaatcaaaaagtaataggcattggtgtagatgcagtgaaaaaggaatacttctacaccactggtaggaatgtaaactagtacaaacattatggaaaatagtggggagattcctgaaataattaaatgtagaactaccatttgatctagcaatcccactactgagtacctacccagagtaaaagaagtcattatacaaaaaaaatacttcactttcatgtttatagcagcacaattcacaattacaaaaatatggaaccagcccaaatgcccatcagtcaataagctgtggtatatatatgtacagtggaatactactcagccataaaaaggaaggaattaatggcatttgcagcaacctggatgggattggagactattattctaagtgaagtaaaagtaacttaggaatggaaaaccaaacattccatgttctcactcataagtgggagctaagctgtgaggatacaaaggaataagaatgacacaatggactttgggcactcagggggaaatggtgagaagtgagtgaacgagaaaaggctacaaattgggttcattatagactgctgaggtgatggatgcataaaaatctcacaaatcaccactaaagaacttactcatgtaaccaaatatcacctgtttcccaaaaacctatggaaaaaaaaattctcaacattttatctacagtaggattgagtcaatgaacattacaatgataattgtatagtacatatattttatattacttaacatataatttaattacttattaatattatttttatttgtgtataatttattcagaagtatttatgttagattcgtcatttaataagtataaaagcaatctgagaaaaaactgaagagataataatgaacaattattgtcttatagaaaattatattttataaaaatcagtttccatccttctggtaataaatatgttattctgaaaattgtacacttaagacatattcagtgcttattcatattgttttactcttcttatccatatttctaagttgtataagacagtaaaaaatgcatttgcttattgaaagaattaattctagaacctgaatgtatgcattatcaaagaatatcatctttagtttttcagaactgacttctaatttcattacattatgaaatagtatggtataatatatagtgttcttagagttaaatatttttttctgataactcattgaaatacaactaaaataaccaacataattctgaataaaacttaatttgatagctattgtctacataaatctgcacaaatgtgaattttctttcataggttcttgcaaatacactaatatttttactgaagcatatatactgaaccatttgtatcctgcatttttagagaaaggtacagaaaatccttgtggtagactcagtctctctctactgcaaagaacaggtaaatcatagtctaagtgtagcttggtgtattcatctattcttgctctggtataaaaaaatatttgagacggggtaattgacaaagaaaagaggtttaattggctcctagttctacaggctgtacaggaagcatagaggcttttgcttctggggaggcctcaggaaacttacaatcatggtggaaggcaaaggggaaacagacacgtcttatatggcaggagcaggtccaagagggagtggggaggtgccacccacttaaccacgtcccatgagaactctattaccagaacagcaccaaagggggaaattcactgccatgatctcatcacctttcgccaggagccatctccaacattggagagtacaattcaagatgagattttggtggggacatagatccaaactgtatcacttggacatgagtagagttctttagttaccggtaactggaggtagacctgagcctcccaagggaaaaacttactgttgaaatgggacaaatctgactggaaataatatatatattgtggatataacaatgaattaaacatctctaaaaaactatattgaacaaaatgattcgaagttttctataacattttaattacacaacaatagttatttgaatgctcactgccaattattttaacgtacattgttcttttgtttcaaaaaaatcatgggtttattttttttaatgcttctttttttttccttctttctctttctttcttttttctttttcagatgacacgagaacaatacatactagcaacccaacagaataacctgccaaggactgagaatgcacaactttacccagtgggaatttatggatggcgaaagaggtgcttatacttctttgtccttctgctgttggttaccatgatagttaacttagccatgacaatatggatattgaaagttatgaatttcactgtggtaagtaccactatgattttacatcttattgctcttggttcagagacaatctagctctgttactttaattttttaatcaaaagttattcatatcaatatttacaagtgtgtgtttttaaatcccaaagaaaataatattttattttaagaatacattcagtaggttcagtcctgacacacgtatgctattactacctgccatttaagtgtgggaaatttagatcacgagacagtacagcacattgattcattagaacatttcaagaacatttaaccagtaagtatgaactattacttactgtgtcttaaaatctaagaaattagcctgcttttagaagtgatacttcacattaaaattaatattacttttataaatcatatgtgcctttgaattacttcatataacatatatacctttatatatctctatatctgctttctatgtaacacactgcatgactgaatctgaaagcctggaatttctcctgaagtacattgactaatgcctataattgccatcagatggtgatcccattctttcatagcacatccctcgtaaatggaagataaaccagcaattaaatcactcttttataaaagtaactaattacaaaatgattgtataatgtattaatgaagtttgctgcagtttactgaatgtttataataaatctatgagcatgacttatctgggaaaattttgtggcttcagcaaagtccagtttagctcactttatattttctggctgatgccttcagtttctctactctgcttttaaaccattctgcttttccttggggacct

SEQ ID NO: 11781 - DNA, 6000 bp, Homo sapiens
cctggtgcatgaatctgaagactgcaaggcttggttcttctccacttgagcaccccaattggaccctctagttcttccccaacctgtgcacttggctcctcccacccactggattgttcctttcctgagaactttctcttttttttttgaggcagggtctcgctctgttgcgcaggctggagtgcagtggtgccatctcgactcaccgcaacctctccctcccaggttcacgtggttctcctgcctcaggcactcgagtagctgggactacaggtgtgcgccaccgcacctggatatgttttttgtattttttgcagaaacggggtttcaccatgttggtcaggctggtctggaactcccgacctcaggtgatctgcccgcctctgcctcccagagtgctgggattataggcatgagccaccacacccagcctcctgagaactttctaatcactgtgctcttgcctctgctgtttgctcacctggagtgtcctcctctgtgctcagccaaattctacccatccttccagctccagcttgaatcctacccctagcaagtcctctctgattgcactcctgaaatccagtggtaccaactcttcctttctcccactgtgcctttgtttttttcagtatcttctcatagctacacgcttgactctataaatgctttcaggggaggggcagtcttgctgtattccccacagccgttggccctgctggggccagagaagtcgttcaataagtctgtgctgatggattgattgtggggtgccctggatcaggctctgtcccatggcagaggacacttccaccttgccagttctgtggctcctgacagtattagctggatgtgaggcaccttcttttcactcctggtcgatttttatctctggggtcagggaaccctcagccttcttcccttcacaaaggaataagattgtggtcagtgagcagtgtggcccaggcctaggtgcgcatgtgtgcgtgtgttggggtggggctgcaacgccctcccctccactggtccttcttccctctcctgctatccagagaacccactccataagcagagaggactagagagataagagaaagggaaggaatggaaggattcggtgttgcctttccctccccatgcagatttggactctaggatctgtgatggggaggggctgtgggcaggaggctcagctgctggtgaactcaggagcactggaatgagccaggaaggctgtaaaaggactcaggcactacggaatgtgtggaagtctgttggtgagcctagggcttgcctcctacctgctagagacttcacattttcctatgactacctcttacgacagctgcttaatagtctctgttgcccttgaacccctgtagctttttgtttctgcttctcatttgccccttaggttttattgccttgtcataggtccctaattcttcttctagaacccagagcaaagcagtaaacaactttatatgggccaggcattgtactagccgctttgtgtagtatcttatgtaatttctacaacgttggtttatcttttttaatccccattttatagatgagatgactgaggttcagaagtcctcttatctataaggtgttatagtacatgttcaactgtgtttcctctgtagatcccggcacaaggcagggggtcttcctcatggcagatgctcaggaaataagggatgatgccatttttaagagcagtttgggttgagtgttggggtgggcagagggtggggtgtcatgggatacgtctgtataggcagtaggtaagagagggtccaaggtcagagtgccctgcagtcacacaagctgaatgctggtggtgactgattggtgttctctactgttcttgggatggctgggtggtcttgggtcgcagaagggccacttacctcctgctaccggaatcctctttcctactcccgtgggagctcagtgagaaccatccccagggcttcattgctgctttctcagccccattttctggataggtgggaggggagaactacatatatgattcagagaatttctctcattatgctcaaatgaagttaaaagaaagtgaaattcttttttgtggggaaggggagagggatatgctgagcagaaattctggagtttggagcagggtccttggaagggggaaggcctgcgtgagattccgaaatgggtggtggtggggagtatttggacaaccagaagaccctggaagtcgaggagatgagaggggggacattcatttaggccaggctcccagcctcgggcctccaggccaagcctgcctggcagtgtaattcctgtcaagttttatcttttaacctacacttatccaaagccggttccttatgctccccaatttttggaaaaaaagccaagagaccttgtcagatgcgaagtcacttcctagaacatgagaggcttggaggaatgacagggagggcaggcctgaagggggctttccccaactccaatccctaagccctctgtcccagactcgtcactacccagctagggcctaggctcgaagcaggcacaactggatggctgggggagaagatggagggaggaaggtcgatgccccaggacggaccacaggaaagaggcgttcacaggagactcgctctctgtgcttccaaggccgggagcagccgccttcccgcctaaatcctcaagatggaagttgctccctctagctttcccaatagctaaggctgctggttttgttagtgacccctcccttctcgtccaagtcgatttctagcatttactggattccagagtcttgttatttaagaatgcatcttaaacggtactatcaaattcatgttacgtgcagcccagattgttttgggcagcacgaaaagtttctgaggcgctgcgtgtaccccaccccaggacaccgtgtgtgcgcgccgagctgagtgcgaggaacgtggcgcgagggccgggggatgccgggctgcgtgggtgtgagccctcgcgcgaccgcgaccccgcgcctctcccgctctcgccggaacgtgaccgcagccgcacctctcctccagccctttcccagccagacgcttccttttaggtccttctgggcgtttattgtaaattctgcgactaaaacacgccggtgagcccggcccaccgacagatggatcaatcgcccccttcccggctaggggaggaggaaccccccaaccccggagcctagggagccgggagctgcctcgggacgagctcctcggagcccagccggctgcggagccccggcccgggtcggtctcggggccctcctgccggggtggggtgcgagcccctgcccgattcctctggggcggttcaggcaggtttgccggcctccgaggaggtggtcagggcgccctggcccagcaggcttcttcccgagccggggggaggggagaccggctggggaaggggcatctcgaaggggtggaggccggggcgggcgggaggcaagcgcgccgcgggcgtgagggcaaagttcccgaggtccgcgcggagagcacacgtgtatgtgcgcgcggggctaggccggggccggcaggatgcgttgggttcgggggcgcgcggggccggcgccgaaggggataattcctttccctggcaccatcggggagacgctttgtcggcctcggctcctgggcgcagggacgccttagcccacggagggtggagcccccctcagacccgggccaccggctggggtttttctaacgccctgccccccgagcccccggatggctcgggccccacggactccgcgccctccagcctcagctcagctccccaggcttcccagacccagcggcgcagggggcgggggcaggggcagtgggggttggagggcgcagccggtccccagggtggggagagctgcggggggaggaggaggagggtgccgacgcttgagtgggttcgagcccgagccgtagccgggggagccagtcagtttccggccaaggcagcaggtcagtcccaggaagggcgggcgattgagccgagggagccggcggctgggctctcctctcggcccgcgatccccggcgccgccgccgccgccaccgccaccgccaccgccttcgccttgtcgccgccgccgctgcagagcatcgtagctccgccgcgctcccgcgccccgcgccccgcgccgccagccgcctgggagcccgagcgccgagcccggggcggaggagaggggcgctggcgcgagagcccgggcgagggagccgcgaagggagaagggggcgggcggagggaggagcagggagagtgggagaagggggagggagagaggagagcgagggagagctggagagagcgagagcaaagagcgagcgagggagaggagagagagagagaggagagagaaagacacacgcacgcagagacacacggtcactggaattccattagaaaaaagtgagccgagcaagggttagcgggagaagatttttttgaatcttgtcttcgtcttggtgcgaaagaagcgactccagtctctcgtcctcgaagctccgactggattgttcttgggcgctgacacccgtctgtggatttcttttctatttgcattttattccgaccccctccctcgccgcttccttccagcccttcactcgcaaatcgcctctctccccacctccccaggcccctcctgggaagcgcaggggaattggacccgcggggactcacgccttcccggacgattggaggggagggctgaccccaggactgggctgttggcttagaaagccgatacacagatacgcgtatatttgattgtagcgggcaaggggggcgtcgagaggcagcagcccatcgcccgcctctcaccccaccccctccagccagaggcgagaatcgcaggactcgggatcttcatcgggtggactagctgggatctccgcattggatttggggctgattaccactgcttgcctattattattgttgttgttactactattatttttttttacccaagggagaaagacaaaaaaacggtgggatttatttaacatgatcttggcaaacgtcttctgcctcttcttctttctaggtgagtacctgcgggcggcgagctcgagggggaggcgagaagccggggaggcggggggcgagcggagcgccggtggggggctggcgggaggtcggcggggagagcgcgccgcggagctagccgggcccggtgctggcgaaccgagcggggccgggcggcagggacgcggacgagggaccggagccgcggctggctggcgacgcagggggatcgggagggagactcaacatccgaaccagccccgcagacactgtgcacgcacacacacacccgcgctcgctcacacgccagtatagcgcgcatctcccccgaaataatgggttcgaattgcggcaacttaagaaaaaaaaatatccaactcttgatctgcaagaagggagggagagagaggctcctaggcggggagagaacagtcctgcggggtccgcctttcctggtctgctccccgagtcggtcgtggtggagggcgcgggtttctccggcggctcccgcttggacatcgcgcggggagcgctggcagtcactccccacctgccagccgcgcctggcaaacggagcccgcgtccccacgccctgagcccctaaccggcggctccactccccggaacacttttcaagtttctccccaccgagccccgagccagatgggtgggcgggagcggagggttgtgagcagccgttcccggccttccctcctccacctctgggggccgcggacccccgtggctggtgggaagaggcgggagggaggccaaagtttgctttctccgttgaagagggtgggaggcgagggaggaaaaacgggtctgaacaaagaccactgctccttctgcaaaccccccccactgccccccccgccgcctccaagacagggaggagaggctgcctggcgccactgagcccca

SEQ ID NO: 11782 - DNA, 6000 bp, Homo sapiens
gagtctccagcacctggggctgactcacagctagtgttccttcctggagattatagtccagggacgcgcgaagacttgagtctttcctgccgtcaggtcaactccaaccagcaaggctgaggatgatctcagcagtccctcttcttttaccccgatccccgttcctccactggggaaatgtctgtcattgccgccacatccacccagatgaggccttggagtcctaggtgacatctggatctctcttctcccatatttcataagccaccaagttctctccattctttgtcccaaaggtttgctagatgggcacttttttgttttgctctttcccagctcaaagctttgtccaaacactcttcatcgcccattgtcttgggtcccttgccagcccccaccaacccgcttctcagtctgatttttttttttttttttggagatggagtttcgctcttgttgtccaggctggagtgcaatggcgcgatctcggctcaccacaacctctgcctcccaggttcaagcaattctcctgcctcagcctcctgagtagctgggattacagtcatgcaccaccacacctggctaattttgtatttttaatagagacggggtttctccatgttggtcaggctgatcttgaactcccgacctcaggtgatctgctggcctcagccttccaaagtgctgggattataggcgtgagccactgagcctggctttttttttttttttttttaaagatggagtttctctcttgtagcccaggctggagtgaggtggccctgtcttggctcactacaatctccgcctcccaggttcaagtgattatcctgcctcagcctcttgagtagctgggactacaggtgcccaccaccacgcctggttaatttttgtatttttaggagagacggggtttcaccatgttggccaggctagtctcaaagtcccaacctcaggtgatccgcctgtctcggcctcccaaagtgctgggattacagacgtgagccaccacgctcagccatcggtctgatctttctaacacacactttcctcctgtcctcccctgctcaggaacctgccttggcttcctgctcaacaaacccatgagcctctgcccaccatgaaggttcctgtgacctggtcccaccgtacacacccaagccctgtgggcagtcagggtccctcaacatctctgtgagtggagtcgagagagtctaagacagtcagatgggggccgggtgggggacagtgctcagggtgtcagtgcaagtaatggggtctcggggacagcacactgaatggcaaaacaggtgttgtcaagctgtggggaccccttttctcctcttcccccatgggcttgagtaaatgaaatccttttgtggccttgtgtgggttggtgacagtgtaagggacaggggatggaaacgggggaaatgatagatccttgggcagtggtgcttgctgtgtgaccctgggcaggtcaaatcccttctctgagtctccaggttttcatttgtcctccagagcccctctcagctctcgcatatcacaaaaacccttcgtttctctctcttcagcgagcacctgtgagcagctgtgcacagaggagtggggtctggagcctggataacatgggtgtgaattctggctcagtccctttccatggtgtgagatttcaagcaagtcagctgatttccctgagcttcaatttctccttctgtgaagcagatttaaaaaccccacttcatgggttcctgattctgccagccgggtgaaaccagctagtaacattcagccacgttacttagcctatttgtgcctcggtttttcttatttataaaatgagtataatcgtgatacctacctgacagggtttgttgtttgttttttccagcttaggctggagtgcagtagtgcgatcttgagtcactgcaacctcagcctcctaggttcaattaattctcctgcctcagccttccaagtagctgggactacaggagcacgcccccacccctgactaattttcatatttttagtagagatgggtttcaccatgttcaccagactggtctcgaactcctgacctcaatgatctgccgtcctcggcctcccaaagtgttgggattactacaggcatgagccaccgcatcctaccctgacaggattatttctcatgagagtgaaatgcattagtatatgtaagtccatttgtatagtgtgtccagcacatgattatgatttgccttggtctatgggaatatatgaaaacagaagtggctcagagaggggtgttttgtgcaagaggaggaggtggatctttggagagaactgtctgtgggtgatggttcctcacccatcctcagtcttggagcccctgtgccccatatcttacctgcagcctctgacctggcctcctcacccccagcaataggtgacttacctgcttttcacctcctcaaatatgctcttagcttagcaggcacctccatcattctggggaggcctgtccttcttttccaaatgggaaacgggcccttatcctgtgcttgggagaggttgccagggaaagtgggttgagtctcccagacacgctggcactctgctgcccagtagaaagataaatatcactttgacagctgctgcccccaggggggagctcttctgaggggtgggaggcactttcctcccttggcccgagtgcctggctttctgtgtgtgcctgctgggtcacttgccctggggcttgtccacgtccagagtgctgcttagcaacccagtggaattgggtgactgtgtcaacagctcaggaccaaaggctgcaagaggcaaggtctactcactctgccaagaccagggatggtgacactcctcagctgccagcctcttgccctccgtgctgagccttgctgtcagcgcagacctctgacatctcttctctgagatttcccaagcacaggcattgggaccaggagtctccatacgggagaccatcccagctgaatgagctttgggcgggcccaggtaatgtttcccagcaaatgggggtagacagaggcctgtgatgctgaggtcaggtgcgtggccccagaaggcagccagcagggaagggacagttctgcagcacgcaccaaaggacccgaggctcacgtgtgcagtgacctcctgagtcatggatgtccctttcagctgctcccctattcagtcacagctttcctccttcagggagacccaggacacttttcacctagagaaccatgtctgtgcctaaagatggacagtggctggggccttccttaggagttcctctagcccttggcctttttggttactccaatgtgtgtgtgtaaggggggacaggtaaatgtgagggttggttaagagaggagagggagacatggggcctcggggaagtttctcctgtgggctggtttcactgctggctctcacacccagcaataccaataaaactgatgacagtaattaagaccatataatcaccgtgtgtttatttatcccccagaagcctcctttccctggccccatgattacctattccatccttatgatagctggtgggggttaactgtggctccaataaaaagcagtaactgcctgtgtttccaccccacatgcccggacagctttgctcccaccctctgcaaggtggggggacactattttcagagggaacaacagaggcagtaagctgaagatgtcaaaaagaatgaaacctcacagggcaagtagtagaagcagcaacgtttgccttcttttttagagccttcccccttcttcctggcatctgcctccctcccagaggaacttatccggttccatggccctctgcagggccactcagcctgcagctgctgatctctcagaagactgatcaagccaagcatgtagccaccagccagcaataaataccactgggtgataccaggaaagttacttttcaccactgagcatcctatttcctacatggttaaaagaagtttgcaaagactaagaccttgcgtgcaaacgtgcattacaaaatggcaatggttgatactactattaagggcccagggttatttgtgtacttggctcagaggaataggtggaatttcaaacttctgctgaaggagtgtgggagctgagagctctacccagaatgcctcaaatcatcgcggtcagcctgccccggagtcagggatctggaaaggcatcccagagagaagggaacccctgaaacctggtggggcaaaaagtccctcaggttccctctccccccacacctcccccctttccctcctggacccactggtgtgagacccggacttgctggcgctcagccaagcttccttccagctcctgactgagcctgcagaggagatccttccctctaccccaccaaccgcatctcatgcctttacccggttcacagaggggaaaatgaggcgagagggaaagacaccgggaaaagccagtgaagggtcgcttaaactctggagtccagattttctttgtgtgccgacccccgcactccccctgcttttttgttacagcttcccacacgctaatctttccgattgggaaggtggctccactgtgggccccacgcgcgagtcccgcggcacatcgcccctttaaggggccggcctctcgcctccctgacctcgccccgccccctccggggctacactgcgcctgcgtggcaagccggagccctggggttgggcagcactcggttccgtgcaactttcaagtgagttgcgaactccgccctgtaggccggtgctggtggcccggcgcgctggaaccgcggcgacccgctccagcgcgggaccagcagcaagggccgagcgccaggttctccgcggcagaaagggcgggtgggagctgtaactgccccggccgcggggcgcgcccgctcccaagtcggcttcctccccgccggggccgctttgcctcgggtctccccattctccaggtcccctgaactgcacagtcggaggccgtgggcggcgggctctgcctccgccgagggacagccggatcgcccctctgcttcccgcaactgccctgatcaccccccgtcccagcccttgagtgaacgtccttctgagcggcttcctggggtcctccccacgtcccaaaggccggcaagatggtgtcctggatgatctgtcgcctggtggtgtgagtatggccgccctcagacctcctctaccccggggtgccgtcccgcccctgtggtggaagctgtggacgtctagtgggaggaggaactttctgagctccaccctccagcactccatgcaagggttaacggacctgtgggcttgcacgcggtgtctggggcaccgcaggctacccgccccaccaagcctcgttggctgagaacgacccctgccgcacgccacacacactgcaaacagatgcgtggagccgagggccacaggcctaccttgctgccccttggcaaacacaaggtgatatggcacgttgtgggcggagaatccaggtgcctgcttgccatctgagcagtcacatgactcaccatcctattcctcacctttgagtatgccaacatctggctcacatagccctatctgcaacccagcagtgtcaggtctggtgaccctgggcctgattgcatgcccatgggaggggacagtctggtgttctcacccacttcgtggagtggctgtcctctcactccatcatgcacccatgggccaccggtgcaggcctgggcaggcttgggatgtttgtaaacagcagggtggggaggtggcctccagggctctgactcaggcacgggttgtacaagccaagcgagaaaaacagggcgggtactgccaccttgcaccccagtggggggaaatggccacttggcaaggtgggagtggggcatggtgcccctcacactccccatggctgctcttccaggctggtgtttgggatgctgtgtccagcttatgcttcctataaggctgtgaagaccaagaacat

SEQ ID NO: 11783 - DNA, 6000 bp, Homo sapiens; identical to SEQ ID NO: 3774

SEQ ID NO: 11784 - DNA, 6000 bp, Homo sapiens; identical to SEQ ID NO: 3777

SEQ ID NO: 11785 - DNA, 6000 bp, Homo sapiens; identical to SEQ ID NO: 3778

SEQ ID NO: 11786 - DNA, 6000 bp, Homo sapiens
cctacccatgagggctccaccctcatgacttaattaatgctgagaggcagaaccccttaatgctaatcacattggtcattacgtttcaacacatgaaaactgggcggcacattcagaccacagcagggagggaaaggagaagagagaaagggaaaatcttacttctagtcttctcttttgcctcttagaaatcatagattttagacctggaaagaacgttaaaggtcagcttagccatctccacaaacccctttccttttacaaattatatatggatggtgaggaccagtaaggcaaactacaatttctaagcttacacagtctattgaggataaggattcaggtttcctgcctcccggcttggtactttttacattaagtcatcctgtctcccatttagttttataaccttgagcaagtcacccaaccagtcaacaaatatttttaaagacctaacaacaagtaatggaatatccaaccaaaagaaatttaaacaaataaagagcttatttttctctcctaataagaagtcagggggtagacacagtcactggtactagttcagcggtttaatgatgccatcatggacccaaacagttctatctttcagttccatcgtatttattgttggctcttatcaggatgactgttgtcccatggttgcaaaatggtcatgtatctccaggtatcacatatttgttcaatatttcatttaacacttttaaagtcccatgcacaaaatgagttactttgattttacaaccatgatagctgtattctttgtagatgctccatcaagctgaggaaaatcataccctttatagttgataaaggctttttttcaaaattatgaatgggtgttgaattttgccaaatttttttttgcattgactgagatcatacgaatcatatgaattttcttctttattctgtttatgtagtgaatgacattgattgattttcaaatgttgagccaattttgcattcctcaaaaaagaatcccacctggtaatgctatcttgctctttcagatgtcgctggatttgatttgccaattttgtttttgtttttgtttttttgagatggagtctcactctgtcacccaggctgggtgcagtggcgcaatctcagctcactgcaacctccacctcccaggttcaagcaattctcctgtcttaccctcctgagtagctgggattaaaggtgcccaccaccttgcctggctaatttttgtatttttagtagagatggggtttcaccatgttggccaggctggtctcaaactcctgacctcaggtgagccacctgcctcggcctcccaaagtgctgggattacagacatgagtcattacacctgaccttgattggccaatattttgttaaaatttttgcacctatgtaagaaatataggtgtgtgattttctttcctttttatttcttggtatcaggattattctgaattataaattaaaaagtgttctctcttcctttgttctttcaaaagagtttatataaaatcaatattacctttcttaaatgattgataaacatttactagtgaagccatcttgctctggaattttctttttaggaccttaaagatatggggtgattcaaatgttctatttcttcctgtgccagttttgggaagttgtatttttcaaagactttttccatttaatgtaaattatcgaaatgatcagcataaagttattcataatgttttcttattatattttcaatttctgtatatctgtagggatcttcctcttttatgcttgatatttgttattcgtgtttttttgtcctgctcaatctcactaggagtttagcaattttgttaatattttcaaagaaccaacttgtaagttggttaatgtctcatattattttttattatttttttcctcctattcacttcgagtttaattcactttcttattctaatgtcataaggtggaaacttagataattgatttcaaaccttttttctttactaaaataaacttttaaagctataaatttctcttgaaggactgttctgactgcattccacatattttgatgcagtttcattatcattctgtatgccgtgttttctaacgttcttacaaccatgcctggcataaagtacttagtaagtgttccctcctgttagctccagtttttgtttttttttttttgagatggagtcttgctctgtcgcccaggctggagtgcagtggtgcgatcacagctcactgcaagctccgcctcccgggttcacgccattctcctgcctcagcctcctgagtagctgggactacaggcgcctgccaccacgcccagctaattttttgtatttttttttagtagagacagggtttcaccgtgttagccaggatggtctcgatctcctgacctcgtgatccacccgcctcggcctcccaaagtgctgatattacaggcttgagccatcgcgcccagcctagctccagtttttgtttctcttgttaacaagtgagaatgggccccttcagagcctctttgctgtttccactgactgaaatactattccttcatataggcccagaattctaataaattcccattcattgtgcaggtgtgacctcagacagcgttacctcaaagaagctctccctgatgaaccagaccaggatggtcctctcatgtactaagttgaatagtgaccacccccaaaaaattcatgtccacccagaacccatgaatgtgaccttatttggaaataggatctttgcaaatataatcaagttaatatgagatcataagatcacactggatgagggtgagccttgaatctaatatggctggtgtctttatgagaagaaagaaacttggagacagagacacagacacacagagataataccatgtgacaacaggggcagagaccaaagtgatgcatctacaagctgaggaaggccaaggatggccagtagccaccagaagctaggaagaggcaaagaaggatcctcctctagatctttagagagagcacagccctgctgacaccttcatttcaggcttctaccatctagaactggaagacaataaattatcttgctttaagccacccagtttagggcaatttgtcactgcagctctagaatgtaatatgccaagttacacgtttccatactttcctatatttttctttcctagctcttatcagacaattattacatataaattatcaggaaatatggatggtgtgataatacttactagtctggcttttcttctctctctctctgagatggagtctcactctgttgctcaggctggagtccattggcgtgatctcggctcactgcaacctccacctcccgggttcaagcaattctcctgtctcagcctcctgagtagctgggattacaggcacaaaaaagccactatgtccagctagtgtttgtatttttaatagagatggggtttcaccatgttggtcaggctggtcttgaactcctaatttcaggcaatccacctgccttggactcccaaagtgctgggattacaggcatgagccaccatgcccggcctagtctggcattttagtagagccctccttaaggaagactaacataaccccaaccagtgtctccaatggcaaagattttgaaaggcagataatttcgaaggagactgtccttaaaatcacagtatgtcagtggccagctttagcttctcaatgctagccttgggtcacagggttttctagtgtgaaaattatccaaacgagtaatttcttatagcaacagattgtcaaaaaaaagacactgatgcgcaagtcatgtgggagtctgaaacattggttctgctctcctctgcctccagggggtcttggccaagtcactcaacctctctgggttccaggctcttaactgtaaaagaaggtgattggggctacacagtagagtccctttggctctaaccttctgaggcttcatggtttcttccgttaacagtagctgaatccaggaagaggaggtgacccaggcgggtgctggaccaagaaggattctgtgttaagatgtagaactgccagttctgtctatgcttgttttacttgataaatggaatggagtagacgtttctagggctcttgtttttaaaaatcttttaaagtggctggattgctggtcacttcctatctctgggccacagtgcattcacctgtatacaaggtggaagaaaggatggaacccgggattcccaaggtctcttccggctctcaagtgcaaagttctgtgtcttcaaagcagtttattgctaagccagagagctaagagagcttagccttgtactaagtgtaggtcatggggtcaatctcaggaacacccttcgctttatttcttctcataaccattgcgtgtgttggggagggctggggcagtctgcctcccccaacataggcactaacatatgccatcgacgggcaagaatgaaatcctggctctacctctcacgaatcaggtggatctcaagagagactgaataagtgtgagcctccgtttccccatctgtgaaacagggagagttaccggcaaaggtgtaaatgtcaagagttgagcaacaatgcctagtccttaccaggttttcaagcgctattttccataaccgttaggagcgctaaggaaagataaactgcggtgtcctaagtacgctgaggctcgctgacgaccagacgagcaccacgccacagtactgggtgcctccgtgctcccacgtccacatttcccgtgcacagcacactggcgtggccgcgcgggtccacggaacagcccagcgctcggacgccaatcatcccgcatcaggctccgccccccagcgctcaacgcgcccctcggcgtgcgcgctcccgccgccagcgggcgcgctccgggcgcaggcggtgacgtgttgccggcgggggccgggcgggggtgcggctccaggaaaggagcgcggcctccaggaagccggctggccgtgatgctgcccactggtggtcccccgctcccggggtccccggccggccaagcaggtgaggttgccttccgagcgtgggtgaggggagggcgggcggccgaaggggccggcgagtgggttggagtgcgggggccggcggcgcggcgagcgggccgcggacgagcctctctgccccaggcccccacagccgcctgcttagccccgcggaccggttcccgcctcccctgccgcgcggccacatccgagcgccccgggaccaacccctgtgagccctggcggccggcgcgctcccccagcccctggcaggggacacctggcggtcgcgcgcctcgggtgaccgctcgggatccccccctcgaatgggcggagcttgaccgggcagcagggatgctgcacccgggacccagccggccctgcctgccgctttaaatgatgacattcgctcgtcttgtcgttttcgctttgctttgcttttgccagatttcatgttagatttcttcttggaaaaatggagcttattgggcagtaaagtgatgatgcacagcattgtttctgaacttgagtaatgcgcggaccccttttaaaggaacaattctctcatggtctagaatgtgtcccagaacccttagggtgcttcagaccccagttagatgaaccctagtgcagagcgttttcagagaacacttatcacgaaggaaactaaagagatcctttatgattcaggaactttcaggctagaaggtaaactagaggtaatggaagaattctaaattagacactcaaagcccaggctaatttcgcattgcagtctttgttgtctcctttttgtgatgaaaataccaaattatccagctttagagaggcctaaaagagttatattatttgtgttaccatatatttgatgtttttgtatcaggtttgttaattctgtttgacatagtagaattataaaatggaacactaattcgtgtagttgaatcgtttatttctctgtttaccttaacagaggt

SEQ ID NO: 11787 - DNA, 6000 bp, Homo sapiens
cgagggctgctagcacgttgtcacctctcacagtcacttgagaccttaaaaacagtgtgtctaaatgttgtatttcaaggaccacctaaagcagaatactttgggatgccttccaaattcttgactgctactcccgaccttctgaatttagaactcttgtgggtaaagcccggaatctgaaaagttaacaagaatctcaaacaattcctgtgcaaactaaagcaaagcttgaaagtcattgtcggaaaaaaggtagaatgtcagttttctccaccagttttccaagggaaccctaaatgctagttaatgtcatatcctttaaatgttctctattgttatgtaatagctaattagtgttacctttcagtttcaatacttcttatatggatggttttccattctccaaagttaaatggtggagatgagaatgtggatgagaggaagggaattcttactttttcagcaggtgctatttgcctggtgctttagcattcatctcatttaatcctcttcacaattttgtaaactgagaattactaactcttacaggttgattcagagaaagctcagaggaaaaaaaatctttttttgggtcagggtctcactcttgtcacccaggctggagtgcagtggtgtgatttcggctcattgtaacctctgcctcccaggctcaagctatcctcctgcctcagcctcccgagtagctgggaccacgggcatgcaccactatgcctggctaatttttttttttttttttttttgtagagacaaggtcttcttacgttgcccaggctggtctcgaactcctgggctcaagtgatacacccacctcgggcctccaaaagtgctgggattacaggtgttagccaccgcacccagcccctcctgtatactttaaataatctctaaattatttataatacctaataacaatgtaaatactatgtaaatagttgttatactgtattgtttacagacaccaaaaagtcagtcaccagaaagaccatgtgattagagtgttagagggttggaaatttcagcccacccaccaaccaacaggagagatcgggggcgggtggctggagattaagctctatacaaactcttagacaacaagatttcatgagcttctaggttgctgaatacagggaggtgctgggagggtggagtgcccagcgagggcatggaagccccatggccttcttatctttgccctatccatctcttcatctggctgttcatctgtatcctttataaatcctttacaataaactggtaaacataaaatattttcctggactgacgtctgaattggggcagtcttgtgggagactgggcccttaacttgaattgagttataggacatcgtgttgatgtcctttagagttggttggtgtgtagggaaatactcccccagcccctcttctggtcacagaactgctctgtgttttgtgccagtagaaaggagaaaacagtttgttttttccttttacagcctcatcatttagctctcagctcaaatggtaatttctcagagaatcttttctgggccatcctacttgttatggcactacctgtcatattgctctgttttcttcttcaaggtacttattattatttgagatagagtcttgctctgttgcccaggctggagtgcagtgatgcagtcatggcttgctgcagcctcaacctccagggctcaagtgatcctcccacctcagcctcttgagtggctgggactacaggcacatgccaccacatctggctattttttttttttttttgagacggagtctcactctttcgcccaggctggagtgcagtggtgcgatcttggctcactgcaagctccgcctctcgggttcacaccattctcctgcctcagcctcctgagtagctgggacttaggcacccgccaccatgcccagctaattttttgtatttttagtagagacggggtttcactgtgttagccaagatggtctcgatctcctgacttcatgatctgcctacctcggcctcccaaagtgctgggattacaggcgtgagccactgtgcctggccacatctggctaattttttaaaaacaattttttgtggagatggggtcttactatgttgcccagattggcctcaaactcctggtctcaagtgatcctgagcctcggcttcccagagtgctgagattacaggtgtgagccaccgtgcctggcccaaagcacttatttatttgaaatgacatgatttgttggctacctctcccactagaatgtttattataacaacctttcatcttttgttcatgactgtccagaactgtacatggtacatggtgggaatctaaaataacaaacattctcttgttaaggtaattagtgatttctacattgcaaaattcagagaccaaattttgcttcaagctttcagcaacagtggacactgttgaccattctttctttctctcaattaccatatcctattgtcctagttcttcctccttcttcaccagaggttacttctcagattctttctagaatcttctgcttgaggttcaaatgttagtgtttccatagcctgggcctccttttttgtggtatctcaattctctcatgttactgtgtctcttcccacatgtcttagttcattttgtgttgctataacagaatacctgagactgggaaatttataaagtatagagatttatttcttatggttctggaggctgggaaatcctaggtccaggggcctgcatctggtggggagcttcctgctgtgtcatttcacggtggtaggcaaaagagaaagggagctgaactcatcccttttatcgggaacccactccccaataactaacccactcctgtgataatagcattaagagctctgccctcataacctaatcaccccttaagagtcccccctctcaacactattgctttggggaataagtttccaacacatgagctttgggggacacattcaaacaatagcatcatgacattaaatgctatctttatatttacaacataactaccaaatttaccttagttttgaacttcagacttttacagtttatctatttatttgacacgtctacctggatgcctaatagtcacctcaaacttaacatgttgagcatagattctctattatctcttatttcagtccttggtcccagcattggttggttccatgccgaggccccactgctctgccatctcttattccactcttcccctaacttactttgcttcagttatggccttgtttgcctcttgtcccccaaattttgttttattcactgctgtatccccaatactgataacagtgcctggcaggtactgttaggtactaataggtgctcaatataataatctggtaaacataaagtgtttttttgagttctgtgagccattctagcaaattatggaactcaagatggggggttatgaaaaccccaatttatttgttgagagggagtctctctccatggtccaggtgcagtggggcagtcttgactcactgcaactttcgcctcccaggttcaagcgattctcttgcctcagcctcccaaatagctgggattacaggtgtgcaccaccacgcccagctatttttcctatttttagtagaggtggggttttgccatgctggccaggctggtcttaaagtcctgacctcaggcgattcacctgccttggccttccaaaatgctgggattacaggcatgagccaccacgcccggcctggaaaccctaatttatagctggttggtcagaagcataggtcacaacctgagacttgtgattgatgtctgaagttggggccatcttgtgggactgaactctttataggatctgaccaaataactcttcctcgaaacacaaagttagggcttttgcatccactgttccccagatgggaagatgagtcccctgatctttgtacggctagttctttctcatcattcaggtcccaagcttcaaaaaccacttcctcagcaaggccctccctgaagttgtgtccccaggctccattatatcaccctgtttttcatcaatgttattacctatcattacctattatttttgttgtttaattggtatgtcgtttgtcctattctatttcaatgagtacagggatcttgtctgtaccatccatgcctaaaacagtgcctggtgcgtattaggtattcaacatatattcattgaatgaatgaatgaatgaatgaatgaatgaatgaatgaaagaaacccaagcctgctagacctcaaaagcccagagaactgttttctctggctggttcttcattcagacgatattttctcctcttgacattttatagtcttccggcctccatgcgcaaggaaccatgtaaaggttctgagccttgaaaccagacaatgtatttccctgttacttttcgcttgaatcttctctgtatttagcaaccagtcatagaacactaaccatgtaccaagcgctatgctaagtgctgaacacatagagctgaataaagcacagaactacccttggtacaattattgaggttttaataatacataatttgactacatttcttagatttcgcgtcgtgacgttttcagcctctcaaactgcatcgcctacgcacagaagcttcccgaatctcagacgagacacaacaaagctgcgcgctgccctcgccccgcccgcgggcgcggcggcgacaggccctcggccccgcccacaccgcggcgccacgcctccaacccgcctccagccgtgcctccccaggcccttggccccgcccacaccgcctcgccccgccccaagccgcgctgtgctccaggggcgggggcccacggcggccactcactgagccccacgggccgcagcggcagtgacgtagggttggcgcacggatccgttgcggctgcagctctgcagtcgggccgttccttcgccgccgccaggggtagcggtgtagctgcgcagcgtcgcgcgcgctaccgcacccaggttcggcccgtaggcgtctggcagcccggcgccatcttcatcgagcgccatggccgcagcctgcgggccgggagcggccgggtactgcttgctcctcggcttgcatttgtttctgctgaccgcgggccctgccctgggctggaacgaccctggtgagtgctgccagggccctcaggcgcttcgttcgcccttttccgccgccgtcagccggtgcaggctcccctgcgtttccgtgcgccgtcttcccggagcctgggtgcccggattccccatgtctgacctctttgctgttcgtgctctccctggttccactgctcttcccaggcgtcttgggaggcgggtagggactgctcgagtgggcggggcgggacggctggagatccttaaggtcccctttctccctgccccggactcccggaatttgcccattgtcgtctttctcatctctgagtataactggagagctggacactcacctgcgcatctgctttgttgttatggctgtgtgatgtcatcgtggcctgctgttgtcatggctgcctgttgctatcgccggccgttgcctgccactggcagtctctgagtcacccttagcggacagggctgcagacctcgcaggtctgttagcagaatcgcagattgcactcttttttttttttttgagtcggagtctcacattgtcgccccggccgcactgcaatgacgtgatctcggctcactgcaacctccgcctcctgggttcaagagattctcctgcctcggcctcaccggtagctgagattacgggtgcccaccaccatgcctggctatttttttgtatttttagtagagacggggttttactatgttggccaggctggtctcgacctcctgacctcgtgatccacccgccttcatcctcccaaagtgctgggattacaggcgtgagccaccgcgtctttatgagaaccgctgcctcttatctgacgattgcagtgatgtacatcgcgcggcaccagc

SEQ ID NO: 11788 - DNA, 6000 bp, Homo sapiens
tcacctgaactctttttggcttctttagtccacctcacatgaacatatacagacacacatatacatgcacccaatcatgatgttcacaggagagagtactcttccctgctgttagaacttctgctcatcaggcggctgctgccacttctggctctgccagacacatattctaaatcacagagctattctccctggcacataacccccgagcaccaacatgtaaacagcagcctgagggcctgaactcagtgcattcagaggcccacagacgctgcctgcttccaagggcacagaacaaaggtcatctgggggctgagggccagcgcagtgctctctctgggcaatgtacacttctatcccgagttggatgacctctccggcccaggcagtactaattcccctcgggccagtcattaggacgacttcccagaacagtaggccagctgtctccacccctctgctgaccatcaaaaatgaaggtgagagtataattgggtacatccccagggaagaccatttggcagtatctttcaaatttgcaaatgcatagaccttataacatagcaaaatctatttgtagaatatactcacatacaggtgaaatgacatgtgtttaagttattcattgcaacatcatctgttagtaaagataagaagtaagctcgatgtctatcagtagcagactggtttcatagacaatcatataaccatacaatgggatactgaaaatgagatgcttttggctgcgcacggtggctcatacctgtaatcctagcactttgggaggcccaggtgggtggatcatcagaggtcaggagtttgagaccagcctggccaacattgcaaaaccccgtctctactaaaactacgaaaattagccgggtgtggtggcacgcgcctgtagtcccagctacttgggaggctgaggcaggagaatcgcttgaacctgggaagtggaggttgcagtgaatcgagatcgcaccactgcactccagcctgggtgacaaagactctgtctcaaaaaaaaaaaagaaagaaagaaagaaaaagaaaatgagacacttttgtatatctatctggaaggatcacagatacatagtcaaattaaaataagcaaggtgcagaacagtgggtatatatgactgctatttgtatagaaaagaaaggataaaagaatatatatatttgtattgacttgtatctatataaaatatgagccgagggataaaccagagactaatggtagttacctgctagggagatgaaaactgggatgaaggcaagtctctattatatgcatttgttatattttgatggttgaataatgtgcacgtataatctattcaaaatattaagttataaaacacaaaatcacaaaagagacccaatagtctatagactaaggtggcaaaagagggagcccttccccctgccatctgcttgggcgggggaaaaccagactgaggaatgagagcagggatgagttggcagaggaggaagaagccaagtgtctcaacattgatggatttgctcataaaaccatccctaaccggagtcagaaatttctcttcttacagtgtcgtttggttattggcctaatcattccccaaactcaggcacactcaggtggtttgagaaatcctgtcttttttgaaaatgttaaacatttttacacacttcttccaaattacaaggtcacccctaaggcattgacatcattgaggttgcttcactttccggcacccctttcccttccccctccaatgctgatgtcctggaaaaaaattgctgaatggcatgcattgattttggagattactttttgggaatcttatgatatccctttgagataactggcaacaacactctggggtgctgcaaaaccctacttgggagtgactgccttgctggtcaacaggaagccacagccaagactctgtgcccagtggggcctgcaccactctgtcatgacttgagtgggggcagtaagaggtggaaggggccagaggctgcctcttcactttcacccccatggatttccatggatccaaaggcctgcttggggttcttcatgggcatagaagtcacttgcttgggagcccaagacaaaccctgctcatgggtgagcagctgggtccctgggagacgaggctggttctttttccttggggataattttaggttctgaattcccctgcaaccttcctaactcccagcccccagctcagcctcccagagggattgttcataccagtgactataaagtgttctctcgaaatatagagctgttcagagacctgccagggcatagccctggaggcattttccatgataatttttccccctttgtcccattgtttcagaggaggaagcatgatagctcaagaatcaggtcctgatagtccctgataaggtgtcacatcttcctgcctctccacttgaaccctggggctttattttccagcgcccccctccccgtacgcaatctgagaggaactggtttagagattgagagagcaggggctggaaaaaggaagccttgcaagtcttgagtgagggcagggagaagggaagaggaagagggaagcctctggtggaaccgcctaagagacttcagaggctttgaaacaccaggcctgccaccacacacgctcaaaaatgaacgcatgaattcctcaactcaacgccttctagtttttaaaagttaatgaatgaaatccttaaggaagtccggacacggtgactcacacctgtaatcccagcattctgggaggccgaggcgggtggatcatctgaggtcaggagtttgagaccagcctggccaacatggtgaaaccccgtctctactaaaaatacaaaaatttgctgggcttggtggcacatgctcatcccagctacttgggtggctgggaggcttgggaggctgaggcagaagaattgcttgaacctgggaagtggaggttgcagtgagcagagattgtgccactgcactccagcctgggcaacaagagcaaaatttcatctcaaaaaacaaataaacaaacaaaaaacctaaaggaagtggagcgaacacttaccattggggagatggcaatggaagagttgtgtatagtttggggggatggtggacctgcctcatacccagtcacccatttacccatttttttttttaaaatagggtcttgcttcttgccgtcttccaagctggagtgcagtagtagcatgatcacagatcactgtaaccttgaactcctgggctcaagcgatcctctcctctcagcctcttgattcatcctttcttttttttttttttttttttttttctgatatggagtttcgctcttgttgccaaggctggagtgccatggtgtgatctcggctcactgcaacctctgcctcccaggttcaagagattctcctgcctcagcctcttgagtagctgggattacaggcatgcgccaccacacctggctaattttttttttttttttttgtatttttagtagagacagggtttctccttgttgttcaggctggtcttgaactcctgacctcaggtgatctgcccacctcgacctcccaaagtgctgggattacaggcgtgagccaccgcgcccacctgttgattcatccatttttaatatgtctttatagcagaaagattttaagagaaggggctatctagaaaatctctaggtggaaaggtgcatggaaggggcagtgcagagtggggaagatggagaaattgaaattcttcagcatcccagactacatagtgccaaatccaaatgcaaatccagagctagcaatgaaaaagactcctggccgggcgcgatggctcacgcctgtaatcccagcactttgggaggccgaggcgggcggatcacgaggtcaggagatcgagaccatcctggccaacatggtgaaaccccgtctctactaaaaatataaaaattagttgggcatgctggcgggtgcctgcagtcccagctacttgggaggctgaggcaggagaagcgcttgaacccgggaggtggagattgcagtgagcagacatcacatcattgcactccagcctccagcctgggtgacagagcgagacgccgtctcaaaaaaaaaaaaaaaaagaaaagaaaaagaaaaagactcctgagcctcctagtggttcacgcctgcaattccaactactcaggaggctgggacaggagggtggcttgagcccgggagttcaaagccagcctgggaaaaatagagagagagagagacttgaaatatggtaaatttcctcagtacctgaaaatattaaaaaaaacaaaaagctagaaggaaagagaaggtaactgaaacagaagggaaaggggacagatctcaccaagctgaggtcttgggagaggagatactggctgagccctattacttaatttaaaataccttaggggaggccacccaagtggatgcggggctcctgtgaatcctttgcttgactccagcgggttacctttgcctctgatacataaagggtggggatgggagcgctctcctctctccttcccctgccttgctgtgggaacttctgggaaaggaggtgcagggctccaggaagccagtgcccagggagtgctatgctgagtccaggagcctggccacggcaggggtggacagatggtggcagaggaaccacggtgtcccttcctccagatttagctaaaggaaacgtggagcatcccattggccatcctccccactctccaattcggctccagaggcccctccagactataggcagctgcccctttaagcgtcgctactcctcccccaagagcggtggcaccgagggagttggggtggggggaggctgagcgctctggctgggacagctagagaagatggcccaggctggggaagtcgctctcatgccttgctgtcccctcccctgagccaggtgatttgggagaccccctccttccttctttccctaccgccccacgcgcgacccggggatggctccgtggcctcacgagaacagctctcttgccccatggccggacctccccaccctggcgcccaataccgccaacaccagtgggctgccaggggttccgtgggaggcggccctagccggggccctgctggcgctggcggtgctggccaccgtgggaggcaacctgctggtcatcgtggccatcgcctggactccgagactccagaccatgaccaacgtgttcgtgacttcgctggccgcagccgacctggtgatgggactcctggtggtgccgccggcggccaccttggcgctgactggccactggccgttgggcgccactggctgcgagctgtggacctcggtggacgtgctgtgtgtgaccgccagcatcgaaaccctgtgcgccctggccgtggaccgctacctggctgtgaccaacccgctgcgttacggcgcactggtcaccaagcgctgcgcccggacagctgtggtcctggtgtgggtcgtgtcggccgcggtgtcgtttgcgcccatcatgagccagtggtggcgcgtaggggccgacgccgaggcgcagcgctgccactccaacccgcgctgctgtgccttcgcctccaacatgccctacgtgctgctgtcctcctccgtctccttctaccttcctcttctcgtgatgctcttcgtctacgcgcgggttttcgtggtggctacgcgccagctgcgcttgctgcgcggggagctgggccgctttccgcccgaggagtctccgccggcgccgtcgcgctctctggccccggccccggtggggacgtgcgctccgcccgaaggggtgcccgcctgcggccggcggcccgcgcgcctcctgcctctccgggaacaccgggccctgtgcaccttgggtctcatcatgggcaccttcactctctgctggttgcccttctttctggccaacgtgctgcgcgccctggggggcccctctctagtcccgggcccggctttccttgccctgaactggc

SEQ ID NO: 11789 - DNA, 6000 bp, Homo sapiens
gacatgctgaagctgctctgggaacagacaggggtcaccaaatggtggccagatggtgactgactgctgctccctaactccaggggcctggggcaaaaggcttggctgcccacctgctcccaggacctgtgaaccatccactttgtagggaaaaccccagacagttccctcctcccgaatccccttctgcaaccagctctcggagtggagactctgccagctctcaccacatcctggggactcttgaagcctgggctggaagttctgcaaccttgccccatgtcaatggtgcttactttacctgacttgttccataacaaagaattgttaattctgcagtatcgacccagggtagtggggtgatcattcctggtaggcacagctgagccctaaaataacagaacccagatagagcaggggcagaaggaatgtggggagaggggaagaggagctcccgtctgccagggaaaactctgaggacacaagtagctggaggaacagggaagggatttcctacagtgttcccaaacaaagagagctggccgggctttggggagagctccgtttcccttcgtttcattcagcagtggtctcctcctcccacagatgtgggaggcaacaggcccccaaccagttatcaggccctccagcatgagggcctttgtctccccttagacatgtagctggcagggcgaagggccgacaaatcctccctgaccctcccagctctttgttatctcagagggaaggttacatttctgtatgggaggcaaggtgccaggaggcctcgggcagaacagagacaggcagagctgctgtctgacccctgttgcctggagcagctcagggctgccctagggacactctccctccactggcctggggcccttccagaaatgggagggctacatttcagaaagagggcgagtagaggagtgggacagaaaaggagcgaggtgggctggaaggataaaagcagccaactctcaattattcagaaacctgtctgcagtgtgtggacagcccatgcctttgctgagtttctcaccttctctgttcagctgccatcagctctttccctgagaagtggaggagggaccctggcaagttggccacttgctttcattttggcttcttgataaatctatagaggatttttcagcagcaggcccatgtccctcaaccccaaacaagcatttagatcattatctttctgtttaaatcaagaacgcattatttagccttttatttggggttcaagatactcctacaatggttctaaatcataagaaaaaggggcttgatttaaaaccccttgttttgggccaggaatggtggctcacgcctgtaatcccagcactttgggaggccaaggtgggcagattacctgaggtcaggagttcgagaccagcctggccaacatggtgaaaccctgtctctactaaaaatacaaaaattagctgggcatggtggcaggtgtctgtaatcccagctactcgggaggctgaggcaggagaatcgcttgagcccagaaggcagaggtgagctgagtgagctgagatcgtgccattgcactccagcctgggcaaaaagagcaagactccatctcaggaaaaaaaaaaaaaaagaaaacaaaaaaaacccttttttgagaagaattacggagcaaagtagaaaaatagtagctgggtgttaacattaaatgctggatttttttcatggcttgtcttcccaatcatattccctcaaattgtgtttcctcctctggtaacccaggttggttatgcttagcaagtccatgaacaataaatatacatggaaaacctcctgtgtagaattggtcagacacctagataagatccttgccctaaagcagtttagaaaccagttagaaagaaagcagagtaaggaaaaccactaacaaagcacggtatcaactcagtggatagtcagcaagtgagcagggggtccagggactgacaaagctgggatgggcagggaaggcctcttgggggtagggtgtgagtatggccttcttacaagcgtgtgatgtgtagtaattaaaatgcaggaggcctaatgggtgggcagcttacataggagtataaaccaagcttgaccaggagctgaaaggttaaatggtggctcttaggggaaaaccctataaacagtggctgaagttcatttattcaacaaagatatgagttcttgtttctcattttttgttttgtattattttgttttgagacagggtcttactctgtcgcccaggctggagtgtagtggctggatcatagctcactgcagcctcaaactcctgggctcaagccatcctccttcttcagcctccacctccagctaatttttaaaaatattttgtagagacaagggctcactttgtttcccaggctggtcttgaacttctggcttcaagtgatcctcccgcttcggccacccaaagtgctgggattacaggcgtgagctgtaatttagttgtttatttactcatttgttcaacaaatacttattgaatatttgctctttggccagtcaagggatttcatgagtgtctactatgtgaataacactgtgttggccactagtctgtcacctactggtggattagaaaaatagcgcgaggaccattttttcttttcttttctttttttttttgagacggagtcttgctctgttgccaggctggagtgcagtggcacaatctcggctcactgcaacctccgcctcccgggttcaagcgattcctctgccgcagcctccccagtagctgggattacaggcaagcgccaccatgcctggctaatttttttgtattttagtagagacggggtttcaccttgttggcaaggatagtctcgatctcccgacctcgtgatccacccgcctcggcctcccaaagtgctgggattacaggcataagccaccgcacccggccaactcttttcttaaattagccagggaggcgtgggtgggttgggtgaggagttgggtggggggatctcattcagtattcaaacttctacaagtttcggggttgaggtgggtgatggtaagggaacaggccctgccactacctttcatagtgacttccatttgtgtaatatttttggtccactgagagctattattttatttgattcttatgaccatcttgtgaaggagtatcaacagataccccgttttgattttatcagatgcatgatttgtcctacatcaaacttcataaatgatggacagaatggaggaatccttcagaccaagtgctgcctacttcccaccccaatggtggcctcagcctgggctcacatcacacgccccaaggagccttggaaaaaataaaggctcttggctccttcctgggacagcgtgattcctcatgtctgagcaggcccatgaacttgtatttttcagacgttccctaggacccgtgtccatctggattagggaaccactacattataccacttcgcgggaagactcagggggaagcattttagccactttcctgtgttccacagtactggagggtgttctgagtgggctgtgattaatttccaaaccaaccacacgtctcccctcaactcccactgcttactctttgcttcctagacattcactgcaggctggagacttctggaagccaacagcatcgctgtagaatttacagggtccagttcccggtggaccacaaaacctaaattatgtggctggggaaagctgaaatccaagggaagggtttgaggaggggctgaccttataataaaaccggcttgtatttactaagtgttaactatgcgctaggccctcgttgacgcctcaactctatgtgaaaagcactattatcccccatttacagatgggaaaacagagatttagagcgcgaaaatcatttccccaaggcgcacagactccaaagcccacgctaccaggtacaacctcaaggctgcggcgtctcttcacctgccccctagcccccaaaccgctgctatgtctagggcctgacattccggcgccctctgggacgtgctcagatgcaggggcgcaaacgccaaaggagaccaggctgtaggaagagaagggcagagcgccggacagctcggcccgctccccgtcctttggggccgcggctggggaactacaaggcccagcaggcagctgcagggggcggaggcggaggagggaccagcgcgggtgggagtgagagagcgagccctcgcgccccgccggcgcatagcgctcggagcgctcttgcggccacaggcgcggcgtcctcggcggcgggcggcagctagcgggagccgggacgccggtgcagccgcagcgcgcggaggaacccgggtgtgccgggagctgggcggccacgtccggacgggaccgagacccctcgtagcgcattgcggcgacctcgccttccccggccgcgagcgcgccgctgcttgaaaagccgcggaacccaaggacttttctccggtccgagctcggggcgccccgcagggcgcacggtacccgtgctgcagtcgggcacgccgcggcgccggggcctccgcagggcgatggagcccggtctgcaaggaaagtgaggcgccgccgctgcgttctggaggaggggggcacaaggtctggagaccccgggtggcggacgggagccctccccccgccccgcctccggggcaccagctccggctccattgttcccgcccgggctggaggcgccgagcaccgagcgccgccgggagtcgagcgccggccgcggagctcttgcgaccccgccaggacccgaacagagcccgggggcggcgggccggagccggggacgcgggcacacgcccgctcgcacaagccacggcggactctcccgaggcggaacctccacgccgagcgaggtaagagccgcggcgcccccggatctggggcgggcttggcgtcccgagcggcccccggcgccggagcctcccggctgcgcgctttgcccgccgcagcccagccggggccggcgcctccctccgctcgccgcccgcccctttcacctcctggctccctcccgggcgatccgcgccccttgggtctcccctcccttccctccgtccgcgtctcctgcgccccctccctgcgctcgtcccgccgctcttcccgccgcccaacttttcctccaactcgcgctcgggagctggcgaggcggcggcggctcctcagtgagtcccgggagggacaggcccggggcgaaggcggcgaggcccgcggtttcctggactggggaggagggcgggagtgggcggcgaggtgggatgcgttgtgtgtgttatgtgtgtgtgttgcattccactccatgtctttttggtccccttttggggattcacccccaattcagcaggtagctttgggctcaacgctaaaaatccggggcattcctaagtccttttccacccccgggaaagcctggggtgcgggttggggtcggatggggtgggagatgaactgcggaggacgtggagggctaggttagcttctcttggaataggttttaaggaggtgtcgtcaccaaatggctgaatctgcttgagctgagagcgaaaaacgactcccctttccagaaggggtgatcttatgacttggacggtctctgaaagggtcggaagtttggggaacgggaggacaacccacggtcgttaagccgaggtgtgggatgggggcggaaggaccgttcggtcccaatctggttcctagaggtgggggaagggatgagggtttttgtccggtgtggttcactcggcagcgatgcgtatgcttctctggcccagacccctctgcacctcgcttcccctaccgttatgtttggggttgggagaaaagtgaggctacgacccatgtttgcggaggaattttatggaccttgtagatgggggttcatatagaacacacaccccctatgaggcagccagacacttttttggtggtggtggggggggggtggggtgtgaagcc

SEQ ID NO: 11790 - DNA, 6000 bp, Homo sapiens
caggtttgcttgtatggtaaagtctttatctcttctttatttctgaagtatagctttgcctagtgaagtattcctggttgacaggttttgtttattgttttttttctttctggcagtgctctgaacacatcatctcattattttcctggcctgctgctgagaaatctgataggcaacgtggatttcttttgtgtgtgatgtgcttcctttctcttgctactttttggatcttctctttaatttttgacagtttgattataataagtcttgatttagtattgtttggattggatttgattggataatctcgagtttcatctactttgatttacatctttctccaaatttgggaagtatttgtcattatttatctaaataagctctttcccctctctatttctgtgctttatgagcatacccataatactttcttgaaccatcattatgctagatttgataacacattcacaatcataagctgaggaccaactggaagattatattttcctaatgcagagactatcactataatttttcaaactaaaacatagaaagaaaataatttaaaaagcagaggagaatttcagatcctgggaaactataaaatgacctaatctaatataaccagactcacaatatgaggagaagagaaaataagatagggaaatatataaagagaaaatatttgagagttttaaaaatggataaaagatataaattcacaaacccagaaaacacttcacattctgagataaccaatataaaggaattgcacatctaggcatatcacaatcaaactgttgataactaaagataaagagaaattatttaaaacaagcccagaaaaaatttgggggggaacaacatgaagagtgatgttagaagtaacagaaggcaaaatctagttctcattagaagcaacggaaggcaaaatcactgggatgaaatgcttaagataccaggaaaaaaatacctgttaatgtagaatgttatagccatcaggaatgcacttcagaaatgaagacaatattaaaaacaatttttataagctaagagcagagagaatttctctgtgtaaatataagacctgtaaaaattgatactgaaattaagtaaataaaatagcaacgtaacattttgtgatagagatgtagatacagtaataaatcccatacaatgaaatattcaacactaaaaggaaatgggctatcaagtcatgaaaaaaagtgaaagaaccttaaatttcttttcttttttgtttttttgaaatgtagtctcattctgttgcccaggctggagtgttggcatgatcttggctcactgcaacctctgcctcccaggttcaagtgattctcctgcctcagcctcccaagtagctgggatttcaggtgcccaccaccactcctggctaatttttgtatttttagtagagatggggtttcaccattttgaccaggctagtctcaaactcctgacctcaggtgatcctcccacctcagcctcccaaagtgctgggattacaggtgtgagccactgcacctggccaggaaccttaaatttctaagtgaaaggagccaaaatgaaaaggctatactactggtgattccattattacattctgaaagaggctaaattatggaaacagtaaaaaaaatcagtgctcagagagaagagagggatgcataattggagcacagcaagaaaacaattttgattggcactataatgatagatgcacatcattacacttgtcaaaactcatagaatgcacaacacaaagagtcacccctaatgtaagctatggatttggttgttaaggatgtatccatgtgtacaatgttcacggattttaacaaatgtaccttactgatataggatgttgacagtgggagatgctgtgcatgtggggttaaggatatgtgaccttaaccccagttttccactgggtatttttctgaacctagaacagccctaaaaaagcctattaattatacatatatgtatatatgtaaaatatgtggctataaaaattaaattaaattaaattgaattatcttattgcaatattcttactttgtttattatgggtatgtggaatgcaatatgttgaagatatataatataatctctaaacattaaaaacccccaaaagaacaaatagtatattcaaaaattaacgagaccaggtgaaattaaatttaaagcagcttccattatccaaaagaggtaagaaagtaaaaataaaagaccagacaactagtaggaaaacaatagaaaactgctagcaggtgagagacataaacttaacatgtctgtaattactgtaaggaaatggacctaatacttcaattaaagtcaggttcatcatactgaatttaaaaatctgtatgttatttatacacaaacacacacacacaaactttaaggatatgcctttaaagtgaaatatttttttaaaatatcccaagcagattctaattatttttttaaaaatctggctatggaagtgatagataaaataagcttaatggcaaaaagccagtatgggcaaagagtgacattataatgacataagttcacttcatcaggaagacaaaacctccctaaatgagttttaaaaaaataacttatcttcaaaatatgataattaaaaattgataaaacacaaaggaaaaatagaaaagtattcttagttggacataataaaagaacaagaattaataaggatataaaatatttgaaaatgtattatccaacttgatctagttgacatttaaagaataatataatccacagctaaatagtctgcattcttttaaagtttgcattcttttaaagttcgaaacattcaatgtaatgaaccatataatgggcaatgaattttctcttagtgaattgcaatgacttgaaattattcaaaatacaatctatgatcacaatggaattgagttagacatcaataaaaaagtaattaatacatgcttaaatatgtggcatttaaataacaccaataaacatgtggggcaaaaagaaatcatgatgaaaattagaaaacatttagaattgaatattaatgaaagtaaagtatatcaaaataaagtataagaatacaatggtgaagttaaagcaatgaatagatagaaatttggaaatacatggaaatttgtagtttaaaggcataggttaaaagaagaaatgtttaaaataaataatataaacttccaatcttagaagctagaaaaggaacattatgcccaaagtagaaaaaaggaaaagaacccaagaacaaaatcaacaaagcagaaaacatacaacagaaaaaaataaagaaatccaaaaccgagttcctgtaaaacttaataaaaattatacattccaagacctatttacccagtataaagagaaacatcacaaattatcaacattgagaatggaagaagagatatgtctgcaggtgctatagaccttaaaaagttgctagaggagaggaagtcattatgaacaacttttgtcaataatttaacaaccccaaagaaatggacaaattccttcagaaacataactttctcaaaccaacacgaaaagaaaaaaatatgaatattttaaagaaattagataaaaaagtaaataaatcttctcatgaagaaaactccaggtcataatcactccatttctaaatgctaagaaacattaaaagaataaatattcacagcattacactatttcaaagattaaacgaagagataacatttcttaatttcttttatgagggcagcatgtcttgatataaaagttggtaagttcattacaatgaaggaacattacagacaacacaacaacacaacaaggcattgatgtgtacgaagtggaattttcatatacttctggtgagagtataaattagtacagtcttggaaaacttgtcggaagtatctaccaacacataccctgtgatccgacaacttcactctagaaatatacacagtagaaatccttacttattacaccaaaaggcatgtagaagaatgtttatagctaaatattatttttaatagctggaacaataaacaaacaaaatattcattaacagtaaaatggaaacacaagtggtgttatatttaatgaatttgtaatatacaccaatgaggataaaacagaactattgctttgtatgaaccttacaatcatcctattaaaagaacccagacatgaaagagtagatggtgattgcttctacttgcgaaaagttcaaaaacagacaaaacgaatctttggttgtttagaagtcatggttgtgaggttggaatctggggatttgggtggttctttttcatttcttcatcgtggtactagttacgctgttttttttttccacttgaatattaattgacctgtgaacttatgatttattatatactttttttcgttttttgtttcgttcttttttttttttttttttttttttttgacggaatttcgctctctcacccaggctggagtgcagtggtaaggtctttctgctcactgcaacctctgcctcctaggttcaagcgattctcctgcctcagcttcccgagtagctgggatttcaggcacccgccaccatgcctggctaatttttttttgtatttttagtacagacggggtttcaccatgttgcggaaactggtctcgaactcctgatacgtgtttatatatattcaattgaaattttacttaagaagtgtttataaatcttcctgttcctcagctgttggaagtgattttgttgttgctgttgccttaattaggcatcacgtccagtggagtgcttgtcctgcaagagacagggctcaggagctcgcacgttccacagcgcaccacacccaacctcagcccacctgggctctcccagccgcctacctcttccaggctgcgtggccggggcgtcatctcgcgcttccaactgccctgtaaccaccaactgccattattccggctgggacccaggacttcaagccatgtggcgcgtcttgtttctgctcagcgggctcggcgggctgcggatggacagtagtaagcagaaaaacccctcctctggccttttgggaccctcagcgctactctccctttgcctccaagttacattgacatccctgggaggatgctttcctgaggggtttccaactcagcaattccaagctcatccccgacattgccgccttccccacccaaaatccacgtagaataagggctttcccacacgtcctggaaacctaggaaagataagataggaggtcctaggccttaagaggttgcttcaaaattgtagtttcagatcctgctttgcatttttcacgacagtgaaagttgagacccaacttctgtactctctagttgaagagtccagagtgagttaatttgtcctgaggggcttgaacctattgacccaaggttaccagatcctacctacagggcaatactcctaaagcaatacacctacttcttttttaaaaaaatatggccgggcacggtggctcatgcctgtaatcccagcactttgggaggctgaggaaggcgtatcacgaggtcaggagatcgagaccatcccggccaacatggtgaaatccccctctactaaaaatatagaaaattagctgggggtggtagtgcgtgcctgtagtcccagctgctggggaggctgaggcaggggaatcgcttgaaaccgggaggcggaggttgcagtgagcagagatctcaccactgcactccagcctgggcctgggcgacagagtgagacttcgtctcaaaaacaaaaaaaaaaacagaaaaacagaaaaaaaaacctccttgtatttttagaaagaaatgggaagataataaaaatgagaagcagcgtatagaatagagattagagatttagatgaaaaactcataaaacacgctctgaaatgatgggcattgttctaataaaacattttgcacattttgcagattttgatagtttacctgtgcaaatta

SEQ ID NO: 11791 - DNA, 6000 bp, Homo sapiens
gagaaaagaaagcagggtttcttttaattaatgatggtagcactgtctggagaagggttggcaaacatatggcctgctggccaaatccagtccaccacctgtttgtgtgcggcccatgagccaagaatgggatttacatttctaagtggcacattttaaatggtgcagttggccctctctatctgacggttctgcatccacataatcaaccaactgtgaatggaaaatatttgggaaaaaatacaaattttaaaaaatacattataccaactatttacatagcatttacattgtattaggtattgtaagtgcttagagatgatttaaagtacatagaggatgtgcttaggttatatgcaatactatgccattttatatcgggacttgggcatctacggattttgatatctgagggggtcctggcaccaatctcccaaataccaaggactgcacctacacaatattgattttgtttcaaagcccacaaaacctaaaatatttacaatctggccctttaagaaacttgggataaaaaataatattactaaaaggactgagcttgaaatgttattgcagtttccaaattgtaacacccagaggaaagtaacagaatactttaaaacagagactctgctgggcgtggtggctcaggcctgtaatcccagcactctgggaggccgaggtgggtgatcacctgaggtcaggagttcaagaccagcctggctaacatggtgaaaccctgtttctctaaaaatacaaaaaattagctgggcatgatggcgggtgactgtaatcccagctacttgggaggatgaggcagaagaattgcttgaacctgggagacggaggttacagtgagcggaggtcaggcagttgcaatgcagcctgggtgacagagcgggactccatctcaaaaaacaaaaaccacagagactcaacacctggctgtgctgctacaaaagtgttgcacagcagcctagcaaggatgtgacagccagaacatggctctctcaccccgcatgcctcccacactgggaaacgtttagagctttatctagttttggcctgctggacaaatttggttgaaagaagctatgggatgaaaagatacattttgctattgacacagctgtgacatctaccctaggaaatgcattctttggacattcccacagaaagttagagtggtcacagcaagtgcatcaaacagcaagtaaaagtaatgacttcttctttgtgtttgagaagttaactgaatttttctttaaagagagttcctcccttgtgttgggacataaaaggtaagtctaagtaaaatgacctaatatgtaaagaaaatccagaagtgttgttttagacactctatatacaggagaaaaatggacaaatataagtgatagttgcactgtagtttctgagaatcagtcattttctaataccaagaaaaacagtctaaaaagttgtttggtgatttttttctacgctgcctacaacaatgaaggcattacaaaaattctttcactaaaatgtcttgcaggagtccatgctgtaaacctccaaagtgttcattagtgtagatttggccagctagttaatatacatgttttgagggcagagttctttcttttagcttgcctctatatgagaaaaatgaaatttcaggagaggtctgttcctaagccacatggcatgtttctgcctttctgacaacgtgactttgtcagatgtttggggacatactgtactcctttagaataaagtgagtatcatgaacagccatttaacttcaactcttcacactgagggcaggagtgatttgactaaactaactatgggtgtctgctgaatataaagatttgtctcgtgaaaattagccagagaacaataaaaacagaaattaagttgtaaaaatttgcagatgcactatctaaatattgtttaaacactagactatacccaattcctagatactaaagactggctgtggatttttttgagtgagaggtacagaggtatttggcatttggcatttttttttttttttttccctgagacagagtctcgctctgtcacccaggctggaatgcagtggcacgatctcggctcactgcaagctccgcctcccgggttcacaccattcccctgcctcagcctcctgactagctgggactataggagcccaccaccgcgcccggctacttttttgtatttttagtagagacggggtttcaccgtgtaagccaggatggtctcgatctcctgacctcatgatccgcccacctcggcctcccaaagtgctgggattacaagcgtgagccaccgcgcccggccggtatttgacatattgagagtttcaattcttattcctcaaaactaaattccagagttcctctgaatgtaactttatggtttatagtaagtaatcagcctactttagacatggaaacttttggaagcccagacactataactgtctttataatttatggaatctcaaacttcgttggtgccaaagtgtaaaatagcaaccaccaccaccgtgtttggcaaaaaaaagatgactttatgtgtctgatttgagatgctgcagaaggcccaggacaattatgcagcaagggaggcagctttcaggattgagagttattaacaaattaggcaagaaacggggaaccatacagcactggccactagaacatttcacgggtgtcatttatctgacaaattaaaaaatgtttcctattttctaatgacaaaatggatcagaaccaggttaatttcttactttaatttttcacaagattctgttcatgtgccactcagtaaatggtatattcctactcaaaagcgctacttcctcctgccccaaatatgcaggtctttaattacacttaggaaaaaatttctaattactgctgacatagaacggtaaaattttaacgtgaattatacaacctatattatacaacatgattggtatgtcatgaagtcactcttctgcgcttccaggcacatgcacttgagttatttttaggagtgtagttgtgaaagatttgcagaggggaggcctttcccgcccagtcctcaatcatgatcaatggcatgactttataaggctgccaggagtaaggagtgctctggtcctgagtcacagtacagacccacagcccacaggcagcctgaactatgaccccgtcccctcctccccggcatgccacagtgtaaccaagtgtacacacatacacctgctgcgtgcttactgcataccaccacagccttcctctggaatctaaagcaagacaccatttttcacattttcctgtaatgtaatgcttgaactatttcagtaaggagaggctaggatgggctgaattaagtctcaagtaaacaagagtatataaacttgccaatatattacaactaggggttggttttagattgacaaacttttaggatgagaactacttttttttttttttttacaaaaacagggtctcactctgtcacccaggctggagggcagtggtgcgatctcggctcactgcagcctcgacgtcccagaatcgagggattctcctgcctcagcctcccaagtagttgggaatacaggcaagtgccaccatgcctgggtaattcttatttttttttttttaaagacgggggtggggtgggggtcgtctcactatactgcccaggctggtctcaaaactcctgagctcaggcaatccgcccgcctcagcctcccaaagtgctgggattacaggcgtgagccaccgtgcccagccgagaactactttttctagggactaggtcactgtatcataagctttaaaatctgtgtcgtgattttgggttcctgatgtcacgtctaggtgattctaaaattgaccaccgcttgtcatcgtgccttgaatgttatcatttttgtctctcacttagaactttgttactttgatacaaattcacattggaaccacttagttcctagagtcccttacaacaaaatcctctgcatcaaaaaatgggatttctttctctcatccctctgaaacactaaaggcttggtattctgaagccaaagggtacatacaagctcacaggccttcacccaacatccaggaaagcaattcacaggtgctgggcagtccacagagtcactgaattatcccaacaaccctgctgggcggcactaaagctccattttacaggagaagaaactggggtggcggcggtggttatataacttgtccaaagccacacaggcctgggcgtggaggcgcggggctgttatacacacgactcccaaacctgaactcttccagtcttggccccgatcctgcgagacctgctccttccggaagaaagtcaagtggagcagggagaaaatgtaatcctctcccaggaagcagcccgggtcccagggcggcgaggctctagggacgtttccgccgcccgcaggctgcgcgtgattcagcctcaaccctcccgccgagcccccgccgccccggcagatgggccgccgcaactggcccgtgtgcgcttccggaagcgggcgactcgcagctccacgcgacgccgaggggctccgcgccgggaccgggcgggtgctcggagtttcggggaccgcacgggaccgagggcaggcgggcggccaccccccttacccccgcgtccggggcggggcgggcggcgcggggcggggccgggtgacgcggccccgccggggaccgggagaagcggggacgcggggccactcacgctgccggctccggaggcggcacgcggccagcgctgctccgctccggggctctttaccccggagtcggggccgggcgcgcgggaaacggttaccgagcggacctggacgccctctgccttcgtcatttcctgccggccggtcggtttccggatgaaacgaggagccaggtcttttttttttttttttcctttccccttttcagttttttgagccggagagacgcagcggcggccccagtgccgcccccgggcgcgtgagtggagccgggctcctttcccctaccgcgccgcgacccccgcccgggctgcgcgcgccgcctcccgcgagcccccggcccgactcccgggctcccgcgggtgggggccagggctggtcggcgccggcggggctcgcggcggcggcgggttgcgtcccccgcgcctgctggcccacgtggacctggccgtcgcttgccgtgcggcgcctttgcgaaaactcgacggaagtggcagggaccgggcattacctgcgagtgccgggcgcctcctgctccgctgtgcgcgcttggggtgggactcggcgggggaggggtcgtgtacattgtcccaccaggcgcaatgtagccgggcggcgcagaggatttcttttttggtcttgagagcatagagtcccttttcatattcacgtgtactcttaagaaagcgtctgttctccaaactggctttccattctccccgtcctaaatggtgcgtggctgacaccgtagtgttttcaaaactggatatggccaggatgctatagcattgtcagtgtaagtcccttttgggtatttttatttaattgtgtagtgacttgacagaagtgtttcccagcttgacctaagtaatgaatttgcataggatttcagcatcagtatggaagtgatcagatgtcagtggctggtgccaccttgcagataaatggccactggtccacgtagttcgtctttactatacattttgattaagttctctaggaccagctgactggtaattataagtcacatgaaaccctgcagagatgagagcttacattgaacacttcttaacaagttttctattctttgtttcatctgttacaattaaactcaccttcgtctagggtaagaccattactttacgcaataacatactagcttaatttacggtatttatatgtatttatatatattgtatatacataatcatacatataattctataacatttagtttgactctaaagttg

SEQ ID NO: 11792 - DNA, 6000 bp, Homo sapiens
aatcatagatcaaatgtaatagccaaaactatgaaactctgagaagaaaacataaggttaaatctttctgaccttggattaggcaaagccttcttagatacaatatgaaaagcacaagaaagtaggtaaattagacttaatcaaaattaaaaacttttgtgctttaaagtacatcaagaagaaagtgaaaaggcaacccgcaaaataggggagaatattgcagatcatgtaaataataagggacttgtaatccagaatatatacagagctcttacaattcaaaaacaaacaaaaaataccaattaaaaatgggtgaagtgtttaaataaacatttctcccaagaagatgtacaaattgctaaataagcacacgaaaagatgttcaacattattagacattgggaaaaggaagtcaaaaccacagtgagatacctattcatacccaaatggatttgctttaactaaaaagacagacaatgacagtgttggtgaggatgtggagaaatgtagatctttcattcattactggggtgaatgcaaggccttgcgaccactttggaaaacaatttggcagttcctcaaaatgttaaatatagagttaccacataagccagcaattctactcctaggtatctactcaaataacagaaatgaaacctacgatcgcacgaagacttgcacacaaatgtctaaaaaattgaaacaatctgcatgcccattaactggtaagcagataagcaaaatatggtacatcatacaatggaatattattcagccataaaaaggaatgaagtatagatacatgttgcaacatagataaaccttgaaaactttatgctaagtgaaagaagtcatccacaaaaggccacatattgtatgattacatttattaaagaaatctcctggataggcaaatcttgagatataaaaaaattagtatttgcctagggcaggggggtttttggagaggaagaaagtgactactaatggataagaggtttctttttagagtgacgaaaatgggctaaaattgattgtggtgatatttgtatagtgctgtgaatatactaaaaaccattgaattgtaccttttaaatgggtgagttacatggtatgtgaattacagcttaacaaagctgttaaattttctaaaaagaaaggcaacttcctaaattgaccaaatgttttcgagtggggcaataaatctcatacatcattgcaatttcaggaaccaagctgcagtatagctgtgttttctggtgccaggtctcttgcaaggctgcagtgaaggtgttggctgctaacatttcaaagctcagctgggctcactttcaggctcacccatgcagttgtccacatttggttctttgaagcctgttggactaagggcttcaattttctactagttgttcacttggggctattcttagcttggtcacatcagcctctttatggttaacaacacagcaccttgcttcatcagagtgagcaagtgagaagaacctgggataatgcaagcaaggcagcttgcattgtaacctgatctcagaagtgacatccctttacttttgccattttctggtccttataggaacatcagtagatctagcccacactcaagaagagaggatttcacaaggatatgagtcattgggaggtggtgatcattaagagccatttcagaagctgtctaccacatggaccatatttttaaaatgtcaaattgtggaggttgtccttatggggccgatggtgcaatgcaatgaaattaacttacctgaaaaatctgaagcttggttgccatgagtattcaggacactggtatggagtgtaagtgaaaaccagcatgattgatgatagatgtgctttggcaataccaaagcaatcagaagttgttaggacagttggttagagcactttgtgaaggggtcatgacgtcactactcagtgttaccattaggccaaactaggccagcttcttgcaaatgcctattgttcccaaggagactgtgtgaaagaatggaaaaaccattcttccattaaactaataatttattcagtcagctataaaaacttctcaaagtccttgtgtaactgaaggtaggctggcagcataatcttcacttgggggtggtaagttttcatgacaaatattttagaataggattttctttgactagaactcttctacttctgtgggcaaatataagttcaattcatacttggaaagaaaagattggaaatgatggtgtttatagcattccatatatttcagacagaagaaattcctttgaaacgtcatatattttctaccttctgatgattcctaagtggtagattcctagtttacatctccaaacatgtaatcctattctagtgaagaattgaacattaacttaataaatacattattaatattattttctcctgtccatatagattcatctaacttccccttatgtcatttctaaataacaaatctgaagctcaatttcaaagaaattacaaagtagctcaaaggttatctttcttatgtcataatacagcagtccccaacccttttggtaccaggggccagtttcgaggaagacaattcttccacagacagggtgggaggtgatggggctggtttcaggatgacactgttccacctcagctcatcaggcattagattctcatacagagtgtgcaacctagatcccttgcaatgtgcagttcacgatagggttcatgcttctgtgaaaatctactaccgctgctgatctgacaggaggcagagtttaggcggtaatggggcttgcccgccgctcacctcctgctgtgcagccgggttcctaacaggccatggaccacaccagtctgtggcccagggtatggggaccccaggtatgttatataattaggtaactgagatcaccgctatggtctgtgtctccccaaaattcctgtgttgaaatcctaactcccaaggtgatgatattaggaggtgggacctttgggaaatgatcaggtcatgagggtggagctctcatgaatgaaattaatgtccttatgaaagagaccccagagagctctctcacctctccaccatgtgaagctacaatgagaagacagcagtttgcaacctgggacaatccttcccagaacctcaccatgatagcaccccaattctgaactttcaacctccagaactgtgagaaaatgactttctgttgtttataagccacccagtctacagcactgttacaggagcctgaatggaccaagaaaaatctccgatagaagtgttacagaaataatgttaagagagataatgccgggagtacctgcctcttctcttctccctactccaggcaaattgtctggtaatgttgtgatgctcggagaacgccagcccaggtgcctgtgaagcagtcccctctgctcactgcactgttcctgattttgttccataactttgtgcctctaggaaaagaggagagcctcccgaaatctgatgagactcgctgtatcacgccagtctgtggcttaggtgatacagaaaggaaatgcgaagatcaggcctcactgccagctttgctcagttacacagaaaacatgctgtttcagcttttgggagtttcttagtacacgatcggtttctttttctcttttatgaaagtttttccccttagatttgctttcaaaacaacagactttcacttctggctaagacagaatgagtgacctagtacaatctttgacactgttattatatatctttattcataatcaatgcatgattttgattattctgactttaattttacgagtaaaaatgggttggttataaatccctttcaaagaattttttttttttctttttgagacggagttttgctttttctgcccaggctggagtacaatggtgcggtcttggctcactgcaacctctgcctcctgggttcaagtgattttcctacctcagcctcccaagcagctgggattacaggcatgcgccaccacacccagctaattttttgtatttttagtagagatggggtttcaccatgttggtcagctggtctcgaactccagacctcaggtgatccactggcctcggcctcccaaagtgctgggattacaggagtgagccaccgcgcccggcccctttcattgctttttaaggaaaacatgctatcatatatacttcacctccagggcagtacattcttactttaaggcaaagacagttgctgaggcctggactaggggaaaatttgggctccagatgggactgttggataaaataccagacgtcctgtaaatgtgaattttagataaacaacgaataactttttagtataaaagtaaatactgcaatggaatttattatttgctaaatgtgcaaccctaggttaagagagcttttcagacccacttctcagcccgagttttctatttaaaatcagaataagaacgcctgcttcatggagctgttaaatccaaatggaaattaatttgaaagcgcgaaatcaaacttttcaaaagaatgacggttacaataagagcgttttggcctctgctagctgcttccgggcggaggtcctcggcctcccctaggcgaggcactaggtctgggggcggcgggtcttagcgtgcccgccacgctcgccgcctcccacctgccctggctggctggggcccgacccttgcgtcgctccggggcccaagttacggactcgggaatccagttgtccgcaccgaacaagccccgccgcagcgcccgcccctcctcttgctgctttggagtctcccggcttccgccttccgcagcagtcacgtgcctccgatcacgtgaccggcgcctctgtcattctactgcggccgccctggcttccttctacctgtgcggccctcaacgtctccttggtgcgggacccgcttcactttcggctcccggagtctccctccactgctcagacctctggacctgacaggagacgcctacttggctctgacgcggcgccccagcccggctgtgtccccggcgccccggaccaccctccctgccggctttgggtgcgttgtggggtcccgaggattcgcgaggtaaggccgccctcgcgttgtttggtctcaggctgcagaccaggtcaggcgactcttgcagtttctccagcttgcctggtgcgtgctggtgtctcgccgcttggtcctctcctgttcttcggcccccggttgccagattgcttttcttccaggcctcaaccaggtttattaagcgaaattctggagcctttctcgcagggggaagaaacgtcaggggcgggcaggagagtggagggggaggggtaaaaagtataccttctccaggactgggccacggccctggatcgctgggggtgcgagtagttcagggacttaggtaattgtctagagacaccttgagctacgccaggacgggccgctgaggctgagcctccttggctgcagagttccagcctggcccagttgaagcctgttttttcctgggccctgtcgttcgcgctgcccagggttgtttatacagcaaatcttcagatacagagattaagttccaaattgattaagatcgttggaaacccggaatataattttgggtaggattttaacttctttgtggccatggccgtgaatttatgttttgcaagtggcaacctgtattttgctttgtgttaaaatcagtcgtttgtatctggaagtttaggagtgagaattacatagaatttcattattgtaggttcttgtcgtccagccagaccgccattgttggcttacctaaattgtaatatgtatttgttctaaaactttctctccgaattttgattttgcaaatactatgaattttgtttgaaaaggaaagcactgtcttctaagaaattatgttcccactttgtgtattttaatttgagtaattttcgaaaggacttagaatttttaatgtgccacttcaaaatgatgcttagtaaatgtttataa

SEQ ID NO: 11793 - DNA, 6000 bp, Homo sapiens
ttattattagaactcagtttattttgccaggttttctggcaactttacctcttttctttgtcagggcacttacgctttctcctgacgcagtggaaactccacagggccagggctcagggctttcttgctcacattgtctccactgctgactcagagcctggcatgtagtagaggtacagcatgtgtgtgtgtgtgtgtgtgtgtgtgtgacacagacagagagagacagagagagtgagacacagagagagacagagaaacaagagagacacacagagagaaagatggtgagacagagacatagagaaagagaataaataaaactttaccagccgaaaaaaagagaagagaaaagcaggcaaaggacgtgccattgagctagcattcattcaataactgatgcaccaggcgctgtgctaaaaacacatccagttgtcataaaatccattcactcatcaggaaatcttttagtatttccttacagtctattaatagttttgacagctgtaacaagcatatgaatttccacctgttggattaaaagcagcacatttgggctgtgataagtaccatttgtggacacatgacagcagcaagaagtgacatcctgagaaggaaaaacataaactacgtataataagaaaaatgaataaatatgaatatttaagactctgcttttctgggtgtgtatgtttcctgtgcttttgttgtatagaagaggggttgtaagtgtgggagtaaaaatattagggtaaaggaaatctagataaacactgaccaatctacatttgaaaggagcttgtgatgttctgagagggggtgaggagggttgtgaatatatttcacagttttttttttttttgacagttgttatttagtttttatttagctttatatagttttatttcataatcataaacttaactctgcaatccagctaggtatggaagggaatagggaatatataacacccaaaggagctgtagcaagagcacaaagattataggataacgtgagcaaatggggtggaggggtgctctcacaaggtctgtggttaggataaaacacaagtcaaatttattagagttgtgcacagtcagcaatggtgatcttgctggttttgcccttcctggacccaaagctctccatggccttcacaatactcatgacttctttcaccttgccaaagaccacatgcttgccatccagctactcagccttggcagtgcagatgaaaaactggaaaccgtttgtgttgggttcagcatttgccatgaacaacacaggacctgcatgcttcaggatgtagttcttgtcatcaaatttctccctgtagatggacttaccaccagtgccattatggcatgtgaagtcaccaccttgacacataaaccctggaataattctgtaaaaacaggaacccttatacccaaatcctttctctccagtgctcagagcatgaaagttttctgctgtctttggaactctgtctgcaaacagctcaaaaaaggcatgacccaagatgttagataatacagtggagttgaccatggctgatagcagggggctccgggtgtcatcagcatctgcaaagccatgtatttaccatttttggaagccttttaatttcaaaatgattttagattcacaggaagttgctaagattgtactgagaggttcccccataccctttccctttaaaaaaaaaaaaaaaaaaaaaagttggtgtctgtctatgtggcccaggctagagtgctaagacacagggcaccaagtccctaggctgcacacagcagggggaccctgggcctggcccaagaaactatacattcctcctgggaatctggggctgtgatgggaggggttgccatgaagacttctgacatgccctggagacattttccccatggtcttggggattaacattcagctccttgttacttatgcaaatttctgcagctggcttgaatttctcctcagaaaatgagattttcttttctatcgcattgtcaggctgcaaattttccaaacttttgtgctctgcttcccttataaaactgaaggcctggccaggtgtggtggctcacgcctgtaatcccagcactttggggagctgagacgggcgaatcacgaggtcaggagttcgagaccagcctggccaacatggtgaaaccctgtctctactaaaaatacaaaaagttagctgggcatagtcatgggtgcctttaatcccagctacttgggagactgaggcaggagaatcgtttgaatccaggaggcggaggttgcagtgagtcgagatcacaccactgcactccagccctggtaacagagtaagactctgtctcaaaaaaaaaaaaaaaaacaaaaaaaactgaatgcctttaacaacacccaagttgcttcttgaatgctttgctgcttagaaatttcttctgccagataccctaaatcatctctcttaggttccaagttccacaaatctctagggcagggacaaaacgctgccagtctctttactaaaacataacaagagtcacccttgctctagttcccaaaaagttcctcatctccatctgaaaccacccccgcctagatttcgttgtccatatcattatcagcattttggtcaaagtcattcaacaggcctctagggagttccaaacttgctcacattctcctgtcttcttctgagccctccaaactgttccaatccctacctgttacccagttccaaagtcgcttccacatttttggttatcttttcagccgtgccccactctactggtaccagtttactgtattagtcgattttcatgctgctgataaagacatacctgaaactggacaatttacaaaagaaagaggtttattggacttacaattctacatcacttgggaggcctcacaatcatgatggaaggagaaaggcacatctcacatggcagcagacaagaaaagagcttgtgcagggaaactcctctttttaaaaccatcagatctcatgaaatttattcattatcatgacaatagcacaggaaagaactgcacccataattcagtcacctcctaccaggttcctcccacaacacgtgagaattcaagatgagatttggatggggacacagccaaaccatgtcacactaccatgcctgacttcctttccatttttgtatatttgcttgttcttcatttgcccgagaagtaactctaaagggctgtattatttggatattagattggcattttatctgactgggatatcttgctgtgattgtccatgtataagatcagcttttctataagccatatttttaaaaagatatattaattttttaaaaatccacctgtctaaataaatgcacaaagccccccaaaaacctagattctaagaaaaatctatgtactgccatacaatgattgatattaatatttatggtgataaattacacacaaaaaatgtgtgatctctgtttaaacaggcaaaaacaaaaaacacatgaaataaatctatggcatctatagccaaaactggaaacaacccacatatccatcaataggaaatcagttaaataaattatagtacatttatccaatggaagattaagcacatattcaatataattatttatacacacatatagatacacacatgtataaatatagagaatactgtgggtgtatgtgtgtgtgtgtttatatacatatatatacacacacagtactgttgcctaccttcttttgtcttaattctgtgaactctcattcactctgcttcagtaggatacatccttctttttggttcttagactcaccaagttgatccttgactcaagacattgcatttgctgcttcctcttcctggaatatccttccttctgatattcacatgagtagtctcttcttgtcattcagatctcaaatgtcacaatttcagagagcccatctctgatcatcatatctaaagttgtcctcattcccccatagctttctataccatgttttatttttttcataacatgtattttattactcctttctccattggaatagaatctccattagattaggaaatctgcctatcttattaatgcctgcaactggaatacttttgaagagttcttggcacgtaataaatactcaactaatatttttgtgtacacagaaataaagtttggaagaacagatgccaaattgttactagtggttacttctgagtaaaggagtagcatggtaggtaaattattaatagatgttcactttccaccaagatatgttttagttagtcttaacttacttgaaatgaaatttattactttaataattagaaacattgataaacattttagtcacaagaatgatagataaaattttgatgcttccaataagttatatttatctagaggatgcacttatgtagaatactctcttgaggatgttaggtgagtaacatgttactatatgtagtaaaatatctatgattttataaaagcactgaaacatgaagcagcagaaatgtttttcccagttctctttcctctgaacttgatcaccgtctctctggcaaagcacctaaattaattcttctttaaaagttaacaagaccaaattataagcttgatgaataactcattcttatctttctttaaatgattatagtttatgtatttattagctatgcccatcttaaacaggtttatttgttctttttacacataccaaactcttaatattagctgttgtccccaggtccgaatgttaagtcaacatatatttgagagaccttcaacttatcaagtattgcaggtctctgattgctttggaaccacttctgatacctgtggacttagttcaaggccagttactaccacttttttttttctaatagaatgaacaaatggctaattgtttgctttgtcaaccaagctcaagttaatggatctggatactatgtatataaaaagcctagcttgagtctcttttcagtggcatccttccctttctaatcagagattttcttcctcagagattttggcctagatttgcaaaatgatgaccacatctttgatttgggggattgctatagcagcatgctgttgtctatggcttattcttggaattaggagaaggtaagtaatgttttatctttaaattgctctttgattcatccatttaatttttttaccttcatttttatacagtaaatttggttttctatacttacacatattagcattatcttccttattttttaaatgaaaaatttgatttgaatttttaaagtaatatcttttttactatatctcacaagacatatgacagcttccctttttagtattggcatataccgatggtaatatataaatgtatattggtgttaaacataactgacagaaattgtataaggtctctatgtacatttatatgtgtatctaaagaggaagcccagattagtaaggatacaagtagcaagtgggaatctacaatggaaaggattgctttctctcacatggcttcaatagatactcttgttaaataaatgttctcttttaagctcattcttgtgcatcgcatagactcagcctaagcctgaacaagagcatagagcctgagctgatcattctattactgtttttaaataaatgttaatcaactgtggtgaattgggaaagtttgctgagtgtatgtgacatcgatttcatttatttacaactggttcaagaatgcaagaaaaacaaatacagtcagatccagaaccatagtttatttaacttctaattggctcaaggagtaattgtggggaggcatatagatattctctgctatgtcaatctcaaaaagagaaaataaccctaaccatctttcagctttgtagattgctatgtgttttctgccttttgcagtttctttcaggcctgatagtttttacttttaattaaactacttatcttcaaactaagaaaagaaaggtaattactttatactgtattattctatcaa

SEQ ID NO: 11794 - DNA, 6000 bp, Homo sapiens
tagatttgatgacattggaggattctagaagctagtttcaggatacttttctttagataagggacttgtatccaatggaagaggctggttattttcatgaaagacaaagaaataattactttacttagacacacacacatacacacacacacacacacacactctctctctctcacacgatccttgaagcaaatacagtttaagtaaaattattatcttgcaaacaattgaattattgagatttctccacattttttccttttttcctcttactttctaactactcctaaatcacattaatatgtcctttatatactatggaattgccatgactgtaatttcttgttattctctaatgtttggctttttctccatgtttaagtttctttctggcattaagtttgagacttaagaagagtcagttaattccatcatttccctgtgctagaaaactcaagaactggcaatagcacttacttagatgttatttgatagaaaggaactttggctctaagaagtaccaatcttgataggaaatttaaagaattgaaaggaaaaaggaaatgataggtttcttaactaatgtgacttcagatcattttaccatatcgtaacacaatagtactaactcaaatccattttagactggatttaaaatcacttctgctcatataaatttattctatttatttatgatgtagatattagtcaggcttattttttctagataatctgaagtcaagctgtttggtgaaaatgacagttcatttacgtgttgagatatgactcatatgaggataattgctttgaaaacactgagtagggaatgccttcaaaatcctcctatacttaccaatatcctttcgttgcaacaaatttcactaatataatatgaaaaacatataaatgaatcatgaccagttgaaatttattgttttccactatggtcttactatggcaaataaagatgaggaaatactcagttccagtttgcaataataaaacttcacagtaggaagattgcataaaaatgagaggcattttctaggaagcaggttaaagtggaatttttaaaacgatgctatagtaggtataagtaagtccagaaatattaatttggaaggaatttgactggaggttgtaaagggtcatcagaatggaaaaaaaagaagtagggcaaatcgtgtcctccagttctcacttgcaaatcccactgaaggcagtggaaggtttatggaaatacctgaaagacacatttgacctagttcaaaagctctattaaattagtattttaataaattgtcctagataagtcttgtctttatggtccttttaacattatttcacccatagtttgcttgaaaattacagaaaagaggaaaagctaacaagggacatttgacttctcctttaatttaaaagatactaagatactttgtctttttcacaaccatgctgagaaaatgtcctttgtaaagaaatatatgaatcctaagtaagctttgcgttttttgatgcccataatatgggaagtacagacagatataaaatgtatagttctgttacttagcttgagggaattcagtccctgaaatgaaactgtgtctagaactgatggcatctgatttaagttttattcgataatactgagcacataaatgttatcatagttgtttcctcaggatacaagaaagcgctaggtagcctctttctttctgtgattcatatttactaaaacctctattttggcctgatattgcccaagatacacagcaatgtaccttgtcaggggtaccagatttagtttctggaaatgcaggagcaaagcatcacttaatggcattttggagttagctataaaacaaatttgatttccttaaaaagataggctttgataagcacttaccactgggtttcagacctatctttgaaggtaggaccaaggaggcttcctggagacatccattaaccgaaaagggagccaggtgagactttctccactcaaaactatgtcttatccaggaggaataatttggagtatagactctggagccagtccaaccaagttcacatccctcctctatcacttactagctttgtgactgtcccagccactccagctgtggctgaaaggctccaacgtacagctcagactgtggcttcagaaggtggaagctccaagccttggcaacttccacgtggtgttgagcctataggtgcacagaagtcaagaattgaggtttgggaacctccgcctagatttcagaagatgtatggaaacgcctggatgcccaggcaaaagtttgctgcagggacagggccctcatggagaacctctgctagggcagtgcagaagggaaatgtggggtcagagcccccacacagagtccatactgggtcactgcctagtggagctgtgagaagactgctaccatcctctagaccccagaatggtagatccactgacagcttgcactgtgcacctggaaaagccgcagacactcaatatcagcccgtgaaagcagctgggagggaggctgtaccctgcaaagccacagggatgcagctgcccaaaaccatgggaacccacctcttgcatcagagtgacctggatatgagacctggagtcaaaggagataattctggagctttaaaatttgactgccccactcgaattcagacttgcatgggccctgtaaccccgctgttttggccaatttctcccatttgaaatggctgtatttacccaatacctgtaccctcattgtatctaagaagtaactagcttacttttgattttacaggctcttaggtagaagggacttgccttgtctcagatgagactttggactgtggacttttgggttaatgctgaaatgagttaaggctttgggggactgttgggaaaacatgattggttctgaaatgtgagggcatgaaatttggagggactggggcagaatgatatagtttggctgtgatcccattcaaatctcaacatcaaattgtatctctcagaattcccatgtgttttgggaagaacccagagggaggtaattgaatcatgggggccggtctttcctgtgctattctcgtgatagtgaattaattctcatgaaacctaatgggtttattgggggtttctgcttttacttcttcctcattttctcttgccacctccatgtaagaagtgcctttcacctcctgccatgattctgaggcctccccagccatgtggaactgtaactccaattaaacccctttttctttccagtctgggatatgtctttatctgcagtgtgaaaacggactaatacagtgaccctactttgttttatctctctgagcttccagtatctaatttctttaaaaaattgatatgactacagggttttgtgagaatttaagggtaaaaatatctttggtgtggggggtggggggtggctagagcattgtgttttgaaatttagctctcatttttattttatatgaagcaccatcactcagatttatttcttaatccagttctccacctccttcattgagataatataatagagggttgtaagggggccctgaatgggagaaaggatatatggatgcagaaggagatgccacaagataaaagctgagagagctacttcaataaaaactctgtgaactctcccctcccaccgtctcttgataatagcctaacactatttgacaaaaggtaaagaaaggcattctctttattctgcaacatgacctttggggggtttctgtgcatcatcagggcagggtcaagcagcatccaaccatccacaggtgaaaaggcatggggccggggggaggcgggagtgcttctgaaggcgcgggtgggtgggtttgtggggctggaaaagaggaatgaaaccagatgccacaatgcaactgctctctctggtccctgagccctcctgagacactcccaggggttgctacgaaacatgatcaagagctgtgggttcagcaattgacagaaatgtatcaaatcactaagcatttcttgcttgcctgttacacattgggcatggtgttagcaatggtgacacaaagatgataaagacgtcgctgatctcaagtccttgtctggttcaaccacgtgccaagacattttaatactctgttgggaattctcaggcagcacaggcccaggcgttagcaaagcagccagggatttcagacagagggtgccatccagggtaagaaaatgaactttttgtgtcacatttgcattttcattccttaactaagagtatctgaaaatactgatggcacaaacgaactaaattcctgcttcagcaccaaatggatgaactactacggtttaagcattgaactagtcctaatatcaccattccagaaatgtcttagtattaatcaggacaagaaatagggatctctttcgcaagaagcgagactgcactccttcctttccttgtatacggaaaggggacaaaatccacagtgaaaggcctagaagcggcgcactccgcccacgggcggcccacgtgtccacctattccgcaccgcgccctgtcccatccctatggagcggggtctgccaacgctcgcgagagccctctcggcttccacgtttgccacgttccaaaggaccgagacaaactggaaagccgaaagaggctcgcgctcacaggcagctgcgtagcgcccgaacagccctaagtgagcaggggcggggagcgcggcagggtaccgccgcctcgtaagggcccttgcgattgggtcccaggcgccgtcactcagccttccgggggcggggcgaggccgggaaggggcgtggccgtcgggcggcgagccgcgcgctctcgccccgggagggagtcacaggttcgtacacgcgaggccgggcgcgcgcagccggcaggcgggtgaagtcttcccaggtgctgcaggcggtgctgaggcacagggtctgctgcaggagcagcggcccgaacccgctccagcggcccgccgccgccagcggttcccgcgtcgcgtgtgtacccccgcgcactgaaggaggtccgccagccctcaccagcccccgcggaccgtgcaatggcccagcgtaagaatgccaagagcagcggcaacagcagcagcagcggctccggcagcggtagcacgagtgcgggcagcagcagccccggggcccggagaggtcagaggccctgcggggcggggatctggggcctcgcctcggggtagggagccggctggcgcggcggacgctgcgggtgcatctccccaggtcccaccgcgcgccgcctccatcccccgcgacgctcctcctttaggcgcgcggggcggaggccgcattcggcgggcctggcgggcgggcgaggggccaggcggaccggggtccgagccctcgggatgctagtctcggggagccccttcccagcggttccttcacctgcagggcgcagccgagacagaggttgctgaacgactgtttcttggctttccgtggaattgaacatgggagtaagagaacaatttatcgtttgccttgcgtgttttggggagttgaaaatgagccaaagtcagggaaagtgagttcctgcctaaccagcagcgtttcagagcaactcaaaggaggtgaaaatgggggcgccggggggcagggggagggaagaagttgggagtgatttgaatgctctcagaaattattttaaatatttttgcttgtatgtagctttcttaatatgcgttgcagttgcctttaaaatagaatgtcatgaaatactgaacgagcgtctgtatttttaccacttttacttaaaataaaaatcgattggatattcacctttctcctcgtccgtgtgcatatccagcagagagaacagatttttaaatctgtttcgtctcatatttcagtgattcttggtttcttttatacttcctttgactcatatttgggatattgaaactgcaatacacatgtgtatggaatgtgagctgtaaacttca

SEQ ID NO: 11795 - DNA, 6000 bp, Homo sapiens
gaatgtgtgaaattccattttggtattttccacagtggtactttcccatgtttcctaacagctgaagcctgtaatctaccctcccctccagcacatcatttgcttcccaggagctcacaagattgaggccatatgggtgcatatccttaaattcccccatggtcactccacaatcttctttgagtggcctttttactttcttttgtccaatattaatgtgtttcatccccttcatccaagctttttgaaggaagtgacatctcattctttttctttttttttgagacagagtcttgctctgttgcccaggctggagtgcagtcatgtgatcttggctcgccacaacctctgcctcccgggttcaagcgattctcctgcctcagcctcctgagtagctgggactacaggtgcgcgccaccatgcccggctaatttttggatttttagtagagacagggtttcactatgttggccaagctggtctcaaactcctgacctcatgattcgtgcctgcttcagcctcccaaagtgctgggattacatgtgtgagccaccaagcccatctcattcatttttataggtccaataggccaagtatagtgccatgaacataatttgcacttaacaaaagtcattaagtaggtagacttgaatgtttcagtccagtttattagtattttcaaaatctgggcagaattaggatgtacatgttgaaatgaaagaggaaatagtcattattcaggttttgttgacttccacagaggctcttgagaatcaaaagttaaggcatggggggaaccaaagccagagttcaagtcctaatgctagattagaacaagaacagagaaagaggctaatcactccagccacctggtagatgagggtcacttggctagtgcagtgagtcactgaagtacaatctgtcaccctctccctttctttacttcccctactctttctttctgtcaccctcttcctcccctccactcccttcccctccctccctccctgcttccctacttccttccttcgagtggcctttttactttcttttatccaatattaatgtgtttagtcccagctttttgaaggaagtgacatctcattcttttcttttctttttttttttttgagacagagtcttgctctgttgcctaggctgaagtgaagtagtgtgatctcggctcgccacaacctctgcctcccaggttcaagcgattctcctgcctcagcctcccgagtagctggaactataggtgcgtgccaccatgcccagctaatttttgtatttttagtagacagtttcactatattgcccgcctgcctgcctgcctgccttccttccttccttcttttgagagagacagggtttcttgctctgttgctcaggctggagtgtacagtagtgtactctgatgatagctcactgtggcctctaagtcctcggtgggctcaaagtgatcctcctgcttcagcctcctgattagccaagtagctgggactacaggtgtacaccaccacacccagctaactagaagtagtctttatgatggactggcatttgttcagttaaaaatggaggactctgttactgaggaggaaggggtgagcagatatggagggtcaaccggcaatctctgtcagagaggtgatggggataatggtatactttggcgttaaaactgaattgaactggattgaatataatgaggctaataatgagccaccatgaaagtaaaagaaaaataaaaggtatctttagattgttttaatctggttatagagcgaaggtcccttttaataaaagtggaaaacccaaaagaaatatatatttaagatgtattgcatatatataataaagtgtcccaagtaagccactgtgcagataacataggaatatgatacagttgcaaaccaaatctggtaaataactatgcaggcttcttccttccacttctctaaggcagggcaatcaaccatgggtttttgctgttattaatgtgataaaataatatgtttggtatggtgtctggcaaataataaatgttcagtaagtagaatgaattcttagtattttaattatatttttaaacaaaggtcatctaggggaaaacagaagtatgaggattgagacttcttctgaaaatcagtgagtggctctctgcagtggttacagaaatgccccagcatggactccctcctgtaaactggctctgctgtcccagcagtgacggaaagcactcaatttgttttctcttggaagagacagagtggctgtcagtttactgcaatattttggactgcctggaaaattcaatgtacaacaggagaaaggagaggcaggagacagactctggaatagaagtcaaagacaaagaggctcgtaaacatcaagattctggggctaatctagccattcacagctttagaaccatggacagtaaaacttaaaatatatactatgttctaaccaccacaaggttattcactctagcaactaaaaaagcactggcctcaggatttgcaacattaaaagtcacagctcatccaccatcagatgctaactgaccctgctgttccacaagccataactacagctttgattggacaagagtctggtttcagtaactttctcctgattaagaagaccactgaccattgactggttttgccagtttacagagattacacacttacctacctttgtatgtaaaatgatcttttgatatataaagcataactgtagcacatttaaatgttaagtagccaccccaaagtgaacatgggtcatatgttacgtgcatgtttgttcaataggcatgtgtcaggaccaccttcatgaatattcatagctcctcctgtaaccagttaaatatatatgtttagccaacctcttcagcataaagctcccaccccaagccctcctttgaagggcctgtctctagttttgcctggatggccaccttgcaggctgtaaccctttggaagaaataaagtctcctctctccttttcaaaacttaaaaattgtgaatttttatttttattttatgtatttaacttttaagtttaggacacatgtgcaggtttgttatataggtaaattcacatcatgggggtttgttgtacagattatttcatcaccaagctattaagcccagtaattattagtcattttttctgatcgtctccctcctcacccactctgccctccagcaggccccagtatccgttgttcccctctatgtgtccatgtgttctcatcatttagctcccacttataagtgagaacatgctgtatttgcttttctgttgctaaggataatggcccccagctccatccatgttcctgcaaaggatatgatctcattcttttttatggctgcatagaatttcatggtgtatataccacattttctttatgcagtctaccactgatggacatttaggttgattccatgtctttgctattgtgaacagtgctgcaatgaacataagcgtgcatgtgtctttatgacagagtgatttatattcctttgggtatatacacagtaatgggattgccagatcctatggtagttctgtctttgaggaactaccacactgatttccaaaatacatgtggccaacaagcatatgaaaaaaagctcaatgacactgatcattagagaaatgcaaatcaaaactacaatggattttttaagttaataatgtgaacaggctgagtatgagggacatggtggcccaagcttgagtatatatatggaaccgttctggcgaggggagttgtacaatgaagacaatttgtgcagggcttctcattgcaggtggaggatatgacttcgtcacaaagacaaccattaagagttttgaacagagtaaaagctggagaggtctgtgttttagggaggtggaaatggggatgatggactggaagggtaaaaaaccagagattggttttgaagctgctgtacccattccagagaagtgttgcattgacagagcacacaagtcctcgaataggaccgtggttagaacggccgatatttatcagtgggaatggtaaacatttatcaagtgagcaaccaagttcagttacttaatctgagtctcattatgtcttctataaaatacacattaaaaatagaaagtaaaaacgtgggtaaagtacccagtggatggtcattactcagaaaaaggtattttaaaagtttctcccttattctttctgagtacagcctgtagtacttgaaccacttctctttcgtcccctaccacgctgttctgcaatctctttttacctgtctcactctcttcctgtactgtgtgcctcatcgggacttctaaaggcttacggcctaggtctttgtattccgtgtctctggcacgcgcctctgcacacagcaggcctgaaccaaaacttgtgagcaaataggatgtaagggggtgaaggaggtgggcgcgaaacgggttcgaggtcgcgcactccgccggtttctgccgccagcccaaccccgctgggtcgtacctaagagatcgccggtgtcagagcgcagcgggcaccttcacaagcatcttgagggacaagcagagtcgctcctcccgcagggcgcgggctaagaagtgaggaacccaaggggctcccgtccaactaagaagcgaaatcccccacctccaggccttcagggctggttcttgggaaatcctaactctttcccttctaaccccttccttggcccttcttcctgcccgggaggatcaagggcgctgttttccagaagctgccgggtcggaaacggtgggggaacggggcggtacgcgtgggtggaggataggcggggagggggcagtccacgaacttttgtcattcagcctgggagaccacggtgacattcctgtctgcgctgcgggcaggccagcctctccggccctggactagggggcgccgccgagagaagccgccgcaggctgcagagtcgccgaccgcgctgttcgcaggcagaccccgggctgcccaccgcggcctagcgcgcgccggatggcaggagaagtgtccgcggccacgggccgcttttcgctggagcggttgggcctcccgggcctggccctcgccgcggccctgctgctcctggccctctgcttgcttgtccggcgcaccaggtaagcgcctcggccgccaggccacgcatgcgccctgggccccgcgggccgcgcgcgacccagatggcgaggggagtccccctccatgatttccagtgcagacagtcagaacttgctgcggggtactggcttcctttgggactttgtaataacaaaggcttcttctgtctttttcccacacatacgcgtacatattaaagctttgggaccgaattccatttgctgctccagcgtaagttgtaataagccctaggttggcggtatgcattatgcatcacagacacattgtgtgccttgccactgcgagttgatattttatggcctagaattcatagagcatttcaggaggggaatattcttaaatttcatcagttaaaagagaactgtttcaagaaaatgccagtgcatggtgtgaacaataactctgagtgcctctcttcctcagtttacctcactgtacctcatttggaaagctgaaataatagtacatgcctcgtgagatttttgtgagtactaaatgagttaatggagagtattttatgcagttgtcctatcatttttataaggacaaaacaaaacacacaataatgacaaaatctagacgtgtgtcactttaatttgaattgtggaagtagaaatagagaagttcagataaaatcattcactttgagtttaatctgtttttcctttctttctgggtcctattttcatactgctctggtgttcatcgcttttgagaaccaagcggatgcattttgttggatgataattgatatatgtatgtatatttgcatacatatgtatcaatgtatagatatctatgtgtgtgtgatacaggttgtt

SEQ ID NO: 11796 - DNA, 6000 bp, Homo sapiens
tttgataatgaggatgatacagggaagtttctcatatttcctagcacagaatctagcactttgtatatgctgaaaaaagttagtttcttatctctactcccttcctttctggatcatgcagagcaattccattttcttctttaacagatgaatgaatgtctggcacctacctctgctcagggatgttactcatatagtgaggctgcaactcttatgaactcgacggaaatttacatctttattatctaatccatgaattacagtacaccttttctcacttagttgtattcaatctagaacaagtaacctgactaagagtgctggaagctgctgcaaggacccaattgttttagtatttgcagtctgactttaaaggaactttataaattgtagcaaaggaataactcagtttccatggagaatttttctggtttctcaagtcctaggaatacagtctagaatgacttaatgaaaacactactgggtggtgcggctgtataggcgtgccacttttagagtagcagatacctttgcgtgaacaaaaatggaatcctttctccaagcagggtgtgagctacatttcagctttgctcccttggctgggtgcccttgtgcagtgtacaacctgctcaacagtatgtggctggcctgcctagtaaaaactgtttcttgttctgcatgattttaagacttgcatgtggcttttttccctttcaagtcaataaagagaaagatgaagggagtggcagtgaagagaggagtctttgtaaggtacatgtttggttcagtgtgattggcacttacacatgtcttatgcttacaacatccctctactgtttatattattatctatgttttagttaaagaacctgaggcttagaaatgaagtgatttatccaaactcatcagttaataaggagtggagctgaatcagatctagatgatttatgtcagagtttgcattctttctgagcacctcactgaggtgctgttttaaattgtgtatttcatgcacgtacgcacctgcatgcacacacaaccttcttgctgaatgagctattggggatgtatctacttctcaatactgcatggctttctgatatttcaaagcagctgagttacaggcatcgtgctacatgctgtgcatgcctacagcatttgctctgtggctctcacatcagccagtctagattttcacctgagccttgccacatactggctgtctgagtatgggcaaattatttgacttttctgggcttggtttctacatctttaaggtgagactacagatagtatctatctagtcggattgatgtgaggattgagtaagatacttggccaattctttaacctttctgtgcctcaatttcttcaacattaagatgtgatcaattatagtactcatctcttaggattatagggaggataaaatgggataaaattcataaattgtaagcaattgataaataactatttaatggtatttttctccttattaatgaggataaagtctcagagaggttaaataacttgcttgaagtcaaacagctagaaaatggctgagctagggtttgaaattaggtttctttggttctggatgcaatgctgcaatacttttgattattacactattttgacagaagaaaaaaatacaaagaagaaagcatgctatataagccagttccattcattaaagtttatgtgaagggcttcaggtttacaggcatggtgaaaagacttaatgactgacccatctttgattagtatcaaatactcataagtcacctaagtgcctgagatggggttgggatgttttaggagaatgagcttttcctgtgaagccaaaatggaatcacagtctttttgtagaatgaacctgatgtgttattagtggttttcttagaaaattcagatttgatagccaagatatggaagcaacttaaatgtccatagacagatgaatggacaaagaaaatgtggtatgttcatgcatcacataacaatgtttcagtcaatgatggacatatacaatggtcatcctgtaagattgtaatggagctgaaaaattcctattgcctaatgatattgtagtcataaggtcgaagtgcaatgcgttggtcatgagtttggagtgatgctggtgtaaagaaacctactgtgctggcagtccttcaatagtacagcacatgtagttgtgtagagtacatagaacttgataataagcacctgtgttattggtttatgcatttactatactatacttttaatcattattttaatgcatactctttctacgtattaaaaaagtcaactgggaaacagcctctggcaggtccttcaggaggtattccgaaagaaggcattgttatcttaggagatgacagctccatgcatgttatggtccgtgaagatcttgagacaagatatgggggtgggagacagtgatactgatgatcctgaccctgtgtaggtgtaggctaatgtgtgtgtttgtgtcatagtttttaagaaaaagtttaaaacggcaaaaaaagaaaacagtttatagaataaggatatgaagaaaaaatacttttgcaccacagttcaatgtgtgctttaagctaagtgctattacaaaagagtcaaaaagctaaaaaataattacaaagtgtataaagtaaaaaaattatagtaagctaaggctaatttattattgaagaaagaactgtggtttttaatggatttagcgtagcctaagtgtacagtgcttatgaagactacagcagtgcacagtcatgtcctaggccttcacattcactcaccactcactcactcattcactcacccagagcaaattccagtcctgcaggctccattcatgataaatgccctatacaggtgtatcattttttattttttatacttttttattttttgagatggagtctcactctgttgcccacgctggagtgcagtggcacgatcttggctcactgcaagctccgcctcccgggttcatgccattctcctgcctcagcctcccaagtagcttagattacaggcgcccgccaccacacctagctaattttcttgtatttttagcagagacagggtttcactgtgttagccaggatggtcttgatctcctgaccttgtgatctgcccacctcggcctcccaaagtgctgggattacaggcgtgagccaccgcgtccggccttatactttatttttattgtacttttcctatgtttagacacacaactccttgccattgtgttgtaattgcctatggtattcagtacacaaatatgccgtacaggtttgtagcccaggagcaatagtctatactgtatagcctaggagtatagtaggctagaccacttaggtttgtgtaagtgcattctatgacatttgtacagtgatgaaaccacctgatgatgcatttctcagaatgtgtccctgtcattaagtgacacatgactatatacatacaatggaacactattcagccttaaaaaagaaggaaattctgcaatatgcaacaacatagatgaaccttgaggacatcatgctgagtgaaaaaagctggtcacagatttcacttacatgaggtatctaaaagagtcaagttcatagactcaaagagctagaatggtggtcatcaaggctggggcgattgggaaaagggttgttactaatcaggagccatatagttttaatcaagcaagatgaataagctctagggatctggtgttcaacatcatgtctagagtcaacaatactgtattgtacacttaaaactttgttaagaaggtagatttcatgttaggtattctaaccaccgtaaaataaaacagaaacttcagacttaaaaatctgatgagttttcattttgaaagatcgtgagagctctagcaaaatcctggcccatttccaactcacataattacattcccagcactcacaattttcctccagttttaattaagaaatgtgttttgcttcctctctgtggctgccagactgtacttcatacaggtgtgtcctaatcaccttggacccgaaagagctggcattgaccatgaaaactttggttaagtgatgctttacataaatccattgtgtaatgtgagttattgcccctcactctgccttttcttcaaataattttttaaatggggttaagtctgatgtctgtataaagactttttaaccagtgctatgtgctgatgaatcacttagtacttacttactgtctatgactatctttcatttatcaattgtcatctttttgaacttaaagcaaaatctattatattatctgggtttgtgacttgagctactgagctgaaacttctccaggggtgattcttgagctaccaaatgaccaggaagagttttctcagttttctgctcttggccgagactgttggacaggatgattcactcagttccacccagctccgaaatatttccctaaagtatcttctctgaatatagctttattgccccatcgtattcagactatagaaattaaataaatacagtctgttaattcagacctttgccacatgcacaactcagcttcctcttcaccacacttgattttaccgtaggacaacatggtgtctttagatagttgaccagccctcccagttgactggcatttctggccatgtcattcctaaatccttcaattatatcattcaaaccattcatctccttgcctgtgtctcatgggtagcttaatctacttaagagttttttctccattgtttaaatattttagcaccattccacaaaggcccgcggcgggtgttgacgcgatgtgatttctgcccagtgctctgaatgtcaaattgaagaaattcaatgaagcacaggtaaatggtgggagtaactatgactctcttaaggtagccaaatgcctcgtcatctaattagtgacgcgcatgaatggatgaacgagattcccactgtccctacctactatccagcgaaaccacagccaagggaacgggcttggcggaatcagcggggaaagaagaccctgttgagcttgactctagtctggcatggtgaagagacatgagaggtgtagaataagtgggaggcccctggcgcccccccgtacccgcaaaggggcggggcggggtccaccggccttgctgaaataaaagaggatacaaacaaatggaagaacattccatgctcatgagtaggaagaatcaatatcgtgaaaatggccatactgcccaaggtaatttatagattcaatgccatccccatcaagctaccaatgactttcttcacagaattggaaaaaactactttaaagttcatatagaaccaaaaaagagcccgcatcaccaagtcaatcctaagccaaaagaacaaagctggaggcatcacactacctgacttcaaactatactacaagcctacagtaaccaaaacagcatggtactggtaccaaaacagagatatagatcaatggaacagaacagagccctcagaaataacgccgcatatctacaactatctgatctttgacaaacctgacaaaaacaagcaatggggaaaggattccctatttaataaatggtgctgggaaaactggctagccatatgtagaaagctgaaactggatcccttccttacaccttatacaaaaattaattcaagatggattaaagacttatatgttagacctaaaaccataaaaaccctagaagaaaacctaggcattaccattcaggacatagccatgggcaaggacttcatgtctaaaacaccaaaagcaatggcaacaaaagccaaaattgacaaatgggatctaattaaactaaagagcttctgcacagcaaaagaaactaccatcagagtgaacaggcaacctacaaaatgggagaaaattttcgcaagctactcatctgacaaagggctaatatccagaatctacaatgaactccaacaaatttacaagaaaaaaacaaacaaccccatcaaaaagtgg

SEQ ID NO: 11797 - DNA, 6000 bp, Homo sapiens
gagcccacagtgcatgacagggcactgtcgcggtccaaggactcatcatctccatccaatgtggaaatcctcaatgggaagtctctgtgctggagctctacacacaaggctggccaaaactttctcagctgcacctcagtctgaggctcttcctgcctgatccttcttccttcctttcacagggatcagatctacattacagcctgaagcttttccctgttaactcccctcccctttaattttcacaaatgttattgccaataagtctcttatgcttctaactccttcttggcatctatttcctggacaacccaaactaacataaccacacaacctccatcttaccaaacccagtggtcactaggcgcaatggctcacacctgtaatcccagcactttgggagcctaaggcgagtggatcacaaggtcaggagttcgagaccagcctgaccaacatggtgaaaccccatctctactaaaatacaaaaattagccaggcctggtggcacgtgcctgtaatcccagctactcaggaggttgaggcaggagaatcacttgaacctgggaggcagaggttgcagtgagctgagatcgtgccactgcactccagcctgggcaacagagcgagattccatctcaaaaacaaacaaacaaacaacaacaacaaaaacccaatggtcatctcaagtcctatggctggccagagtatgatatgtttaagcagctgaaagaagaccaatgtggtcttctcacaaaggagtgaaaaatcaccagattctaaggtttgaaaggaccaatttcagtttaaaaactgacattagtagagcaattcatttccaaatgacctagaacacttctactgcaccttgcactgtctctttgtaaatatccatcacattggtcattgtttactgtctgtcttctattccaggtatgcgtttcaagaacaaagactaaatctgtcttgttaataattatatcctacaactcaggacttgcttggtgcattgcaagtcttctttaaatatatttaaaatgagtaactttgtagagccatatatcatttttatgtttgtttcttggttaaactatcttaaggttttattctcatttatgtgaggtattttttcttttcattccctcaataaataatgaccactaaatatttgacagtatagcaccaggtagtaggagctggaaaaatgaaacaactcccagttcctgaggagtaccagtctagtgggaagacagacttgcaaacaatagaagatagtatgattattgctaaaatgaaattatgtacaaaatacaagtgagtcctcatagacccaagtgtaagagctaaaaccataaaactcttagaagaaaacacaggagtaaatctttggaatcttgggttaggcactgatttcttatataggacaacaatagcaagtgattaaagagaaaacaggtaagttggactttgctgaattaaaaacttttgtgcttcaaagaaaaccatcaagaaagtaaaaagacagactgaaagaaaatattttcaaatcatatatctgctaagatctagaatctatcttttattttttaaaataaattacagaacaacatggacatatagaatagatatttttaaacccttacaactcaataaactttaaaaaattaatccaacttagaaatgataaaggatttgaatagacatttctacaaaaaaagatatacagatggcttctgagcacctgataaggctagtagtcaatatcattagtgctcagggaaatgcaaagcaaaatcacaatgagatattacttcacacccactaggacagataagattaaaagacagaaaataaaagtattggcaaggatgggaagaaattggaacctctacacattgctaataggatgggaaatagtgcattcactttggaaattagtgtgagagttcctcaaaacgtcaaacataaagttgccttatgatcagcaattccactgctaggtatatacccaaaggaattgagttcaaacaaaaacttgtacacaaatgttcatcaactgatgaataagatgtgctatagccatacaatggaatattatttggccataaaaaggagtgaagtactgatacatgttacaacatcgatgaaccttggaaacattatcttcagtgaaagaagtcagtcacaaaagatcatgattctatttacatgtaatgtccaagctggccatggtggttcacacctgtaatcccagcactttgggaggtgggagaatttcttgaggccaggagtccaaggttgcagtgagctatgatcatgccactgtacaccagcctaggcaacagagcaagaccccatctcaaaaaaagaaagaaaagaaacaaagaaagaacaaaaagaaatgtccacaataagcaaatatagagaggtagaaaataggtcagttgttgccaagggctgccaagactatgaggggaaatggagagttactggtaatgtgtataaggtttcttttagagattacaagaatgttctaaagttatattatggtgattgttgcacaactttgcaaacatactaaaaaccacagaattgaatatctcaaatagctgaactatatgacataaattatactgcaataaaactatttcaaaaatgcaattgaatcataaaagataaattgcttaggtcacagaattcagtgaagctttcgaagaggtcatgtgtaaatgagacatgaaggaacagcaggagcctgctgtgtctatgaaaggacaggagaaaacattccagacagagacagcagtacacgcaaaggcaggggagagcatgggaagagagcatgtcatggcatgtacagtcgtccctcagtcttcacaggggactggttccagggcccccgcggataccgaaatccacccatgctcaggtgccttatataagatgatgcaatattctggtaaagaatatcctaaatcctcccacagacctccaatcatttctagattacttataataacacaacataactgctaaataaatagttggctgtactatattatttagggaataatcatgggggggtagtctgtagatgttcagtacaaatgcagtttttttcttgaatatcttttactccaggttggttgaatccacagtgtatgcggcacccacagatatggagaggcaactgtatagtgtgtgtagtcaataatgctggtacagagattatggcctgtagatgcagggctccagtctgttggggtaggcaaggaccaaatcagaaagggctatttcatcatgctagctttccatgaagggaaagggaacccgctgaaaaactttctgccagtagaagcatcattctagtataaacgttgaaaggtgatctgaagggaaatgaaactagtgattgcccagaaggaggaaaagaataatccctgactaaatttataaagcccttactccccgctaagcagtttccttcaatcatctcatttaatcactaaaatgagcaatagttatccccactttatagatgatatccacagggcttgctccctcacctcctgcaggtcttcaggcaagtataagtgcctcgcactttcctattccccttgctttatttttctcctggttgctcaactcaatttaacatctgtttcgcttttgaaatcttgtttaaagattctctcccacactagaatgataagtccctaggaataatttaatttgtatttcagttctgtatccccagtgcccaggacacagtcaaccctcagtaagtacataaatgaatacatttttaaaaatgaggaaatcgggtcccatagagattaagtaacttgtccttgatcgtacaagtaataagtggcagaattctgatttaacaacccacattcttaaaccactaagtggttacaccagagttgtaatattgtaggcaagaggcaagtaccctcggactgcggtagtggggaagcggggtgataggtctgcctcgaattggtgatgactggatgtggaagggcgctgaaagggctcaatctagcatgactttggtttctacatttggcttatgggtaaacaggagagcaattcttcaggaaaaagaatacaaaggactccaggtttgggcaaaacgataagaggaggacgtgtcttaatccacgatcctttttaactcttttactatttcccttagattactaaaacatgttgttaatttgaatatatgtgaagccagtaaacccaaactgatcccttcgtcttcagtctgaggccagtgggggataggggtggggatggggacggggatgggggtggggacggagaggcagaccagaatagggtcagctctttttttttttttaagttagtccaaacttaccaagagtagaaataagtccccagcagtgcttaactctgaggtaatttttaaggcagatgctaaaactggagaatacaccgtacccttgtggagtcaggtagtattcgtagttttagattatcctgacggtgttagtcacttgtagaagtgacaatgtgcaacaggccactgacacccaatccctggatggccaggagggcaggagggcacccggccgcggcctcaggctgctgagcaggcgcaggaagctcgcgcctcaaacgactcccaaacccgggcccggcgcgaagcagggaagcgccgctcacattcctgcacgctcgcccggccgcgggccagcggcctccggtccccaggtggcgctgtgggctcgcggaggcggccgcggcaccagggagcgtcgtctccctggtgcgcatgctcgcccccgctgcgggctagctgttgtgtttttttttttcccccgggcggcccggcggctgcgtactggctgtgggatgggaagtgaagccccagcgagcggctgcagcggggccgtgaggagcagccagcgggaggcggcggcgagtcggtgagcagctgggaagagcagaaccggggcggagcacctgcaggcgcgggcggcggccccaccatggcgattcgcaagaaaagcaccaagagccccccagtgctgagccacgaattcgtcctgcagaatcacgcggacatcgtctcctgtgtggcgatggtcttcctgctggggctcatgtttgaggtgagcccgccccgagtcccaaccgcctgccccgccacctccagcccgggcccgggctccagatgccagccccggcttctccgcccaggacgcggggggctcgggcccggggtgggtgcagacccccagtccctgaggtgcaggccttccctgccctgccccacgtcggcggcagctccccggcggccggcccggagatgcaaagtcccggtgggcctcatcgcggcccgcagggggtggggaccgccgcgtcgcccccttcctgacccgccgccgccccctcccgcaggctgcgcggcgcagttcctggttcccgcgaagggttacgtggcagccggcgaggggcctgcgggcgggggcggcccctgcgctgccgagctggctcggggcgggtgggcggacttggggggactgccagcctcggccgcggtgagcgtcagccccgcgagggccggggaaggccgaggcccggcccccgggtctgaggagtgccggcctggagaccacaggccccgagtgacaggggagcccccggtagctccgagattggggtgagcgagaaaccggagtcaggcatctgctttcgacttgaagggcggtggccgccgggcaccggcgcagtggaggcgcgccagattgttttcatttttgtcttttaaactgatattattaccagttaacgaactttttgccctgacgctttaaagaaacaaggtctgatggataaatcgaggttctgaacagcggtgccaaggaatcgagtaattttgtttcttgaagtaggagaggatgggaatgtcaggagtgtgtaaattctcttcccacgtatctagtattttgatgacttatttaacag

SEQ ID NO: 11798 - DNA, 6000 bp, Homo sapiens
gttgtggtggcacacacctatcattccagctactcaggagactgaggcaggagaattgcttgatcccatgaggcagaggttgcggtgagccaagactgcaccactccactccagcctgggcaacagagcgagactccatctcaaaaaagagagaaagagaaagacagagagagagagaaggaactgacccagaacttggggaggaaaaaggctatcttttcctcttggaggcaggtgaatgggaagaggaagaaaatgggaacctgtgtaaagtttttgaagagaggaaaggtgcaagtgttcctagctccttcttcctctgtgagacagaagacagtgtcctctgctcagcaggagaaagctgcagtggagatgggctccaggatggtgataaatatcaggaatctgcctgggaaaagttgtgctatgtagcatggaggactttgaggagaaccaacggagtgttcagtgagagtggcaatgagggaacgccgtcagagtggaattgtaaaatcccagtttgcaattttcagctggacctatactctcaaattccagagagttggccttactggaccttacttgctggatcaaagtcaagtccaggctatgtccgaggcccgagtgaatagtggaagtctcagaaggggatgttactgaacaacggctgtcagaggaagaagaaaaatgggcattatttacttatcaacctacttatttttaatttttgacctctcctactgaattgcctactgatcatctctggggtatacttctggatcattgtctcctaaataaatatatcttctgcagcccccataatttactctccttcctcctttaaaaaaaaaaaaatctagacagcaacattatcattcacccaggcagctaatctaaaaaaataagaaataaaagtcatctttactgcaccttgttgttctccgccgagcatttgaaagctctcaatgtgttctcatcctctctccaatcaaggacaggaataaagaacctcctctaaagtcacacagacctgggtttgaatcccacctcaaccatttctaccttgaataattctgtacctatgaatgtgctaaaccttattttctccttctgtgaaatggttgtacgactagtacaaatcatctacaactatgagatttaaatgaattcatacctgtaaaaaaagcttagtatggtatctgtcatacagtagttgccataaaagacttgaagaccattaattttggaattctcttcctcttctgatttcacactgcctgcaaagtttctgaccatatttcttaatttttatatttatcacggacaaatttcttgagtttgtaaattctttattgcaaatattcaaattttgattatttgattgtataaatcaagatggtaacactttttgacttatatatcaagtgattttaattgtatgtgtttttctacacactttgaatcatggtttttagacaataaacacctacagattagctttttgtcatttgtaaattttttattaaaaactctcaataatcagtcggggtttttttgtttttttgttttttcttttagagatggggtcttcctattttgcccaggctagtctcaaactcttgggcttaaatgatcctcccgcctcagcctcccaaagtgctgggattacaggcatgagccaccttgtccagccaataattaatctactatgtaaataaaatgaagtcaccaataaatttttaaatacaccttcattttttgaaagacatcattaaattccagcaaaacatccttactaatatgttgttaactggtcatagtcacactcaaaatagcttacaatatgttataaaattttttagaatggaaatatataataactaggtttttaacatggaggaaaacaaactatagggtagttgctggcccctggattttcatggcctcccccgttccacctgtcaaaccaacattcacattctcttcttactaatcccttcttaaagctaaattcaactcccccttatccagggcaaaggttcagagggagagggaaaataaggacattactaaccctgactattaaactgcaacattattccactgtctactatctgctatgccatcactctcagcatctcttcctcttcctagtattctctccccgtcttctccaaccgttaccattgaccctgaacacttacactaacacatatgtcttcgtgactgggtaaacattccattgtgatggcagctggtaaatggaagcatggtttatatggttatttgccaaaaattgtttagtaatttaccaaaaataccaactttctttcataaagaaagtcaacatcagagctaggctaggattaagattagttaaaatttaatcatacatacctagtggtaaagtctcacttttaattaaggttctttgcaaggcatctattagggatagccacaggaaaagagtaagcaataaatggccatgtcttttttcctccccaaatcttcatattcaatccagatgtgtgtgcacctcccaccacaaatagactagatatccattacagaagccagaaacttggtttgtgctctgtgttccagaaaatccctcatttgcatgacaactaattaggaagagtaataaataaagagataaaggtttccaaaatttatccccttaaagaacatatatgggtcctaacacactgggtggatccaaaaaaaaaaaaaaggcaaagggacaaagactactctatgaggaagtctagtttagaaagagactcccccattcaaaatattggcttgagcaaccacactttttctcatatcatacagaacctcaaaatatatgggaatgcatctttctacattagctcctgattctggtgtatcccataacagggaaatggaattatggctcagccgcaaagccctggccctcatcttcccagcggcctaaatcaatccccagtccaggacaagatgcttcgagagatgcataattatttcaggccactagggtaagcactattcctggcaactctgcgggcagtgccatggatgagggcttctaattctctttggtgatttggttctgcataaactgagatttttctttcagtctttcagccagataagtaggaaaggtcggctctcgtcctgagagagaggcaatcaaggtcaatttcagttccttttctgtgcagtttagtctactttttcccaggctgtcttcctgacacctgtccttatatctatatctgattatcaaatacttagtgagagaacctttggcagcttctgatgctcgcatagtcacccaaaggcctctcagcctaagaaatagcaggaatacactccaaatcagtttccttgagaggccaaactaagaccctaggctgtgaaagtgggagaagtttctcccgtgggtattttgagggtgaggtggagaataatgctttctctcaccagaggcaatgctgatccaacttgcctattaccaaatctctaatttttggtttggcactgcagccacaatatactcagttattaccgaatatagaaagagaaaggcaaatcttgttagtcccattcagaagatggtgaaatggaggtttaaaagtttagaagagttgcctaaagtgaattcgacaaagcagtgttgtagctagaaagtagaccagctgacatctgtccctggttttgtaggtcacagtttctttgcaagtttagagcagtgctttacttaccatattcctccttgcaaacctctatttactttcttaaacagtggataccagtggagaggtgtgcattccagacacttatacaatgtacacagaccgagccgtctacctgttgggcacacagctccaggctcaagaatctctaaggctgttaagaagcacaaacgaggcacgagagggggcaggctctaatgtaaaaggaatatcctgtaccactgcaaaggccgattgaaaacatcctcttcatcactattaataaaaaactaaccaatatattctgtgctttttcaaactgtactgctcaccctcagtgtcttcattaaataaatgcaaacacgtgtgctttgaaacgggtaggtgtaaaagaacactctgcacaattatatctaggctgccgcagatttacatcacatgcatacatatatctaggcgatattaattcacgatgacagctgagcatgacaaatgcaacagtacacaagttggaatgcgaaaacaatgcaactacaaaccccatgcagacaaacacgcatacaatgagttttccctcaacacacacgtggccgcactcacaggagcttaaccactttgaaaaaccccaaacacaaacaccgggggctccggcgcccgcgagcggcccccacacaggcagccgcgccttcatctccaggcagggattctcgtgcgtccccgggtacactcgccctcccaccggcatcccactgcgcgaacacatgcgcgccagccggtccccgcgcgcgcccgcctgccgaggaagcggcggctcccggggctgggggcagggcccggtggggcgggagcgccgcggggccgggcctcggcgcccggggaggggacgaggggcgggcgcggggcggtgcccggctcacgtgggcgggcgggagcagctgaaggtccgctcgggaacctgggctgtcctctcgcgcgcggcgctggcccaggcggcggcggcgaaggaggaggaggaggaggaggaaggcggcggtggcggcggcaaaagaggagggaggacgggggcggcgtcggactggagccgagcggcagcgcgagctgcccagggcgctgtcgtgagctcgcccgccgggcccccacccccgagctacaccctgccgtgcccagcactgcccgcgtccgtgcccctgcggggagcgcgccggggctgccccccgaatgacgggcggaaggttcgacttcgacgatggcggcacctactgcggcggctgggaggagggcaaggcgcacgggcatggcatctgcacggggcccaagggccagggcgagtactcgggctcctggtcgcacggcttcgaggtggtcggaggctacacctggcccagcggcaacacctaccagggctactgggcgcagggcaagcggcacgggctgggggtggagacgaagggcaagtggatgtaccggggggagtggtcacatggtttcaaggggcgctacggggtccggcagagcctgtgcacccccgctcgctacgagggtacctggagtaacgggctgcaagacgggtacggcgtggagacctacggggacggaggtgagcggcgtaacgggcggctcggctgctccgcgagctggtgcggtgggctctgccccggctgcggggaagcggggaggacgccgggcgcacgtgtccggaaacccgccaaaacacctgggggcgcctcccacccccgcgcccgcgcccgcctttcccagagagggcgctgggaccggactggggcgcgagggctggatctgaccccgttcttggagcgggccgtgtatccacactcaggggagctaggcgtgaatgtacctggccggcgccagcgctgcgctgccaccgggagggagcgccgcccgggagggttgggctggagagaggacgctgtcacttgagcccgtcacattacgttcctgatccctccctctcccggccgggtttgaaatcgccactcccgtggagttagagcgaacaccctgagcgggtgaggttggcggtccgtgctgaccgctcccgggattggtttcacgtggagtcgtatttcgcttctggtcctccagtagcctaaagatagaagccagaaccccgtaactaggatgttggggaattgtaccttatttgggggtgcatttggaaacgtcctagttatgggagcagaaaggccacctgatgcaggtggagttcagagtgtgtgagttcctagttttcattccgtttcttaaagtattggtc

SEQ ID NO: 11799 - DNA, 6000 bp, Homo sapiens
cttaaagagttcacagattagtgacaagagacagatgatacaataatacaataatttatgttatcatgaaataatataaattcattaaagcaaaaccatctcttatggctctattatccatgagctcctgatttagaagggaagatatgtatttaaataaacaactgtgtgacaccttttaagttacggtagaagcatgtaactggtaccaagaggcacagaaaaaagagtaatatttgtaggacctggcagaggggacactgaatggtttgaagaaggagagtaacatatagagttttgtagtttagagatcattccagcaagcaaggatagtaagcctgaagggcagtgaggctggaggccaccaatttgttaagagatggcttaaagtgcaaggataatgagggtttgaattaaggcaagtgcaggaaagattattaaaagagagagtgaatttggagtggtattagcaggcattatggaaggggacccaggatatgacattgtccatactccccagagtcccctccacacacataagtctccctcaaagaataataatagcaaacgagagcagtgaaaagttagaattgatggctgtgtaaatacccagcagaggaatggcaagagagagtctctggaatgtgtgaaaagtcctggtgcccttctagagagtttgaatattagcctgcagatactaggatctggacaaagtatttagaatgcatgatcagataacactgaaggtaccatggttagaacgatagatgctagcctagagtgaggagaaatcagagtctgagaaaggagatagcactgtagtgtattaaagtaaaaattttaattttcagtttttattttacaaggaaagactgatctctaaaggaaacatttctttttataataaatactgtttttaaaagttgaattgtcatcaataattacagctagcaattgcttgcactgcataatgatgtttcagtcaatgatggcccacatacacaacagtggtccctaagattataatactgtatttttactgcaatttttctatgtttagacatggttagatgcacaaatacttaccactgtgttacaactacctatagtactcagtacagtaacacgctgtgcgggtttgtagcctaggagcaaaaggttatcccatgtagcctaggtatgtagtagactacatcatctaggtttgtgtaagtacactctacgatgttcacacaacaaaatagcctaatgacgcacttctcaaaacgtatctctattgttatgaatgactgtatgtagaggcagtgctctaagtaccttacatatagtatttgtttaattctcaactattattattggttcagtttattgttaagtctcagagaggtcaagtaacttgcccagggtcattcagtaatgggtaggtagaatttgaatccacaaggtgatgtcagaacctgaattcatagccactgtatcatcaacacatgtttagttaaatccaggtatgtagaaattatttttattatgttgagcttcagagcatgcacaggctctggaaccagactacctaggttcagatctccatttcaccatttaatggctgtgagaaattcgacaagttacttcagctttcagtacctgtttcctcatctgtgagtgggaacaataacagtgtttgcctcctagggtagttctgaggattaaatgagtgaatttagtaaaagggctcagaaaagtaccttgagcatattatataaccaacaaaatttacctattatcaatattattattctaacataaagtattgagaatagtggtatgaaacactggatatactgcatggccccaattgagatctgagataggtagaataatggctcctaaatatatccattccccaatccctgtaagctgtgaatatgttacattattaccgcaaaagcaactttgcagatgtaaataaaagttatgaaccttgagcgggggagattctgtctaaccaatggattcttaaaaggctgtaattggagagatacagcaatggaagaagaagaaagaaagatttacaaggatgaaagggtctcaatccaccattgctggctttggagacgaagagggccataaccaaggaaatgtgagtggcctctagaagctgaaaacagctcttagctgacagccagcaaagaaacagggagaacagctacaagagcaagggactcaatttgtccaacaacctgaataagcaaaaaaaaaaaaaaaatcagattcttcccttacctctctagaaaggaacacaatcctgtggacaccttgattttaggccattgagaaccatgttggacttctgactacagaactgtaaggtaataaattggtggtggtttgagcttctaactttgttacagaaatagtattaatggtaaactaatataagatccatacttaactttttcctaaaagactcaaatatattgatttaggaactacataatattctagaataaatttaacttcttaaagtcagcattttaaaactatattagggacataaatcaatgtcttatttacatttctattgttaaattcttagaatctaaaagttgctaaaaggctaaagaggatataaaatgctattataaaatgtttccatcttttctatgtaaaggttaaaaaaacaattttaatttttcttctttaacttctcatagttaatgaacaaattaactttgatttttttcctaatatttttaagtccacagccaagttctaataaagactcttaacatgtcactagaaatatataaattctaggtttaaaataactcatgttttgcatttacagaggtaaacatttactaagaagaaaatattctgtcttggttattatttacttattcactgcctctgaactgatatgaattagctctgagagagtaagagccgtgtctgttttctgtcttcacatttttatcaacactgcctagcaaaactcccgggcctcagaaagcttttgttaaataaatgaatgaaaaataaatatatctttaaaaaactggaaacaaagcttccctggaacctcagctcaccagctcatgggaaaattaagaaggtatactgtatctacaggttaaacattaaaatctagaacttattttaaacaatttcaacagaattttaactgttgcatgtttccccgcattcttaatgagattcattaaatatgattcaagtttcttgatatctttattattttcattcgctactgtgtgatgttcacatgacatacataaggctctatgaaccagaatttgctttctgaaaatgtcctctatgtcaatcaagtctttgtgtgtattttcccccgtccctctcaaaaattaagtgaagcacagcacatctgtaggctacctgagaggtgcagcgtggttggttttcttcacagttgctaaacgaaaggcctactcttcttcagtgagatttttttactctctagaacagcagtatccatagaaatataatggaagccacgtaatttaaaattttccaaaacattctcattttgacatgtaagcaatataaaattaatgaaatactttacattctttttcttttcagaccacgctttagaaatctggtgcatgttctacacttagagcagacctcagttcagactagccacttttcaggtggccagtgactactacactggacagttgcagctctagaaaatccactcccaaacccctaagtgaactacatactctatcaatttgtagcttctactctatctcatttgtaccattgtttcacaatttggatagcattagagttaataaattttattttagcaactctgctccatgggtagtttctgaaataaaaatacaagcaaaaaaaaaaaaactttcctaataacactggttctacagtataagctctccctcgaatgtctaatagagctttcgtagaagtgagtgttccttgtaggaacggtgagtcgagactggaggtaagaactaagacgttcttaaaccctactacgtgctggaatcctgaagtgcctgccatcattcaaacttaagcactaactctctagagagacactgccattcataccacagaacgagaaggcagtggcgatcctcaacggctacatgtcactgcctggtgagcactcttccctcagaccccattcccagaagctctgcctcgattccccaggggtaggcgagctggctgcccgaattcctaagcgttaccggggagatgtgagggcctccgggggcgggaaacctcaggccaggcgcgcgctggcccgctctacggggtctctcgggagcgctttgcagggcggatgactgacgggccagctacctgccttcctgagcctgcagagataaacagcctatcctccctgtgcacacaggccccgagggcgggcaggtctccaagcgcagcacaactgccccaggcccgacgcagccacctgcccgagggctccctccccaccaggccatccctcagccggtcctcctccgacagcgaacaaggaaccccggaggcgcggaggcgtctcgccgccacccggcggcgcctgccagaggcccttcgcgatgtccgcaagcagagaaagccctgccctcccaagccccggcttcccctaggcccctcgacacttgtagtgtcctcacttgcggcccctgacccggggctgaccggttcgtgactctcctgccaatcagagacagagttcttccggccaaccggccaatcaccgcgcgcgggtgtccgcttcggcttttcggcccttcggctcttcggcttgtcggcgttcgcggttgtttggccatccagtgccttcagcagcgccgctaaagcgcagttctcgttggtgtaactttttcttttttttttcagccacttccggctcctgcgtcgctccggaagcctgcgagttccggaagccttggtaatccagattcggctaggaaaagacaagctttccagagaatgtttcagagaaagttacgtggagcgtgggcgtttcgcagactcctaaggtcagtgtctgccctagagagccggagtgcaaacccgaggtcttgttttcagctgggaggtcgtggagtttcacgaccttgtaattgtcgccgtttgcttttttttccctgtttattggcttcctgtctccctggaaaaggcaaatcaaagctgctgaattttgggaaaggcagtgaagcaaacctaaactcctaaagatgtttttaggatcgcggcattaaaaataaacacacacacagctgcagttgagcccctctgcattccacgtagtaacttaagagacgaacttcgaaatctttttctctcatttggcggtcgtgaagatatttacctcttataaacggctttataaagaattgaggatccaaactttacttaatatctgaaagttcatgtaaagtgttatatgtagtacaaaaaatttgagtgcttagttttctaacactgttgaaagcgcacgtaaatgcagtttggttttcttatggaggaagagataatgaaaagtttctgataaaattgcttgcgataaattagttatatttcacgttgacttttgataagaaatctgaatgtgagaattgttaacattttttcctgggttcttaaattaaaaatcgttgtttgtttatttattgaggtaccattttccaaatttcccacatttagtgaaagggcttttggcaaaatgagcaagctgttgaacgttcaagtctaacacattctgttaaacttccgtgatgcccctcggaaatattttatcttgacgtttcggacaattaaatgatacttgggcgctcacaacaccgcagcttgtagtctaaacaccttcccctaaagtgttacctttacttaatcctgaacagaatgaacttggggtggctcttttaacttatctgatctcacctatattatcaattacttgtttccagaaagatt

SEQ ID NO: 11800 - DNA, 6000 bp, Homo sapiens
attttagggagagtacaagactgagagcagaaaagtctatttgctgaaaaggtgttgagagggcgggactggaggaagatgtataaaggcaagaaatgacagaaatgctttagccactataagtctttcacatatttctaatgttggagatggcacaactcacttcttttggaattgaatttcaaaatcttcctttctcaatgctgaagttttgcttgctggcaggcaactggttggctactaaggaaacacgcagttttctctgatgcctgcttaaaatatgtttataaaaattgtattatattgaagtgataaaggcagaagaattaaaagtgagcttaaggaatctctaccaacattctgagtatctacatcagttttacaggcacacatcttgagtgttgatgtcaggatagaactttaaggaatgtgtaaggtcaggatgacaaaggacaatggaaatgtccattctcaaatctgtaatataaaggcatttctttaaagcactctattttcacttttatagctactgtctcttgccaccataatttctttctcccggtagaaagatatgaaaatgtcaagtccttaagccttgacttttcctctacagtatagtgtgaggctgcagagctacattagtaggttttgccctgatctcccttgaaagccttttctacacgattctcctgtcctcagaggagccctaaagtcactcttaagtcttctgatggagaaggaaagtactctcttaaaaactacagttcatcatggtttacattaaaatgataaaatagacactaagagatgtctagtttcagattttaactctaggagagattttgtaaagcccaccactaatagctagcatattcggaacctaatatgtgcttgaagctcttgttactgtgtattaggtaatcaaagatggcagtcacgtgattacagctgatggatggagatgctgggagtgggggccagacagcctgtgaggttcgcactgtgcagcatggcctctcccccagctgctctctccttttattagtgggcaatttggttgggagggaggaaaaagtaactcttagagattgaaattgagggtatattttgtagtagttctttaaagcatctatcatgggttttaaggaatttataatctatttcttaacctctgatccctctttcctatagacaaagtcacacgtggaatcctcagcactttaagttcaggtaagctgtgagttgccagcagagtcttgattgcttgctctctaatcttgctcacaggccattgcccagtcttatctcagaagctgctgatactcagtctccaccagcctttgctcctcagcaaccaaaggccacttcctgccttccttcttccatccctaaattccatcctgtcccagcccccgaccccattcctgccttagcccaacatccctacccatcacctatttcttctcaggttcagggttataattaacactctattagctttttttgttgttaatagagacttaaaaaacattatggagctagcctgaaaatcctgattatttattatattgactgctctaaattgtaagtgagataacttagacatgaacatttacaatgcaggcacgtcgtaagtttcctgcattagggcaagaattgggctttctaatacttttctaaagtttctcgggaaagaagacaggaccctaatctcccccaatcccatctacaccagggattcagtgatggtttccagtgaagttatcagctgctgcatgtgttcaaacaaggcaaactttgtaataagccatgtccacaaatcaagcacaacttgtattaatttttatggcaagcttatttttcaccaagtggcatctaattccttcctcccaactgtctcactcttgctagtcaccttggactccccacagttctcttatctggactgtgtctatgaagtaagtgaagattttcatgtcaaagaatccctttgagtgaaatggatgaagaaatgtaattaataaaggtggagaatttttgagcctaagctttccagctcagttggtaagcctgtgatttttagcagaaagactttaataaaaatctatcctaggtacagtttctgcatgagggaagaatagtttcagtggagtcattagtgtctatataattgaatatctcactactaggacttttagaggcattgaaggaaggaattctcagccaaagagtaggccttgctgacccataaggaatacagacctcagagaaaaagatgtagctgcgatttctgccagacaatcaatagcagctgatgtgaaataaattctaaatacagacacagtcaatatcaagacacagtcaatattaaagcacagtcaatatagtatcaagacaatattatatatttcatgtatttaatgccaataacaatggttcaaaattcaatagcagtaggacacaccaattaatagtaactttttatttaattaaatcttggatctcttgaaatcaatatacaaatgaattatgtaaatattttgattgaaatgtcgggcacctaagaaaacaatgacaactttgggttcttctaaaggtcccaacatgactattctgctaccttcatatttaaaatatatatatatttcttattaaaaactgaagtaagttttacaacctgtgatgtaccagctccttcaaagaattcttttttcttaggaattaatttcataatcacaccgaagaatggctgtaatggaagagttagataagaagtaaagataaaggcaggtagaccacagttggcagtgtagcattcccagtcaaacctctggattagaagactgtatataactatcacatacttgcttccaaaacattactcagaccgagagtatagcccatagcatctaccacaagcacaagaattgatcctgacacttttggttctctatctaggagtggctttgaaatacatttgagttccaatttactgatggcaaatcctgatatgaaaaatttggaaatgaaaaacaatcctcagcatgttacttggtgaaaagagagcagaggaaaaggacagaggctagagattggctcctgcctgcattcgtgaatttgtctaaatcacttagcttctgagcctgggtaaaatgaggatggtaattacacttgtcaccagataacgtgaatattgcccttcaaactcctcaatgaagcctgcactgtggaactgcaatgtcctaggaccgggttgctcttagaacattttgttctaagtgtatcctaacaagtgtagcaaaactggaagacacaaaatgtatttcctccccacaagaatgaaagccttcctaactccaaatttaggcacagcctgtaaaagatgtgactagtaaacacagaaaccatttgctttataaggtctaaattgtcctcttctccagagttgtagaagccaagtccaacacggagatccctacttttattcaagttccaccattagtcaactcatgtccaggatgtcttctttaatatataaaatggggatacttttttatattattattcaacttaagagaccactgtgaaatttcagtgaggtaacgtatgtgaaatgttatactccataagttcttaaacacctgagtttcataccatgctctgaagcaagaggccaagtctggttcctgggtccgcttccccaatgggcttttccaagctgtaggctgagtctaaactgtttcctcccacatacccttccctctgcgacacactaacaacatcccttactccatcactgtcttccttaccctctcctgatgagccttcttccccagccacctttaagctcccattaatgatatgtgtaacgagtgttcaatagagtgtgtgtgtgtatatttaatgccatttatatgttttttcttgctaagtaatgcatcataattttagaaaattgggactagtcagataaagcacccgttggtttagaatccctgactcaaagtcagatgtcctgagttctagacttggtttgtctccttgtaagtgcaaaagtttattcccaattccaggttgctagtgtaaacttgaagtttggcccaaacaaaacccctatcagatttatttagagtgttgatgccaaatggaattctagaagcccacctttgccaggggctgagccagaaccactatcactgggggtacggcctgggcatttgttctgcgttttttataagcccctcgggtgactgtcagacaggccaactgtttcagaagctctgctccaggctctagatcacacgttaagtagcaaggatgggggtctggacctccagtattggcatcctccgagagcttgttagaaaggatgtctccctcattatcccaggcctactgaatctgaatcttgcatctcatcacaatccgcaggagattctgtcacacactgagggtttgagaagcactgctgtaccttggtatctttagatacctactgatacctgggtgggccccacccagacattgtcctgtacttgttctgggatgcgtccggggcaaagggttcttacaagctccccaagttattttaatgcacagccacaatagaagatcactgtcccccaaatggcaaccctttacggttaagctgtaacctgaattaaattggcttttgtgggctccccagggaccttaaggaccgcttaaacggtgctgtttaaaggacaatgggctcctgggacaagttcaaccacagagctttgggttcataaaatcagggcagggaagacttcctgcatcctcccgcgagcaagccaggccccgcgccggtcctcacccgtgtgcacccccagcccggccccgcccggctcgccccctcccgccccgcggcccgcccctcctcccccgtgacgtgccgctgcggccaggatcatgcgcactcgcgccccgctccccgcgcggctgctccgcctcggcgcctgtcattctccgcggcgcggcggcgagtgctggctgcggtaccctcccgctcgcttgtccgtctgcgcgcccgcgatgtgaccagccgactgggggcgggctggcggctctgcctgcggcagcgcatcggtttttctcctggcaggtccctaattgagccgtgattcccttggagccagagacacccaccaggggctcggagcgccgcgctccggggctggaggcagctgcagcgctcgggtccgcgcggccgggtgcagtagcctcagtcccagccgccgcctcgctgagtcgtgtgccctggcgaatgcccggcgcccggcacagctgagccaaggcgactggtgcagagcggcggcgcctggtcctgcacttgccgctgctgccgggctgtgccggggcggcggcgctgcgcgccggagtttgcagaggctgcctccgagcgccgtccgccaggaagactccctgcctcctgagtcccagtaagttgactgtagtttctgaagttggagggagccgtgggaaggagaggttcgtttttatcttcttgtgggaagccgagggtggcacctcttgttaacagagttccagctcgaggagggagtgcggggtgccaagaaggggacaaggcagctggaaggtctggagtccagggctggctgacctcagcatctcacgaatgtgccagttggaaatatgctgggagaggacaggtactcctagggcatttcgactgctgcgtgctaattattcattccaagctccttgactctgtgtttacgttggggtgaaggggctgggcagggtcttgtcacctccatcctaattcctctggggagtgtggccagcactgcgatggatctttgggcgagccatttctttcaggcctgcaggcttcccgcgcatcccgctttactcttcccctaggcagaagttgccaaccttttcataattggagcctagtcctttagggaaaaaacaacttatatgtcgacccggtgttttatgccctaaggcaaa

SEQ ID NO: 11801 - DNA, 6000 bp, Homo sapiens
atcagaccgactgcatcattatctcagacattcctgcagaaatgggttctacatggtggggtaattaatctcaattcagaataggctttgctgaagaatatttactggaggataaagcaatgattccttaagctagtgtttctcagaagggcctatgtaatcacctgcatcagaaatccagagtgccagccaggcatggtggctcacatctgtaataccagcactttgggagaccgaggcaggagaatcacttgagctcaggagttcaagagcagcctgagcaacatagaacctatctctacaaaaaattttaaaattagctggtgtggtggcacttgcctgtagtcctagctactttggaggctgaggcaggaggattacttacgcccaggaagtcgaggctgcagtgagccatgattacatgctgcagtctagcttgggcaacagagcaagggacccagggacataccctgaaccaggatttcatagtgtaagccccagttttagtgaacttcagtttggaaagacctggaaggcatttgtccaatgtacaactgatgatgtgaatacttactagccatcccattcatgagattctccagccacttcatggcatgcgtagctggagccagattgagggccccgcctgctgggcagttgcttggagccagcatctatagatgaagttaaaaatcttcctggaataaacaaagtacaaagtgggtccacttctgtcagagtagatagtggggaagaaaatctttactaacctcaaactatcttccttaaatatttttcagaatatcgcaaggtggctgtcagctaagatttttaaacagcattatgtatgattcagtgtttcttacttagaactagtgattcattttgttatctaagttttaaatcttgtgataattctctcaagtgttctggtttggaaaactgccaaaaaaaaaaaactcaacaacagagaagcctccaaacaaaaaccccaaacccaaactcagaagtaagtataggccaggcgcagtgccttacacttgtattcccagcattttaagaggctgaggtgggcagatcttagaccccaggagttggagtccagcctggatggatgaaaccccatctctacaaaaaaaatgggatatggtggtgtgtgcctgtagtcccagctacttgggaggcttaggtgggaggatggcttgagcctgaagggccaaggctgcggtgagccgagatcgcaccactgcactccagcctgtcagcctgtgacagagcgagaccctgtctccaaaaaagtaagagctacatggaagtaagacctgttttgcttaaatttatcagaaaatggactctgtcctggccagcaaaagtagttaagaaagattctgcttcagcctaaaacaatgactagcagaaaattagtttcacttcattccactaaataaatgtggaacaaaaactgtgaactctaggtttcagggggttcaaaattatttgcttttctgggttcctattggccttggttgagcctgcaggtaatcatgactatttagaattattgaattaaataactgaatggagttgagtcctaagaagtacttattgagtactaattgaagacaaagtttctgccatcatcaagttaacagagcaagacagatattaagtaattaaaatattattttacacttctgttaggtgagggttgtgtgttgatggactcatgataaaatattctgaatgtgtagtatgtaacacataaagaacataaaatgcaagtacttgaaaaattgagaaatttaccactcatagatttcattttgagttttaaagaataaaaataggccaggagcagtggctcatgcctgtaatcccagcactttgggaggccaaggcaggcagatcacctgaggtcaggagctcaagaccagactggccaacatggttaaaccccgtctctactaaaaatataaaaaattagccgggtgtggtggtgggcacctgtaatcccagctacatgggaggctgaggcaggagaatcacttgaaactgggaggcggaggttgcagtgagctgagattgtgccattgcactccagccttggggacatcaagactccatctcaaaaaataaataaaataaaataaaaaagaatataaatattagaaatgtaacatgctttgacttttaggaataattccaagttttcataacttttttgtctgggaggctatctagactttcttacaaatgtccataaattaattacttatttatggacatttgtattttctagggataatattggaggaatgcttaaaacattatagacaaaagcgttgaaatgttttcaccaccatgaagctgtgagttgaaagcattagcccaagtcctttcacttgttcagttttgttttcttttttttttttttttttgagatgcagtcttgctctgtcggctaggctggagtgcagtggtgcaatctcggctcaatgcaacctccacctcccaggttcaaatgattctcctgagtcagcctcctgagtagctgggattacaggcacctgccaccacacctggctaatttttgcatttttagtagagatgaggtttcaccatgttggacaggctggtctcaaactcctgacctcaggtaatctgcctgcctcagcctcccaaagtgctgggattacaggtgtgagccactgcgcctggccttcagttgttttcatcctataaatcatacctcctttgctttggaaaattaaatcagtaatatttatcaattacattttccttattcctattattagcaagtctattgaaccagcaatgtctcacttttcatgaaaatgagttcctaaaatgcagtggtggctacctgaaacgtgcacattcttaacatttggatttaatctggaaggatgtctaaaccatgtaaggaatatatgaacagctctcagaatcttgttaacctggtatcccacagtacagaaatagcttctgtaattcagaaatgcaataatcacctgttaatttctctgatgggtggtttaggcattttcagtgtttaattaacctaattctttgagctggaagctgggggctagagatagcaagtgatgtacagaggaaccccatttcggaacttggccatcttccaacaggaatgggctcatgcagggatttctgcccttggacttttttttttttttttttttttttttttactcgcataaagctggaaggaaaaaaatctggcagagtctatagctgtagtgaataggatgggatttgaatcagaacagggttgcagtcccgattctgtagtcaaaggctgtgtgacttagacaagaaataaaacctctctgtgtccccattttctgtctataaactggaatctactttgcagacatgctaaatgagaaaacagaattttaattgatataccaacatgtcacgatcattgttattgttgctgaaaaacaatgactataaatgatacatatgcactttatttttgaaaaaaaaaaactcataaatttaaaagcactttattattttaaaattttcaaagaagacccaaacttctttatgaacaatgctgtgtgatgagatgcttgcccttgattccaggaactgaaacatgtggcaagtggaagcgatttgattttgtagaacaagcacactttattcagctaatgggagggcagaggtgtgaagaatgtgagaagtgcttagcctcaataacctcattcttctaaatgagtgatgctggctgtgggacaaagcaagaagggcctttgctgaacccaccagtccaccaaggatgttaacagctggcatgcaactagatggtttcacttgcagggtcctcaggataaatgaggtctattcccacagtggcttagagcactcatgaaaccttctcatgaaatctggaaaggagggagcccttctagagagtgggctgggctctcttgctttccctctgtcagatgcacacctggagaggaatggaaaacacaacctcagctcaggagaagccaagaaatgaacatgagaaggtccacagaaacagggccaagtgtaacacaccagacacagacatgacattgatgctcaccttcagtgtggattcccagagtgaccaaagtgtggaaatcaggaattggtctaaaagaagccttgacttgagaaatctgggggcattggcttttattggttaatcaaaaacctcattttgattggggaaaaataagttgttcctaggtaaatccattccctgaattgtgggggggaaaaaaggacttggtttgtgtttgggggaaatttgctatcggttgtttcttgcagactttggaagggacccttggatttcaaaagcaggcacagccatattgtgtctttcctcatgtcttctgagtcatttatgatatctcatgtggctggttatcaatgaactgtgtcattgctcagacatggcgcccctgctccgtcttttgtgtttgagatggaatctacataaatatttgctgatcaagtctcctgtgctaagtgttgggggtacaaaatatggaaagtctttgatgtcatgaacctcacactctagagatagttggatacacaaaaacttttccactctaacttcttgtcttttcattgactcatctacattgaaaaatgtagcaacctgttttgagatggattagatgtaagttaaacttcttttgatacaaagtcatttctttcctggagtaaaagtaatgacactttttatgatacccagtggctctcgaagagcaataaaaaatgttaatggttaatgtttgactgaagctgaagggagaggctgggaggcaaagcagggaagagggagtgttcccgggggagatactccagtcgtagcaagagtctcgaccactgaatggaagaaaaggacttttaaccaccattttgtgacttacagaaaggtaagggctgacatgtcttaactgtgtcagtaacgtatttattccagaaggacaaagtagatggagggggagggcacttaaaaagttgcttgacaaatttgttccttgaggtgggctatgcagatgcggagaagggaaatttgttgctggcatgacaagttttgcttatggagcacaatttttttttgtagtttcttttcattggtccatattttataaattcatttgatgaagtggctgcagtgaaatcaagcttggcagtggaattaaaggggaaattgagttctctgatgtttaaacaagtatcacatccattctttgtgatgagtatataaaagtccctggtcttaagatgctctagggctcttgtattctagaaattggggttggaatcacattctcaaaaagcatgtcattctatctacttctcagagaatgagattcaatttgggattcttagaattgtctaggacacagcaagggagggaacatgcagagaagaagaaaagtctttttgtaaaagtactagaataagaattgaagacagacagacctgccttcacaagtgagagaagaggctgatgtgcgtgttaatcagcttcctgggctgcttttggccttggtggtggagttaccacctgctaatgtgtggttatttttatgttaagccacacacagcttattggtatcttcaatggtccgatatttgcctctgtcttggtcttttatgacaggtgactttatagggacagatgccctctgtggtaggggatgccaagcagcagattggaaggacagtgccttctctaatattttcttgtctttatttttcttcaaaagcttaaatagcaaatgaggcattatttgaaagaagaagaaaaaacacatgtttagatgaaaggaagatgaatgctattcagctctcaccaggaaacaaagcgagtcctttactgagagagggtttctagtgagttacggggccatatgagtcttcagggttggccaaatgggttaggccagtttc

SEQ ID NO: 11802 - DNA, 6000 bp, Homo sapiens
tgttgtttaatgaatgaatgtggatggatggagggagcctgggaagaaaacatttgctttctttaggaggctcctcccagcctactaagatacattctgcacttactctgcaagcttttagaaggaagggctctagctatctctgccactggcactctccaggcctgcagcaggctgggccaatggagggaaggaggggtgatagctaagaattttttcaatggaaaattcaatctgctcagcaggagtctgatgagaagctgggggctggtctggggaggatgcagctggaggggctgtccatctggatctcacaggcctctggatgctgacacgttattcttagccatcttttcttctgtctttattttcttgtaatcaggcctctcttgaatttgcgattgaaggcttttttatcccccttctctaaagcaatgattttccatatagtaattctttccttctttagacttcccaaagttggtgggtggttctttttgtgctcagacactttgcaaattgcttcccacccagctcctcccctgaatgtttttgtggctggtggagacctatgatgtgtgctgggtatttggcctccatcttcttgtttacaacaacctccttgctaatgatattttcctagtaacatctaatatgagcatatttctcgcccatcctccctccaccccatgtgtcttgaattctgctggattaatttagctggagccttaagaggcagcaaaaccgagggcaggtggctaagcttcaatccttggctcctgcgtcataatcataatcactcttattgacatagtgctccgtggttaacaagcacttccacattccatagctctttagtcctcagaacagcagaagccaaggcctctggggcttggtgacatccccagcatcacatgcataagaggaaaggcctggatttgaacctccttttctgatgttaaatcccctaccatttctttcagcccaggcaaagatcccaaagtcaaatgcctttaggggccaggtagatagtataaatgaaactgcttggagtagaatatattaaggattagtaaggattgtgggaaactggccggcatgctttgcctaaaggcattaaaatgcaaaacagagcccagcacctatagtcccagtaactcaggaggctgaagctggaggatcacttgagcctgggagtggtgaggccagcctgggcaacatagcaagattctgtctctcaaaaaacatacaaaaagaaagaaagaaagaaaaaaagaaacatttaaaaaataataggaaaaaacccatttaatttatttcttactcagtgtttagtctataatctacctccttgttgggaaagggagaacgtttgcatggtgtcccctttaccactgagtagcatttacttgatggcttgggcaagcatgaccttggttgtagtaagtctatagtatagatgattctgttgcttttagattctgttgcttttggaatagaattacagcttttagaatagtataatggacccaggcatgtacagatcctgagcctacccatcatctctcctctcttagagttttcaagacatggtattcaaagtaatattatcttaatgtctgtgcaagtcccagatgcccttatttacaaccctggtcaaaggtcctattctttccctacgtctttccttcctttctcatcctatttgaaatcatgggaactggttgctcaagtctacatgctaagtgacagtgacagtggcagagtagtaggcagagtccccaaacagaccccaacttcaccttctgccctagggcagggatgtggagaaaagagagaggaaaggatggctcatgcctttaagtagagtaactcggcccactaggaacaggtggcccagtgaaggtcatgggctttggccaatcagacaaaaacttctcctttgagggttttaggaaggtggtaggccaaggtggggctagtatgggaatgaggactgacgtatatcccctactctaaatagaacagcagttaagactgtggccccagagagtacacatctgccacctaaccaccctgtgaccctgggctggttatttaaccctcattcctcagcacctttccccatagaatatgggtaactgtaggggtgatgcggattagctgagataggcatgcattttggtaagtaaatgtgagttatttttgttgctttgaattctgcctctttgctatactcttgagctactcattgtagctagaaactgaggaagccttcaaatgctggcagaaagaatatggagagaataattcatagaacaaaagacaactttctgccaatttttcctcttcaaaacttgccacttacccaaatgccctgattctaccttttctctccagctccacaccctcaagatgatcccagtgagctggaatcctggtcgagggatctgagacttggctagatgagatttggcgctcagatgtgctttttgtgaagtataactatgatttttctctaaataattactcaaacttaacttttagtcaagactcttcttaagtagtgttcttgtttgtgttcatgtggcttcttgtgagacagacaatttaaaaaatttaaaaattgttctattatccaaacacaacattgctgtgtgccccttccctttccccagtccctggagttcattttcttttgtatgtttcacatataccaatgacaaatagttcatagtagatattgcctaggtatggaattagttttttttttgtttgttttgtttgtttgttttgagatggagtcttgctgtgtcgcccaggctggagtgcaatggcacgatctcggctcactgcaacctctgcctcccaggttcaagcgattctcccgcctcagcctcctgagtagctgggattacaggcatccaccaccatgcccggctatttttttgtatttttagtagagacagggtttcattacgttggccaggctggtcttgaactcctgacctcgtgatccacccacctcagcctcccaaagtgctaggattacaggcgtgagccactgtgcctggccagaattaggtttttataaatgtgaagtattagattcttatcaatcggcaaaagtagaactgaggaactatatcatatgcttataaactgatttcttcttagtttttactcctatgatgtttctgttgagaccagttgacagagtaggagtgtcagtatggaaaaagcatggatcattttgaaacatggattattcatcaattacatgtgttttagaatggagtcagtgatatactcttggagatgatctcccccaccccccatctcctctccttttcctttccccacatctgtagccacttcctgtcagcgaaacccagaagaaaaacttgacagaagcaaagggcatccagagaattatgatccccaggttgtagttccagttctgtcatgtcctaagcggtcatctcctctctgggtctcaggtttcttatgtataagataagtaggagattggggccacaacacctgagactaaaggaattctaagttttcattactctatggattccacctttgctagcttgggacctggcaggtctcagcagctggtcatgtagctaattctcaaagcagataaatgcctgcaggataactgtgaattgactctaatcacagcagagtccagctgcttcaatagatgctggtgcctttggctgcttcccggagccaccagccaacccagagttgaagctggctggaaaagcagatatgttggagaggccagcatcatctctaaacacagcatctgggaaatacccatgtccccagaaagaggtcattgaaatccttcacttggtggtgcagtgcagagactcaggaaaaccaggctttgagtcctgaccctgccacttataccagcggtgtgaccttgggcaaattctctggccctatgttatcttcctcctccatacaatgagggtagaaatagagccaccttgcagaagtatagtaaggattaaggtcccaggaggcctaacagtacctactaagcagaggtcctcagaggtacttaataaatggtagtagtagttattatcctgtgccctttgttcacaggagtctcttacaggggtgttggtctcagtgctcctccccatggccaggctgtattggctcatgcccaaggcgtagccttgccagggagcctggtacagagatgctgctgattgggatgctgattaaattccctgattgaggagcctcagcattctggcccagagcaggagggccagcaatatttagcacaatctgcttggatcctcaattaaattgtttttccaaactgcccttttcaaggtcttgtcctctttcctcacctctttctggccccttctctctgggtccttgccagagaagggaaacaaagccttgtggggctccatctgcttccccctatccagaagaaggtgacaaggctgtcttcgttgcagaagatgtggttaaaacaagccttggctattcaaggtggctgcagtctcatcctggaggctaaagtctctgcgcattccaggttgatctctgttttcttggcaaaactgagttctcaactcaaacctgcctctcccttccatcctttatcccgacagctcgcaagtgctttgctgggaaggacgattaagtgtcacttagtgtatttttccattttcctgtgttcatctggtaaaaagaaaataaaacaaaataaaggaggcccaggattgaactgtcattattttttaaatggagagagaaggggtcacatgactgcgagtaactgatttagccaagtggctgcaactccgagtttgctgcagagccgccccctcccggcgggggcgctgacgtcacggaaaagccccgcggcgggtcggctgggctggttataaaccgcccggccgcggcggctgcaggcggcgggcaaggacggcgggcacagcgcagcactccccgctcgttggcccgggtatcccagcgcggacccacgcgatacgctgacgccccgacgccgatccggccgagccaagtaagggggacggcccgagacggagaagggagagagtgggagtttcccagcccgcagaactttcgaagttgagaaaagaacccctggaacgtgcgctcagcactgggattttctggtaggggtcagagcttcaagtgcaaaggatgtcgcttctcatcagcaggttccttagttcaattcggtagaagggtcacctccctctacagatcgagtggtcagagagggcagcccttaatgatgctttatgtatttgttgtttgaatgtaagtctgccaactgaggtgctgcttttgagactaaaaaaccggctggtcgtcctggttagtggcgagatgttggggtacggagtgtgggggtgagggtgggagaggagtgtttgtgcatcttgctgattgcaacgtaagtacttatactttatcaccagtagccggaaaaacagacctcccggctaggggaggcagtctgcaaagggaaagttgtagagaagttgttgaatatcatttaggggagtcttcagccttctgatttgcttcaagaaggggatctgagaatggtggctcaggcctgtgatctcagcactttcggaagccgaggcaggaggatcacttgaccccaggagttcgagaccagcctgggcaacatagtgaggccactgtctctaccaaaaaataaaaataaaaataaaaaaactagtggacgtggtagtgcaggtctgtagtcccagctacttgggaggctgaagtggaggatctcttgagcctggcagttggaggctagctacagtgagctatgatcgtgccactgcactccagcctgggtgacagagcaagaccctgactcaaaaaaggaatctgagttgaattaaagaactcttgagaatggatgtggttttttaagaatgaggcactttctctgcaaat

SEQ ID NO: 11803 - DNA, 6000 bp, Homo sapiens
ttccctagttgctctcccagaggtcagattcatttcattttgattctagttaaggggaggagtgcaaattttaaaaaagggagagagagaggtgttacagattatgaaatcttatacatttttatataataacatcttaatctctaacattggttctcaaacttggtagatatcagaatcatctagagggcttgttaagacagatttctgggttctgctctcaaagttgctgattaagtagttttggggtgaggcttgaggatttgcctttttttttttttttgagatggagtcttactctgttgcccaggctggagtgcagtggcgcgatctcggctcactgcaacctccgtctcctgggttcaaccaattctcctgcctcagcctcctgagtagctgggattacaggcatgcgccaccacgcccagctaatttttgtatgtttagtagagacagggttttgccatgttggccaggcttgtcttgaattcctgacctcagatgatccgcctgcctcagcctcactaaaggcgtgagccaccacgcccggccgaagatttgcttttttaacacattctcctctgtctctggagcactcaatcttctttgcacacagtatagccctgaattattttattattgttttgtatgttgattttgaatccctttttctagtttcttcacagaaaatataggatttaaatcctctggcatttatcctacttactgaacacatggtcagtacttggtattggttaacctattaaaatttttgccaagtaaactttttaatatttcatcctcccgtgtgcagtgttttttaaaaacttttttttcttttctaggtatttaatacaaggctgtttaaggtcaaagaaagacacttgtttcttacctatttaggaagagcacagtatgatccagcaaaacctaactacatctctttggacaaactagtatctattcctgatgaaatattttgtgaagagattgccaaagcatcagtacaggactttgaaaaattcttaaaaacgctttagatttttatgtatgttaaaatgcagtattgtaaagtgaatatatatatgaataaatgaatatatttttaaatgcctcgggtctcaactgatattggaaaccatttgatactgtaaatttgggtacatatactgtggtagaactttcatcaagttcctagtgacttaattcttgtttgactttttccttccttcttaggaaatacagcaagctcagagaaggggaaagagttggtttactttaagttggtgctttgtcattctcgtgaagatgaaaacagtggaggatttttaaagtggtttcattataaaatggctttatttcctttgaactgttacgagtttccagagcatactacattagtcatctaatatctactgctcagataatgctacaaaacacacttcattttggattatctacattgttaacttcttgaacacagatattcacagttggctaagaataaggaaaaggaaagtggagtttaaagattaggggcaatgagatatagtgaaaggcttaactagcctttgacttattaccagtaaacaaatatttgttttccatttacaacatgtgttatcctgggcaagtgatttcatttctgagcctttgcttttttatttgtaaaacgaagcatcatgacttcagttgtctgccttatgatcaccagattgggtagactgttaacactgggggcccccatgaaccatacctggtatttgcactcttgtgtagttagtcctctcccacactgactctgggccgatgtgatttggcccagaggacatttgtcaagcagaggcttaaggatttgcacatcagggcttgccctcttggaacatttgctcttggcaccctaagctactgtgtagagaggtctggttactctgctggagaaactaggtggacagaaagatgtctggccaaacccagctttttcagacatgccaactgagcaccagacatgcatgaagaaattatctgggatgtcccagacttagtagatactacactaagcagaacgacccagcggaattcagaattgggagaaagtgttttaagccgctaactttgggggtagtttgttgtgcacagggttctgtggtgtgctggatgccctttaaaaaacctcatgaaaaactaaatttgtaattggtcagggccaggtatagtggccttcctgttacatattttattcatgcaaccgacatttgagttctataatacagtggtgagtgtggcatagatatgtgctttcatggagttctccaatggatgagatcaataaacaggaaacaataaaaaataagctggggacaccatggaaccatcctgtcctctctttctgtggctcacaacctcattttgcctttatgaataacccagtgaacaaccttagcagtcagaataggcaagttgtgttgatacaatgaacaatcctaaaacctcaaatgattgaaaaaccacaaaagtttttatcttatacatgtttcttaggaccacaaaggctctgctccacatcatcttcagtgatacaggttgatgtatcctgtctccatcatttctggagtgttgccagtctatggaaaaggaaaggaatgtgaagaattgctcttaaaaagttatcacatttttcttggccaaagtatcacatggccatgcctaactttaatagggcagagaggcaatccctaatcctgtgctgggaggaaagaaaaccaaaaatagtttttgaatcaacaatcactaccagcaaacattcagtctctctagcttaattccttaggagctggattttgtgacaattttgggtttcagatcttttgatatgtcttttcttgccaccttcacctgtaaccagcaagctaaaacttaaagggtggaagggaggagagtttattgagtacctaccctctgcagggcaatgtgccaatgtacaaatgtactgcatttcttcacatctttcagacttcactttggctagtgtaagatagatcattcatcagctttagtgctgtatacaggactgactaatgaagaaattgtgacagcatggagatagaagaaaaaggaaaatcaatataattttagaactggaatgtgactaagatcgttaaatctaaccttttgaacttaggatgagacaaggttctactctatattgtcccagctctgagcttaaaactgaggggaaaaaaaagatatcactgagtaatggtagaagttcaccagtaactatcagtcatgctagctccccctaattgttttctgtctctagatgtttatgcctaagacttcgcatgttggggttgagaccttaaaagtgagaaaatctatatacttctcttttgtcttaaaattgtgtgcaaattctgcaatacatcttagatttaatctttaaaaaccttttctgctgggcatgatggctcacgcgggtaacccagcattttgggaggctgacgtgggtggatcacttgaggtcaagagtttgataccagcctggccaacacggtgaaaccccgtctctactaaaaatacaaaaattagcgggcatggtagtgtgtacacctgtagtcccagctactcaggaggctgaggcacgagtcatttgaacccaggaggcagaggttgcagtgagccgagattgtgccattcagcctgggtgacagaggctgaacaacaaaaaaaagggtgaaaaaaaacaaacaaaaaaaacccaaaaccttttctgacctaaccttccactaaaatagctagatatagatcttcagctggagaaacccaaggcctgaaaggcttggtgtctttcctggattagtagtgtagcagtatagcatatgaccctagaattaaggagccccaaatttgcatctggattttcagattctggaagaagaacctggactcttctagtcatgtgctcttggacaagttattcaacctttctgagcctcagctttctcctctctacaatgagataattacagtacttttagaattaaaagatagtttaggggagtgagagatcacctccaaccctccctcccctttgctcttatgtgggctctttggttgaatctaggaaccaaattgacacatggcagattaacaagagaaaagcatactaattttactagttttacatgtacatggggatccgcacaaaagagtgaagtggccaatgtaagatgcctttatactttttacacgaactacaaatcagaagaaaggggatctggctaggggcagtaaatttctcgcggagtcattaggagaaaagtgtgtgtgttggggtgtaaacttagtggaagataacggttacttcggaaagtatattcaggtccaaagcagcccccagtttcgtctctggtgataggtgctattttctccctctggtaagggacgggtactccagaggaatcctggaggaagctttatggcttgctgcatgcaggaagagataggtcatcaaaccttttctgaaactacaatttctccaatattttcaactcgaaataatcaatgtaccaattccatatatttttgggatggcacatccatcagtccttcaatagaaagtaagacgatgcccttaaaacatttagcttcctgcctggcacaaagagctgaattaatactgtccacgctcccatagctattaacagcaaataacagaacccagctttaagccttggtctcctaattcctgacctgtgttcttcccatcacatcacaaccaatacttcttagaatgtagcacgcaaaatgccccgcctactccattggcctcaccctggccgagaggtgcttacgcaggtgctgaacggcagtcgtcagaactgcgcctgcgcaagcggcctttctctgttcgcgatgtgacgtaacgcgcctgcggactgggcccagcttgtcctctatgacttacccagaaggcaacgcttctctttctggtcaaaatggctggtaagcaggccggtaagtaactgggggtcttcttggccggcatcgtcgcgcttcaccgtttatttttgctgcagcttgctccgttttctctcttctttgtaagtggccaagtttgtcgcggaagggaaattggctgcttcagtccagtgaaaaggatgtgcttccccactcgtttgctgtccccagggcgggcttgcctgtatagggttgggatgttaacccgctgtttgtgaaggtgcccgcggtggctctgacagccctggagttccagctgcccgtgcttggaagtccttccccttggccttagaaaagttaaagggcacaagaggataactagtggatgactttcaacccgaatgagctcagtgctttctatgacccaagtgctctatcgtgtgcattggccctataaattttcttgccattgcgacgagggagatattaatttcccttttacgctgataagataactgaggcaaagtgacccaaggaagtagaattggaaatatcattgcacccctcgcgcttctcaaactgcgaatcagagacagttgagcaagggatacgagcgacgcttcaggttgaccttggattatctagagcgtcagcttgatcagtaggtttggagaaatttgaatttattgtaggttctttttttcttttttctttctttttttttttttttgctaatctctgccctctggcggtacaagttggagtagccgttttgtttgtttgtttgttttgtctttgagacggagtcttgctttgtcgcccaggctggagtgcaatggcacaatctcgtctcactgcaatgcaaccaagttggagtagcttaaaaaatgttgatccttttctccccgcccccagcaattgtgaagctgttaggaaacatcaggttgccagaaacatccgttaacctaattgacattgagctttttgggggtgggggagactttttaaataattattttattaatttggcagatattg

SEQ ID NO: 11804 - DNA, 6000 bp, Homo sapiens
gagaaatgaatcaggtttcctctgaactgtccctgttgtttgtcataagctgcagtgaaaactctatatatgggacactgctaccgctgatgagcttggaacactcctccaggtgccttcttaaaccacatccggtcttcctgtgcctcccaagccccatgccaaacagcatcagtgacagtgaaggatctctctggtagaggctgccgtttttggaggcatgtagagccagcaaacctcacctcacctggaactatgttaaatgtcatcagtctttaagagcaggggatcatttgcagatcatcactcacagcattttcttagtcaataacaacatcacagaagaaaccacagtattgttttattagcccttatgagttcccttggatccttatttacatgttggatatagtcaggtcaaataaagtaccccagactcaagccttgtgatggtccatatcctcaactgaattcttagaatataattctaggggaaagaatatgcctccttttttcctgtccactttcagataagtttccctgttgaatctggctggtgatttcttatttattaatcagtgggaaggcagaataggaagtctagttacattattgggctgcatctctgaaatcctagattttcttggtaataatgaatagtaaagagaaaaatgcctctctctctctctctctctttctctatctctccattagagacagggtcttactctgtcacccaggctagagtgcagtgtagctcactaactgcagtcttgaactcctgggatcaagtgatcctcctgcctcagcctcctgagtagttgagactacaggcatgagccaccacaccaggctaattaaaaaaaaaaaaagttttggttttttttttatagggatgggggtctcactatattgcccaggctggccttgaactcctggcttcaagttatcctcccaccttggcctccaaagtgctgggattacaggtgtgagccaccatgcccagcctgttgtctctgaactctaggatctaactctgactcaacactctcattatttgttaaatttgaaagtggaaataaattatatgtaagagtcagtagatctacctctgaggtttgtcaaatattgcagctgctgctattttacctcagatagagcttgtttctgttgttgctttttaacttctgagcccctcacattttcttaatccataaaattatttctggcccttcccactgatactgtattagtgatataccttatggtcaaaaggattgaaagttttccactcttccgagtgactactgcctaatttgtttcagggtccatttcattccttttagctcttggcattgtaatttgcctttctaggtgttgtatacactttccacaataggaaaggctgcagcacaggtgagaggtcaggttttctcaaaagcatgttcagagcaggatagtgatggaggagccagcatgttcctgggtgtgctgcggtaggcagcctaggcaaacctacccccaaaagtctgaggaagctgaaaggctgaaaaagaggctgataaatctgcctaagggaaagattaatggtcaagggtcttttgtcctaaggacaggattcacagttaacaaggaacagtggtgagcaggtctatgcaaacttgcccccaaaggctgaagagagagactgacaaatccagtttctcaggaagaaacatttaaaagggacttaggaacagaaacaatctctctgttggctgagggatggtagatccccgcatctgtgctccagaaaatatcctctatatagcaagcttttttggtaaaacatgcagctggtcatgcctcagactttctagcaaaacttgtgaccactggggaggttagataaacatctttatgagggtttatccatgccatggaaacaccttggtatgcagtagtcaaacatcggtcatcatggcagtttttcttcaagacggcatcactcttgccatgcaaccagctgtttccctaccctggaccccacttccccctaagtttgtatttaaaaagtggcatcttatcaacacattttaaggtaacatgctgacctggtgattgtcaaggccagaatggagagatatagtgggaacaagactgttggtatgcctctttaccaattaagggatccttgtctcccccaagtggatgtgtctctggttgaggatgaccttgaaagggactgatttctagccatggggaatacttaactgacatctaactcccagtatcttccacccatccatcctactttattccttagggctatgcagaacaagcctagtctttccactgaggcatcttttagtttagtgaagaccatgggcttgtttcatgggttgtttcatcaacctttcaatataaaaagatacctcttcacacagactttctttacccctactctgttgtttccattccacttacctccttcagatatattttttatttttgttggttttttcctcgaagcccactagaatgaaagcttcatgaggcttttcatgccattttgtcatgtgctgtgcttggcacattataggcacacagtaccctctggctttatactctcacagatctgcaagacccctactgcaacccaatgcaaactcctctctctataaaaagatatcttttcccccagtagtttcaacagaagtcatagaattgagtttcactggcctggccagaatcctgtgcccatcctcaacaaattactgtggccaaggggatgggctacattgcttggctactcttgggtcatctgctcaactggaataatgttttttctttttctttttaaagacagggtctcactctgtctggctggagtacagtggtgcagtcatagctcactacagcctgcaactcttgggctcaagtgatcctccagcctcagcctcctgagtagctgggactataggcataaatcacactatgcccggctaagttttaaagttttttatggagatggtggtctatgttgctcaggttggtctccaacacctgggctcaagtaatctgccttccttggcctcccaaagtgctgggattacaggtgtgagccaccacacccagtctggaataagatttgactgttgtagaatcacatggctagaagtgatgaaggattgattaagcactgctactaaaagaaagattgaaggaatgcaggacaggcaaaagaacacagggaggaatgcatattcagaatgtctgtttgtcaagcactgtataggttgaacacccttaatctgaaaatccaaaatccaaaacgctccaaaatccaaaactttttgagcactgatgtgatgctcaaggaaatgctcagtggagcattttggatttcagattttcagattgggatgctcaactggcatgtattctgcaaatactcaaaaatctgaaaaaatccaaaatctgaaacacttctggtctcaaatatttcagataagggatactcaagctgcatatacattatcccatttaatttacatcacaacccaacaaaatgggtactatttttagaggagaaagcagacttagaaagatgaagaaatttgccgctacaagttgatgagctgggactcaaatccaggtctgttcggctctagaacagaacctatatgtaacatgtctctcttcatctatcgctcaggttttattcacgtgtcaccctcagtcattcactatggttcactggatagctagggaagcacagaacaaacactcagtatttcactcaggtcaggctctgtgccctgagtgtgcctgtctttgccatgttctcccagccaatgttttctctccaatttctccagttttccaggctttccattagactgaaactcagctctgcttccatctcttccacgtattgtctgaagctttccctgatggtttcacatacactaatccctgtgaactcttaagttcaccacttcttctctgggggtggggatggaaagagaatagaaacaaattactctctggacaaattccatgcaaagattttcagctgggtagacccttgataagaggcctgaaaaacgttggtaaagtccaaacctacttttgaacctcaattgagcacctttctttgtggccaggtttcaccctccagagtgttggttaataggttgaggacaaagactccctgatcagaatgagactccccgaagatctgtcctcttgtttagcagaatctggcacatagtaggtactcagtgtatatatcgactcaatatcatgcatctgttgtgtcccagctaccttccacagggcttgatgggttgacttaaataatgcttttaaaattcaggttatttcaatacaaacagcctggcatcattaaggcacaagagcctcacccttctacaccactttccacgaacttccagttgccttccttcaaaatccttgttttcttaagaaacccacaaaaataccgcccctctatcaaaacgtcctcagctttgccaggtagagaattgcttctgcagtagctgggccacgtctctgtggtagtgcccactgcatgggatcggtattaatctgtttgtctttttcatcttctgggctgtgagctcctagaagtcagctttttcacttttacccaagccaaacggttattcgcgtaaggttggttataattaaaatgtcggtttgtgcacatggtttgggactctgtgtatgagtacgactaatatcttcaatttactaagaagataaagaggtcgataaataaggaggtcaagcccgttttgcaaggtcacacaggaaagaagcagaccacgaaatgaacttcggctgtcacctgcggtgggcgcactagaggtcttttgaactccttcggctaccgtcgccgcgttctcgctgtgcactcttattctgcgcctgcgcgcggctacagcacggttcgtttttcctttagtcaggaaggacgttggtgttgaggtgagtccggtcccttttgcatccctaccccgacactgcgggttgtcacaacggcaccctcccgctttctctctgcctcggatttagtcgtgactgtgtgtctccgccgtggtgcagcttcaggcctctcccgcatctactctctcacgcttccgctgcggcctgagggagggcggcgggcggaccacggaccggggtgggttgcgacggccccaccgaagccgggtgggctgcgggaccctcgagaacccagctggcttcggagtgagctggcccggggctggtacccgctgcgctttttcacagccattgtgaccttggtgaggtcatttgacctatctggccccggtgtttctcccgtgagaaaaggggtggtggtttctaatgcagctggtcgtgaggcgcaagggttagtgtaggcgaagcagctggcagcgtcgctcgctgtgtggcagcgttttaaattagagctggaaaactggaggagggtcaccgtacctgccgcaggaggggaaggatgggcttcctgcaacctcccttgccccacggcttcccatcctacccccggccgcgttagctgaaggccagcagggacgcaaaagtttttaggccccttaggtctttaggtgaggctgggcaaaggagcagttagggaatttgggccctcatggtatttgccgcgttcccgtccaggttttaatggtataccgtgtgaccgtggaaaacacctgcctcatgatctgacagggttgtcgcgaaggtttaacgagtggacagaaaatttttagaagagaaagtgttgcataaatgggtttgcaatcgttaattaccaatgcggagctactgcttatttttcttgttgttggaaagatttttgttgcctttgctcgtccattactagtgtgccgcagtttgtcgcgtttatttagggtggtcgctcagtatatggggggcggggggaagatgaaacaggctaagccaagagacagcttaggctttgtggga

SEQ ID NO: 11805 - DNA, 6000 bp, Homo sapiens
cttttttttttttttttgagacggagtcttgctccgtcaccaggctggagtgcagtggcgcaatctcggctcactgcaacctccgcttctcaggttcaagcaattctcctgcctcagccacccgagtagctgggattacaggcgcatgccaccacgcccagctaatttttctatttttagtagagatggggtttcaccatattggtcaggctggtctcgatctcgtgacctcgtgatccacacgcctcagcctcccaaagtgctgggattacaggcatgagccaccgtgcccggcctcccttttatatgtcctagtaccctcttcaactgggttgtaagtgttcactgtcagggcttccaatacacttttcatttgtacttccttatgcctagcacagtttctgggacaaaatatgtgcaagatgtttgctcaacagaactctaagcttcctgtagggcagggaacattattaatctctggtgctaaatactgtgctgatagacacacgaagttgtgattatgatgatattatatagctatcatttactgagcactttctatgtttgtttacttacttaaaaaagactcacataagagttcaagtgccaggcgctgttccaaaaaccttaaccgtttaatctccacagcatcctatgtgttaagttctattactatctcacactttattgatgggaaaactgaggcataaagaggttaagtaactcgaatacgacacggtggagccaggattcaaaccaaggcagtatggctccagaatctatgttttaactgtcctgatacgctgctaaacacattgtcttggttaataatcacgcttagggccgggcgtggtggctcacgcctgtaatcccagcactttggggggccgggacggacggatcacgaggtcaggagatcgagaccatcctggctaccacagtgaaatcccatctactaaaaatacaaaaagttagccagcggtgggggtggtatgtgcctgcagtcccagctactcaggaggctgaggcaaaagaatcacttgaacctgggaggtggaggttgcagtgagccgagatcgcgccactgcactccagcctggctgacagagtgtgacttcatctcaaaaaaaaaaaaaaaaaaaaaaaaaaaaaaaaaaatatatatatatatatatatatatatatatatatatatatataattatgcttagaaagtaattttaagctcgtatgtctaaaaaaactcagtgagtaaaaagtaaatgcatcttcttaccccatgacttcatcctgctgtttctttctgactccctggtaatggtgttatatctaacattcaacaaagctctagcctaggtcattcttatgtattccatcttccatattccctactaccaaaactcaaagtcctactcatcatctctttgcaacacttactcatctttcaactctctatttctagttttttgtgttttgtttttgtttttgttttgagatgcggtatcattctgtcacccaagctggaatgcagtgatatgactatagcctactgcagcctcaacctccagggcttaagtgatcctcccaccttagcctctcacctcagcctcccaagtagcttggacctgaggcatgcaccaccatgccccattaatctttaaattttttgtagagacgggggtctccttatgatgcccaggctactctcgaactcctgggctcaagagatcctcccacctttgccgcccaaagtgttgggtttatgaatgtgagccactgcattcccaggcagtttgggtcttcattatcttatacttgggctactttaatatcatccctacttgatttggcggcaatttacactattatcagatgtctttttttttcttttttttttgagacggagtcttgctctgttgcccaggctggagtgcagtggcgcaatctcggctcactgcaagctccacctcccgggttcacaccattctcctgcctcagcctcccgagtagctgggactacaggcacccgccaccatgcccggctaatttatttatttttttgtatttttagtagagatggggtttcaccatgttagccaggatagtctcgatctcctgacctcgtgatcttcccgcctcggcctcccaaagtgctgggattacaggcgtgagccactgcgcccagcctatcagatgtcatcttaaaacagctttttacatgtcactcccatgcttaaaacttccaaaggctccctatatagtagtcttcaaactttctgtgtgccccattaataacagagtttttgagcagatcccttctcaacatatgtgtatgttaatgagagcatgtaattaaagatgttctttttttttttttttttttgagacggagtctccctctgtcacccaggctggagtgcagtgacgcaatctcggctcactgcaagctctgcctcctgggttcacaccattctcccgcctcagcctcctgagtagctgtgactacaggcacccagcaccacgctgggctaatttttttgtatttttagtagagacgggatttcactgtgttagccaggatggtctcaatctcctgacctcgtgatccgcccgtctcggcctcccaaagtgctgggattacaggcataagccaccacgcccagccaaagatctttttttttaagaaaaatcttgattcaacactgtgatagatttaaaggttctaatttcagcttaattcaatgtttggttttaatggctactattataaaaaaaattcaagcagtactcactttcgcactgtactgtattaacgggacgggttgcatactggaatcaattccccactttgcaaagtttcgtggttaacagatgtgatttcaatcactgtaaacctcttaaagagtgggactggttcagttaatatggtactgtgcaaagtgcagaatgcctgtacttcacaaagaaagcatacccaaaatgataatgtccataattggccacgtttatttaatatatttaattttcagtctcatccatcagttttgcaaagattatttttgaagtctagaaaatttctatctactctgatgtcagcagctgttcctacaactaaaattagcattttaataatttcaacagaagtttaaaaaccccaacaagatagatcattttgtttctaaatctcttcatgtaggcaaaaatgaatctttatagatggagaaactgacatttattaaagcaactatgtgctaggtgctgtcttaacagtgcatacacgaacatgattcttcccctttttggaggctaagtctgatgggaaagactattaaccaaaataataatcatgagacaatgtgataaacactgtgaagaagtgatagaatcacagaagacgggtgctgaagggggcggggctcatgcaggaggtaagcaggaacagattactgttcggtgaaagtcttccagagaaagcggctaaactgggtaagggtgtgtgccacaggaggccttaaaaaagatgactgaaacgcactgagatttgcaagggtgaatactaaaccacttgtgggaaacgtagtgactgactaaagtggcaaggaaggtgggaccagagattcaaggactgggaacgatgccaaatccaagtgacaaatctaatttatattttagaaacattactgccttgtgacaaactgtaaacatcttttgagcagagacttattagcaatgctcacacacatgttgataatatctcctactcaaccaaaatagtgaaatactgttttcgcctcatctcatctcgcttactcctcattcaaactaatgacacagcccttctttctatgccttaggttcattcctgcctgaagacctttgctcctgttattctctttatttagaacaatctgcttacgcatggttggtcccttgtcatttaggtatcacaaagtacaatttataagtggttagcatgttaacgggggaacagaccaggaaggataaattaatttcatttaaccattctttcatcaaacttcttaagggatggtaagagaaaactgatgcttttaaattcatctttgtctcttccaacatccacaactaatgtgaagtagtaaagcggcaagaagagcagtaggaaggttttaaaagcctgtttaactctcagcccttcaacccacgagtttggctcattcaagtccacttttcagtaataggaacctgaagacaatcccagagcagcagctggaatttttctccactatagacaactgtttcccactcaccactagaggaaattcttagaaaaaggacttgaacagactttacttgctatccatccagttccgcagcgactccgtaagcacaaagtttgccttagcgaaaggtaactgagaaagaaccagaccagagtgccagcctcccccggctttactccgcgaaagccgaggctagacccaacgacttgcggaaaccgtccctttctccctaccaacttatcttacctctctgtaagtccaacttggtttcgcggacataattgtccggattccggctcagcatcttcaccttcatctcggttgctcttccggccggactccacgaggtgtccgctaggagttccgcccaccgccacctcctcccacaggcgacttccgcttttcccagactacttccagtcacgtgactcgcggagcggcggcctgctggctcaactggatcctgcgccgctccgtagttttgccggcaaacgttagcaaggggcggttctttagctgtgcagtcgcttccgcgtccgtgggctggagcatttgtgggcgaggcagggcggagactcgggagaggctgggacctcccctccatcgcgctttccgccggcgtgacgtagtgtctgtgccccgttcttgccccctcagtactagagtctccggcttcgctcacgcgccttgggcataagagtcctctcgttggtcccggaggtggggttgcgctcacaaggggcgaccgtcgccacggtggcggccactgcatcgcgtcccacctccgcggccctgggcgccgtggtgtcgacgggccccgagcctatgacgggccagggccagtcggcgtccgggtcgtcggcgtggagcacggtattccgccacgtccggtatgagaacctgatagcgggcgtgagcggcggcgtcttatccaaccttgcgctgcatccgctcgacctcgtgaagatccgcttcgccggtaagagcccgcccagacaccgggctgcatcctctcactgtcagcccgaactggatctcctccgtcttttccgttctagggggaggaggagcgttgaagggagcgttgctgtccgcgttggctaacctgaactagatttgaggaaatggtgcttggtggaggggtcggcctgcgatcttccccgctcctcaagactaagagagggggcatgtatgtagagaagtctgagaaaaaacatcctcattggcagagaagatgggattcaaagcctgatttgtaaaataaagaagggattgtcacattttaaggtttagtcctcacacgtgcaaatcattcactcttggaggaactttgaaatcttagcatacccacgtggtttggcagctcgactagtattgggatagggcgtaatcttcagcgaatggttgggagtagatttagaatagaattctcttgaatgtttgttttttggcatttgtagaatggtacaagtttctgtgaaaaaatagctagaatcgaaatactattttaagtgtattagatgaattgagtatgttgaaattaacaaagcattttagaagttaaactcaacactaaagtctggaaagagtttcaaagatgatctttgataactgaaattgcagaaaatagtttccaaataaagttattacaagttaagttcagccttgagaattaaatctacagaagttgtttattttagcattaggcaattcagttcacttgatttatattctctta

SEQ ID NO: 11806 - DNA, 6000 bp, Homo sapiens
cactggggattacaactggacatgaggtttgggcgggtcatgaatccaaaccatgtcagcctttatctgttacagtatactatagagttgacccttgaacagcacaggtttgaagtgcttggatccacttattatgtggatttttttttcaaccaaacatagatcaaatattgatggtatgaaacctgcatataggaaggctgctgttatataggtgggttctggtcccgtagagtccactggacttaagtatacatggattttgctatatgggagggggaggtgtcctggaacccatcccctgcatataccaaggggtaactatatttgccaaatatactggggaacctcaaatcttttttggatttaggcagaataaaaacaaataagttatatatgcctgaaattagcagtatttccctataaagagccatcggattgccatcacagcagccaaattcatttctgatgggctcatggagagacatggaatgagatttcatcctacatacatttctagctcatatcctcagtcaatcatcagaacttaaacacaaagttatgtgcattttgaaacttcgcagttaaacgacaacaaaaaagctcagagtatctctttatatatgccaatgtctgtagttaatgctccctttacttcttttttcttggtgagggcaattgttttctacgtttacaagagatagatgttattaccactataagttattgcatgctctatggtctggttttacaattaagttgaacttatgagggaaaaactaaatctattcggatttggattagttaatttagagccaggattatatatttgactacttggtacaatggtgggtatgctgtcacagcccagaatatttaaccacaataaatgtgctagtgaactggtttagaagttacctagattgatggatctcatttgctagcctatattattcaacaccaatggaaattagaattcatttgtaaagggatctcatttacttaacttcaatcttaaaaaactgtctttttttagttagttatatgttttttctcaagtttgtttttcttttttaaacacaatattcctttgagggggagttaaaagatgtaactttctctggcagcaggctgaatagaaaacccactatcatcaattttctttccaataaaagatgattctcagagtgggagtgataatgctccccagtctaacctcagtgttgatgagattttcaaatgctactaaatgaagcagagtctacattaggatggagcaaattttaattggtgacaaaaattagaccattatatgtgatgatagccaaacaaggaaaaaagagaagtttaaaatcaaacaaaaggattatttaagggcatgtttccataaagtggaagattgtagcccttttcaaaatatgtcaagggaaaaagaagcagtccctgtactgctccactcccaattgcatgtacctgaggagctccagaaccacttggaaaaggattaagcagcaactcaaatggttgcctcattcagtttttctcaaacttttaagaaaacggttgacacaatattttaagaatctgctgaaaataatgtcttctctctataaaagtacatgaacacaaaatcttcatataatttcagaaggcttaagattctttgaagcccatcggtggatccagaggactcagattaagaatgatatgggtctcaggggcatgatttatgctttaaatcatgcagtccagaacactggccaagcaaaatcaactagtagtacaactgcaatggaattgttaccaatattaaccactgcatagctatagttttctggatttcaaagtgctttctcacagatgaacaatttgatgtatcagcccagatggccagctaggtagattaggtgagagaaagggagtaacgttgagtacctattctgtgatgtgatgcttattaatgtctgatatcctactataactgttttcaataaataaaaatgttccctcaaaaaatataaatacccttcactggtgaacattgagtacttattagagcccttctaataaaaaacaaaatacttagattttgaaggcattaaggcagacacctagatctacatttctcaaagtttttctgggggtggtggggggttagcggggtgtcactaagactatttcaggaaagtacatgaggttctccctttgccaatttatatattacatgagtctagattttcttcatatacttcaaccaaaacaacatattgcaacagattggatgcagaagcagatatgagaatccagctgtcttctattaaaccagccattagggagatttataaaagtgcaaaaacaaagccactcttcttaactttttgtgtttgttttggaaagcagagttatgtaaacttgtaatgcatgttttattttaaatgaatttaaaataaattcttttttttctattttaatttctaaatgctaaatatcaatagctatgacccacataaataaaagttctttggtgtcctcaccaaattgtaagtgttatggggggtccagatacccaaaagtttgataacctggcaagtctgagaagacacatctgggtggatgagcaagtgtaggggtgggaggggtgtgacaggaactgatgagggcactgtgtgtctcgtgttcgggacaggattccttgaatggtactaaaagtggacaggggaggatgcagtccagtctactccttcactctgcttgtggcctgttcttaacacagctctcatggaagcgcaatttagagaaagcaatcttaagaaacaagaaagtagagtttagaatcccaaaattaggaaagacaactgcaatttgtttagtgaaaaacactgaagttgcttctttccaacaagaatggaaaacatttttggagtgctggttgctttttttaccagatgatataagatttgttaattattagatttttgtaatacttattaatacatttttctcttatcttttggaatagcatttcctggttttaaaaaaaaaaacttaaaagggggcaaatcggcaggagactgaggaaaagcctaaatgtattccccagaaagtatgttttaaattttaacatttacttactgagaggtgaggccagctgaacttcctgggtccagtggggacttgaggaactttcctgtcttacaagaggattgtaaaatgcaccaatcagcgctctgtaaaatgcaccaatcagcactctgtaaaacgcaccaatcagcaggattccaaaagtagccaatcgcagggaggattgaaagaggggcactccgataggacagaaatggaacatgggaggggaccacaagggaataaaagctggccaccaccagccagcacctggggttctcttccatgctgtggaagctgtccttttgctcttcgcaataaaccttgctaccgctcactctttgagtccgtgccatctttaagagctgttaacagtcaccgggaaggtctgcagcttcattcttgaagtcagggagaccacgaaccccctggcaggcaccaactccgacacattactaggcgctaagcattgtgctagagagtttgctgtggtataggggcaacaatctttactttggaatgagaaaaactgtttcaaacaacttacttgccatgagtaatttaatttctctcttttctataaaacatgggtaatatttatctcacaaggatgtttgggattaaaaagtgacaacctatgtcaataggacagcatgatgcagtgtaggtcttcaatgaatagcatggagagtgcttgcaaagggcaacgataaaatctaatataaataagacgttgtagacaaacgctttaaaaacacagggggtaaggtctgatgtgccagcgtcactacagacgtacttagaaaagtgttctggggatctaagtaaaggaggactcccatttgctgggagtgagaaaagagctttagggaaactgcagcgtgatgggcgaatcctcctttcaatatatctaccctgaaagtcggctccagccctgccgaacatcctggcccagctgcacccgacccagcgtgagatgtcaaatgacctcttggcgcttccacgccagactggaggggctctgcacaagccttgcccgactcattccgggcaccttgagcgtgggagtccacactgccccttgaccgaccagctgccaggttggccgcactaacttgagcccacccccactcgaagctccgcgccgacagcaagtggagacttgggggtaccggatagaggaaggaactcccaagttgtcagcttcagaccatccacgcctcccccaacacggaaccaccttcagcctcccagctggtatcccaccccccctccccccacccgctgggccagagcccagccctcggacagcgaccgtgctcctccacacaccccgcgctccagcccctgggcatccagcagccggcgttcgcacgctctgtcatcgattggcgctgccttgctccttgggctcccgtcgcgtggaaatcggcccgaaacttggaaagtccagcggagcgcggggagggaaccgaggcaggcgggccaggggattgccgatcgcacggatgggcgcgcgctcagtctggcgagtggcggcgccggctagcccgagcggcgcgaggccggagtccggcgtccgccaccctctcgtctcgcgctggcgcgcgagctccttgcccttgcccccaggagggccgccccgcgtggggctctcgcaccgcccggggtgggagcaggcgagccggagggaggagggaggagggagcgcgcgcgggcggcggcggcccctcccttccccctcccgcagccgcggagagcgcagggagcagccggtggctcggcggcggcggcggcggcggcggcggcgtcggcgtcgtctacctccagcttctcctccctcctcctccgtctcctcctctctctctccatctgctgtggttatggcctgtcgctggagcacaaaagagtctccgcggtggaggtctgcgttgctcttgcttttcctcgctggggtgtacggtaagtgtccgcgtccccgcgccccgctgaccgaacaaagctgaggcgacccgggccccgaggcctccaggacgggggttcccctggagactcccgcggagaccctggctaccggcgggacaaagaccggtgagggggtggatgtggcggaacgggtgtccccacacggagatgcttttctccactcgtccacctccagaccctcgggtggtggagaggggctggggggcccggccgggagggccccggcggagcgagggggtggcgggcggacttcccgacctgggttcgagggcccccgcggccagttgctccaggacccgtagcctggcacaatccacacacaaagatgcttgactgtgagaaagcagaggagctcgcccccgccgctgccgggacggtccttccccccgccccctcaacccggggttaggaagttctctcaccggcgagattcccaccgcgccagcccttgtcctactcgattccctgaaaaggcttcccgctgacttctccccactccacctcgggggcaagggctctgccgaatccgggcgtgcagggtcctgttggttccccgggagcagcacgcgggagaaggccagaaaatagtttccagccccacctcagtctctcctgttagggtgtacacatctgtcctgactcctagttcaattgtaatttcatccatcctcgtccgccgctgtggtcactgttactttattccagtcgatggatcgggttagagataactcctttcgggttaagagaaggctgaagactgtgcggacagctttatattgcgttggggtctgagcaagagctgaatggaattaattgcaaagaacatctatctcttaagataattaagttacacttctgacttcaccgttcttagttcatcagttaaacacactg

SEQ ID NO: 11807 - DNA, 6000 bp, Homo sapiens
aatgaagcagttgagaaaatttgaaagtgggcaaaattattatatttgtggctcacataaaaataagtgttttttgtagtcagttaatacagttcgtctgtatggatagagcaatagattctgtgtccagttttaaggcttttctgttctcttgtaatacaacgttactacctttatttgacatataaacttcagtctgatgttcttaatgttgttataagcttaaaaacattgaaatgcctgttaagcttcagtattaatgaaattgcaagaggagtcaggacataagaaaaatgaattcctaggaaagcacacttaggactcttccaacaggcctgtctccacctctctacaatggttcctgatttacaacaggaaggacagatccttctatcggcttgataatttatcttcttaaatattgctgttttaaagaaaattactttaacatgaatactaggtctcttactttcctttttcctcaacaaataaggacatttataaatcaaggtaatgcatatacttaaattagaatcccctcattattctagattcaacatttaaattcaaatattttatttcgcaggagttggagagatcagacatgacagatccaagaatgagcatttattgaaaaatgagaaaaatgaattcctcttttccccctactctcctggcagtgaattatatgtaaaaactgcaaatgagcaggaaaatgtctgcttggttatttgtaatcattaacattttatcttactctaactagttttttcccacagacccacagatttgattttcagccttttaattaaatacatgtgagaatgtgtgtgtgtgtgtgtgtgtgtgtgtctgtgtgtctgtgtgtgtgtctacagtcaatgaacatttagttttaataggcaggaacatttctataaaaaaattacttcacttgagcaagaatccccatgtaaacctttatatccattatataaattaaaaaaaaacactaagtttatagctgtcaaaagtatatgcttctttccaaagttaaaggtaacgcacttcccacatttttgtgttgtgttttctcagtgtactcattttgttttgattattttgttcatttatctttgatattgctcctgtggtgacaaaacatagtaaatacatgttgaaggggctagtctaatactgggcaatttttggagaggggcttattttatcttttttagtgcaattcagccctgttttaagatcaaagttaattgtattccataggtatttggggaaggaactggaaaggaatggaaatctagtacttctagtttaaagagcttgtgcatttctgatttaacctctttttaaaagctcttaagggtacttaatcattgtgtcttgatgatccttgccaagtcacgttttaccacgacctatatgtaggaagatcaataggctgcaagaagtaaataaaaatttttaaaaagaggaggaattttcgtaactgataagtataaaaaggacaaaagttttttatttatatgtgtacatatatattctaaaattttatcacttataaactataaattattgcttttctataattatgtatcatgtgtactgtaaaaatgattcattctttttgttactagactatttcaaaacaagcatctgtaggagctagcataaaatataggacattagggaagcatattaactctgaaatcaggtgccataggttcatacttcttacatgtgttacttcaggcaaggcaagacagttaacttctatgtgtatcaatttttttttcatctgtaaaactaggatagttgttatgcttgtctcagaaagctgtagagcttgtctcagaaagtagtgaggattgaataatatatcttatgtaaacatagcacaatgcctaatgtacaataagcacctgaagtttgctattatgttagctatttttccataatctctttctaatagtctcacacaaatgaatgtatagctgtgttgctttcctacagattagcaacaagagataatttctttctcccaaatgtagacactatgttccctcccccgcccccaccccttctggagaaactaaaggattctcacccaggattgtggctgaaaattttgtgtttctggaatacctttggaaatctttccttaaagaggatactgttcatcaagaaagactagtgagatctagccctaaacacattggactaaacaccaaagttcctgatagtgactttggataaacctctttagctcctcatgccttaactttttccgtctgtgaaatattattttccatcctgtctcagaagctggaagacacaggtgaaaatggtttgtgatttattgtgagctgtagaaactagatattatagtattgttcaatatattatgagattccagataaatcttttaacaatctcacatgaaatgataggcaggattcatttagggaaagataattggattacaggattagccatgtgtttgaaaataaatatcagaaattggtatcttactagtaatctttatggtcttttaatcaaaatttacttactttgtgcacaataattactgttaaaataccctgtcttttgagaaagggttttttgcgggggggtttgtttgtttgcttttttggcatgaagtcctcctgtctggatgtatagccatgtgttatgtgttcaaatagattgcataaaacccaatatttttgtttcttttaataagaagtaaattcagttgaggtgactaacctctgcacacttggtaaggaggatttttgctgagcatcctcattaagtccaagggcctgtttacatctctaactggttgtccagcccagcaaaggcaacagcagcaacaccacacgctgacatcttgactgaaatcaatgccagagcagctgccaaggtggcttagcaggctaatgtcgttttccatgttgatcctcccagtctctgtctagtccctaccttgttgcccactccccttcgaaacctgcatatgcagacaatgaaagagagcactgaaaagaagggacaatgttctgcctgagggctcttaaagtatctctctgaatttaatgaggtcagctgggcgtctacagcttttaccttttgctacagctccctacccaggacagaaatccctctctaacacacaaacacacacaggcgtgcacacgcatatgtactgcaaaaatacacttgggaaaacacctacgcatggcaaatcactctttgtatctttcataaacacgcacacttacctctcactacagcgcgtttatgctctcgcgcgcgcagacacacacacacacacacacacacacacacgaactgggagaatcacaggcccacacacaatgccacgtaccccgagagatcagaagccttcctacgcctgcagattgaactcactcgccactcaaacctatggacactcgcagtgtgcccacttcccagagcggaactccttccagattctaacgccttcctctgctgagcgggcagctccaacgcgagccaagggacaaagctggccagggtaatgctgtggtgcacgggaccaaacccattatttgtgcacagtgcagggagctgcaaactcaagttgggcagtcctctagactaagccttgttgatagacgctcacgcccatgatagcctgaggcagttaaatggagccacacgcaacagcaatatcctgtttcagaactagcgctgtggcactccccactgctgagaggggaccagattcccgaaaaggtcagatcaccaatcagttgcctaatctaaggaacttgttcattgaaagatttgggccaggaccgtggtcgaaaaaaatcaaggagcacgacatactggtcccggggacacagctcccctgacaccaagggatggcaaaaacagggtcccttatacatgcgaaggaagaacgggcggctcggagacggccagtagatggcgcaagaactcttcccttgtgcaatcttaacccttgcgtggtgcatgggggaagcagatccagatgtatagatacatacatttttcgttttgaaagaaacctcctatttacatatttggtaccgattcagaattaagacaaatgggtttgttctagataactaccacagataaagtagtttaactgcggcacacacaaactgaaaagggggttgggaggatgaaagggagaactatttgaggaaacgacattgacttccctccccaccccacccccgcccaggccacggatgaaatccgtttcccgaatcataaaaacccggtgaagggtttacacgtagttatttgagtatgtaaatacatgtgttcaaatacattcttttccgtgtgaaggcagaatttattgagaaaattctctgtgatttcctttttcaattaaatcacaggataataaatgggagaagcctgcctgaaatatactgcaactacagtagtaacacatgtcccattataacgacgtgggcatcgatggagcccgattcattatcgtcacggtttccccaaaagcaacacagatcctccgattaaaatattcctttgacatgcttctgtattcgcagcctgcaacggagagctcactaacattatttcttgggctgcttttacaggcagaattgatctattcggggaaaaaaagcaagccccttaatttcaaatattgtgtggagtttatcagagagcagaggtgggctttaagaggctcactagtggtttctggtggttgctataacgagccagaattggggtagattttggtggaggggaaaaaacgcacaagaaaagacagaatccagagtagcggagactttgtgcccccgttggagagatggttgagtcctcgtcaaggttgctgtggtatcccagaaacaccattcactccgagctgtgaccgcgcaccaacaacagcaacaactccactgcgccgggctgaggagcaggaattaggagctcgcgaataatatgaaagggatccgcaaaggggaaagccgagcaaaggaatccaaaccctgggagcctggcaagcgaagatgcgctaaatgtggccgcctagacttcatcctgatgaagaaaatggggattaaaagtggatttacgttttggaacctcgtctttttattgacggtgtcttgtgtgaaaggtaggtctgctttgggggtcccctccgctttggatggaggtgggctgacttgtagatggagagaggctggcagcttactttgcaatttgcaccgataaaataatctgataatactaaaggagttgattcacagctcgttctccccccctcagataggaaatgcattttgcttgccagatttggcgttcaatgcggtgattgagcttgtgctcaataaatattcttgcagtatgctcaaacgaatacgtgagttggttagtatagcctctaactagtggatatccaggcagaattcctctgcaagacttttcttagtggtgaggattaccttgatttcttgtcagatcactagggcttgaggctttgggtggaatatatatattaaagacgctggtctaaatgctttttaaccctttcagggaagaaagttatcgacgtgctaggaatgtgttgattttaaatgcattagggcacagggatcttccaagcactgccacatcaacatgaatgtctgcatgcatatgtatgtaaattgggcttctatgcaatgttaaatgtaggggagcttccctaggacctgtggtagaggtttggcaaaaaatgaggctttcgaagggtctgaaatgccatgaagtgtaaagaaccaccttaagggatgaatgaggtaggaggaaagtcattagctgacgaccaaaagaaaatccccagcaagtctcagcgttcagacaggtagagtgagtgtcacatgcacagataggggagggggtaggtgggatgtaaaaatgtattcccaagcaggaaggcaagggacagtcaggatcatg

SEQ ID NO: 11808 - DNA, 6000 bp, Homo sapiens; identical to SEQ ID NO: 2554

SEQ ID NO: 11809 - DNA, 6000 bp, Homo sapiens
ccttgagtatttggctttttaacattctgtgtgaagaaacagaaaggacacagtaaagaagacatctttagtctgctgcacacccagctaccctggttatctggaggaaaagctttcatgtgattgagttgcaagccttaactaactggccacttttattatggaacataatttttacttgaaagaataattaatagacaaactactattattcaaatgtgggcatttggaagcctttttttttttaattgaatgaagtgaacctgtcactacaatgcaagcaactgacagtatttattgctaatgataatatgtgagctttcaagagaaaactagaattttggggaacttgtatttgccatgatgggcatgacagattcttaatatttgaagacactggatgagattgtggtaatattaatgattgtgatcttttgggttatcaaaaatgaaatgtgtcaacatttagaaaatctgcataactcattggacctggccaggctcggtggctcacgcttgtaattccagcacttttggagtccaaggcgggcggatcatgaggtcaggagatcgagaccatcttggctaacaaggtgaaaccccgtttctactaaaaatacaaaaaaaattagccgggtgtggtggcgggtgcctgtagtcccagctactcgggaggctgaggcaggagaatggcgtgaacccaggaggcggagcttgcagtgagccgagatcacaccactacactccagctctgggtgatagagtgagactccatctcaaaaaaaaaaaaaataataataataataaaataaaaattaaaaaaaataataactcattggacctgtattttttagataatcaatacacaatattacaaattcataaacggttataaaagatgcatttaaagtataaaacagaacaacagatttgaatgtgttatcagagtacataaacagattttaatgtattatcagagtacacaaaattcactcatactgaggagacactgacaggccttgctgggcttcctcactcagtcagctagcattagattatgccctttttgtcctatcctatctctacacggctgcccattctttgttaaacttaagcataaaaacagacaatttcttctgtatctttgggtcttcattctaaaggccgctgtgtatacacattaaataaatgtatatgccttttatcctattaatctacttcatgtcagtgattttcagcaaatcttcagagggccaagccctgggccaattcacaacattgcaacttatcaagttttgatgtagtataaaggaagaatatctaaaaaagcctgtgtaaatactcttccatttcccaattatatatgtgtatgacaccagattttttttcatatacttcaatcaaaacaacaattgaatgcaaaagcaaataggagaatccagctgtcttctatcagctagacagcaaagagatttgcaaaaatggaaaactgccacttttctcactttaggttttgaaaaatagctattttcgcaaaatgttattaagttggtatgtaactgcatttattattacttcaaatgacttaagtattttaactttttaagtcagctttaatgtctaatgtggtaaatattgatacatataacatataaactttttttgaggttctcaataattaataagagtataaagagtttctttaccaaaagttctagaaccacatatacagaggattatgaaggtactaaatccttgttctggatactttgtctgtcagacatataaacatatgttttgtgctgtgggatggaggtcagcaacaacatattgctaagtcacatctactcaagtaaaaactaccatgttttctctgttgccttgtacaggtgaaaacataacaggtatgggttccataaggtacattttaggatgtcaaaacctgaaagggatgggtgaaaggatgtcatcttctgatccaaacagctcctgtaagatagaaagctaagggtgaattatctaatgttattcaattggttgttgccatagcttatttgtgaaactggatcttaatgtctcttaatttggtgcttgtgaatcagtactccatgacggatagttgtaattttggcctgagactcagaaaagaagttgcattaaatgtgaatgtctgggatatattcatgggcactgactaagtcaatctaaaagagtgaaggggccaggcaaagtggctcacacctataatccaagcactttggaaggtagaagaagaattgcttgagcccaggagtttgagaccagtctgggcaacatagtgagaccccatctctataaaaaataaaaataaaagagtgaggggacagtagaaagctgaagtaggtcaaataagagaacctagaatgaaaccatggttaatgctcaccaagaataatttaaggaatagaaggcaaggaaaggagtgcagtactaatgtttttctgaatacccacaatgttgcaggcactgagctaagctcttaatacagtttaacacattatatcatcaaaaccactttgtagctattttctccatttatcaaccagaaaatgaagatccagagaggtaaaatatgctcctgggatctcacaaacagcaaacatcaaagataggatttgaatgtgaagtctctctcaaacttgaaagtttgctttcaaataactttcacctctggcttcacattgtattagtctcttacctctttctttggggtagagatgggaggatgacagaaatgtgtagctgtataatcagtttttacatccatttgcagtcagagaacattttacttttgtcttatgggtcatgaattacaagaggcgagaaacaacaaatgtgtttttctataataaagaaaaccagttttagtaaatgtgcttcttgcttgaactattagcacagcacagttaaatgctagtaggcaataataggtattcccgcattacgtgtcatattcatgaaagtttagagctggaaggttaagtgtccccctggggcctcacagctagacacttggcaccccacaatttccactctacctctaaatcagtttaatccacgttatatgtcagagtacagaagttaggtgatatatttaaaattatagtttagcatttgaaaactaccaaaaaactgaatcaggaagctcgagtctgattaagtgggatgaaattgtgatctgaaatttaagccagtctctccaagagttgaaccacctaaggcggagttcaaacaaaggctgaagcaggaaggtttgctgggggaaatcagtggggtcccctgagcagcgtgaagtcatcaggccaaggtaatgcttcccagaggtgtaaccgctgtgtgtgtgtgtggcgtggcgggggggggcggggggaagggggcggaaacgcgcagtactttgcaggtcagcccctggggactgggatggctgactacctggtattgcactaaaatgcttgacccctaatcacatcccccaacactacaccttgtgcgacgtgatgaaagcatcatttccagtttattcgacttttctgtttagacttattcattatagcccatatatgtgataaggactaagaacccagtcttcaaggtcctgtcgagttccaaagaagtccacccctcagaagatccttggaaggggaagaaggaaaaaagaaagaaagaaaaatctgttttaccctataacaatttcagcgcaatctcccaagaccaagttggttaatttgtaaagtcactctcattttttcctcaacagtgccacctactgtccattttcagtcatcagcaggcttgttggcaaggtccaagagaaagaaaggaggcggagtggtggggggaggagtaaccaaaaaacgaactctacccagccttggggcattgtgaaaacgacgaggaaaggccatctccaagcaagacatatttgtcctcgtcaactttgcagaaggcttgcaaaaagcaaaagccagttaagccatttccttcaagatggctaaatataagtcctccagaaaacaatttttattattttatttttaatgcgcgctgtttgagtatgtttacgttaggggaccagattgagcaaaaatatacatataattacttttctatgttttccgcccacccacggcagaaacctctttatgagaaaggctttgacacttgacgtcagctcagaaacttttgagttggcgggaagaaagggttaacaagtggtggaccagcgcgatctttttagagtcccagccggctgtcgaaggctccaggtacacacacacacgcacacacttacacacacacacacacacgtgcacacacccctcccaactgttcctccttgggtcggttacttagctgaagggcaccatttggctttaaaacaaattacttcagcgccacagggagtttatcgcttggagggaacttgtaacgcgggagttcagggaaatccaagaggcgagggctcccacctccgccgccagaggaaagtaaggaatcaggtggtggccccctatgtgtcttgcatttctctgcacacgttagcaatcaagttaattgaattcattggagtttagaaccggcctgtagctcagagaaggctttgaatggccaatttctctctctccctctccccctccccgcctcccgctcgcccgcccgcccgcgctcccagttccctcccctcagggttccccagtccacacctccctctccacttccctcacccccccactccctccgccgccctattaaaacacccaccagctcacttgttaagacccccttaagttggaggaggcagaagggcaacaacggcggggaaggagaagtcaagacgtctggaaagaattacccagtcctggcttcgagcagcccattgaaccagagacttgaaacagccccagccaaagacttttctcccaattctgcgcttcctgggttctgctgagtcttccacaggctttttttttttttttttttttttttaagacgaaaaagagattttctgttatcgggggcagaaagactgaagcccaaaaaaaaaaaaaaaaaaaaaagaaaagaaaagaaaaaagaaaagttaatttatttttaaagcataatttttttaagaattagactgaagtgcaacggaaacataaagagaatattagtgaaattattttttaaagtggggaagaatcaaacatttaagactcccctatcctttttaaatgttgtttttaaatttcttattttttttggccggtcgtctcaaattcatctgatctcttattacctcaattttggaaactgcccgccaccgaccctccgggaccacacagacaggctgaggacgactttatgaccaagagctgaacaaggtacgttacactggcgcgttttggtgaaggatgaaggtcctccaacaggccagggagaaggaagacatccttataattgttttaaaatttttaagccagtttcgatagaaaagttggaagtttaaaaatttccaacagactgaagatcagggaatatttcaggtcactgtcaggcttagcaacatagccctcttttcccatttctgcggctctcgccagaaatccgctgcctttctggggacacaggtagcctctctgcctgggaaaggctgcacgtcctcagatgtacttttccattttgcatcttccggagcagcagaggggctccagagttaggaaacaagaattcccaatgtaaggaaaatgcattctgcacagccgccccaccccttcccttctttttttcccacacacacacacacacacacacactgtggggagaaaaactggaatagcccagcgcgttttacttctaagtgaaaaagtcgcttcttgctgggaatgcaaagggttaagcaatctgggcttccagctccgacaagctgggaccctggagaaggagggtccttctctacctcctcgcagctaccatcccctc

SEQ ID NO: 11810 - DNA, 6000 bp, Homo sapiens
aggtgcccaccaccatgcccagctaatttttgtttttagtcgagatggggttttaccatattggccaagctggtctcaaacttctgacctcaggtgatccacccgccttggcctcccaaagtactgggattacaggtgtgagccactgtgcttggcccagagtcacctttctaaggtgaaaagcaagatggcaatatgaagtacgtgggcagatctggatttttttgggcctaaagtttatacagtttggaggacctacttcaagaaacatcatataaaattatgaatacagggctgggcatggtggcttatgtttgtaaccccagtactttgggaggccgagggggggaggtcacttgaggtcaggagttcgagagcagcctggtcaacatggtgaaacccatctctactaaaaatataaaaattagctgggcatggttgcaggtgcctgtaatcgtagctacttgggagactgaagcacgcgcgtcgcttgaacccagaaggcagaagttgcagtgagccgagatcacaccactgcatgccagcctgggcaacctgggcaagagagtgaaaactctgtctcaaaaaaaaaaaaaatttacaaagttttgcacagagccttggaaaggcctgtgcaagtgaggggtcctgtagcctaagtttgattaggttcacaatcacaccacctctgggaggaaaagtcattgagctgttaatatctttttattttaaatcctactcctggaaatcagttcaacaaaaggatcgagaggcagtgtggcctagtgggtaagaacagtaaaatacaaggtcctttccataacctacagtgtcctccatgattccagtgactctctccttcctttgtctcttgaccctccatccccactctcgctccactcagccacatgggtcttcgtgtttaaggtctccatgccagccacattcccacctcaaggtctttgccattccttctatctgaactgttcttcctccagatctccacactgcttgctctttcaccaccctgagacgtgtactcaatatcttctgagtttgcagtgaggccttccctcaccagcccaaatctccttttcttcttttttcttttcctattcctattgccagtttacctactgtacatgttactttttttttttttttttttgagaggagtttcgctcttgttgcccaggctggagtgcaatggcgcaatctcagctcactgcaaacttcacctcccgagttcaagtgattctcctgcctcagcctcctgagtagctgggattacaggcgcatgccaccatgcccggttaatttttgtattttcagtagagacggggtttccccatgttggccaggctggtctcgaactcctgacctcaggtgatctgcccaccttggcctcccaaaagtgctgggatcacaggcgtgagccaccgcgcccagcctgtacatcttacttttatctctttctgttgtctttctgcctcctctagaatgtaagttccaagagggtggagataattgtcagtttagttcactgtttagaactgttattggtatataacaagcactggacaaaagcattgctgaataaatgaatgaaagagcaccacctttgggctgggcgtggtggctcatgcctgtagtcccagcgctttgggaggccgaggtgtgtggatcacttgaggccaggggtttggaaccagcctggccaacatagcgaaaccctgtctctactaaaaatacaaaaaagtagccaggcatggtggtggacacctgtaattctggctacttggcaggctgaggcaggaggattgcttgaacccaggaggcggagtttgcagtgagccgagattgcgccactggcactccagcctgggtgacagaagcgagagggagacgctgtctcaagaaaaaaaaagaaaaaaaaaagcaccacctttggctttaaatagatctgggttgaagttttatatatgcacctgccggcaagtgccaagttacttaacttctctaaggctgtttcttcatttgtaaatggaaataaaagtacttcatagggttgaagcattgttgtaaagactaattaaaaccatgcccataaagggcatagctgagtgccaatcaaactgtagacactcagcaaatgttagatattagtaaataaaaaagttagctattagtataaaatgtatatgcataaaggtattcattatagaactatatatagtatttaaaaacaggtatcagaaataggaaaatggtcaaaagattctgccacatcactagtagaatattagtcattaaaatgattattaagactttgtagaaagagaaagcctttaaaaaataattatttaaataatattattaataaattaataataaatttaataaatattcaatattatttaaaaataataaatatttttaaaagccagtcaaatttagcagtggggggttgtataccaactttagtgacactaatgttaataagttctgataaatcactaccatcggaccagccagaaagcctttgaatgtaaagttacaagaaaagaccagacatacctggcctaccgttgctctgatttaaacttcagtgtttctaaaggccgaagttgaattccagagcattcactatgaattctagagcacaacttagaaataaacactgccaggccgggcgcggtggctcacgcctgtaatcccagcactttgtgaggccgaggcgggcagatcatgaggtcaggagattgagaccatcttggctaacacggtgaaaccccgtctctactaaaaatacaaaaaattagccgggcgtgctggcggacgcctgtagtctcagctactcgggaggctgtggcagcagaatcgcttgaacccgggaggcggagcttgcagtgagccgagatcccgccactgcactccagcctgggcgacagagcaagactccgtctcaaaaaaaaaaaaaaaaaagaaataaacactgccagatattgggtgtacatttttcttgttcttgtcttttctcatgcacgtgtacttttaagtttatcagagaaactttccttagccctccacctaagccagataacccctgttttctttcactgtaccttggttatgagtagtgggtacaaaacaatggtggtggtagtagagggaaataaacagaataaacctcaggcaatatcgtcaagtattatctgttatttatataaatatctagcttttatatcaaaattatctttttgtaaggctgtatcaatttatattcccaccagctgtgttcttcgtagatttgctatccattggttcccaaatgttgtatactctcattacactgtggaatatttaatgcctttttgttatgaaaaaactgtttttattaattaacatcaaggatatggtgctgacaaatattctctaaaattatggaatgttggaaactctgctgtctgacatcctttccgtgtgaatggaacatcccattcttgtccagagcatctgagccatacaggtcactttgacacaggattttcaatacaggtacaaagctttagatagagttttcagacccaacgtttcacatttgtcgtaattttgagatttccaaggaaagagcctgcttcctactcaggtctgatgttaacctgatgctgcacacagctctgctttgcttcgagtctatcaaacactgctccagttaattcttaccaaaaaatccccccattcccataacccaataatgacacttccgtttgatgagaggcattgaggttcctctggagtgcagtctcccttgctgcagcaagttaataaatctaactttgttgactacaggtttgttcctggtgctctttattggaagactttagcaatcttaaactgctggccccaaatcccaaaacaacgggaaactctactcagtatcttttctttttttcttttttttgagatggagtctggctcttgtcccccaggctggagtgcaatggtgcaatctcggctcgctgtaacctccacctcccgggttcaagcgattctcctgcctcagcctcccaagtagctgggactacaggcgccctccaccatgcccggctaatttttgtatttttagtagagacggggtttcatcatgttggccaggctggtctcgaactcctgacctcgtgatccgcccgcctcggcctcccaaagtgctgggattacaggcgtgagccaccgcgcctggccagtatcttttcttaaagattccttcttatacaagttgaattagacaagatggatcattttggcttttagttcctccaacattccaacctagttagagcggcttttctctgtgcatggaaaattcttcccccagatctcttgcctggctggcccagttcatacctaaggtagccatctgtcctcacactgccgcacccccaccccgtcactccacctcatcatctcatttcattttcctatttttctaatcactctctgagattatcttacttcattatctatttgtttataaattatcccaatgaggatgttaagatcaggagagagggtaccacgacagcgctgacagccgcagctgcccagtgtctagaactgtgcccaacaaacacttgtggaatgagtaagcagacgaggaactagacacttcgtttgccttcgtcccctttaaataccctccaggtggacccagccgcattaaaactctgagaactaggtgaatggcatttggcctcgccactggccggagcgtttgccgttgatccaggcaaccactgttttcccaccagtcgtgtagtcgctctacctggctccgccccccaggacgccgagcctcggccgggcggtaaaatcggcgcttaccctttaagcggcgggacttctggtcacgtcgtccgcggtcgccggaaggggaagtttcgcctcagaaggctgcctcgctggtccgaattcggtggcgccacgtccgcccgtctccgccttctgcatcgcggcttcggcggcttccacctagacacctaacagtcgcggagccggccgcgtcgtgagggggtcggcacggggagtcgggcggtcttgtgcatcttggctacctgtgggtcgaagatgtcggacatcggagactggttcaggagcatcccggcgatcacgcgctattggttcgccgccaccgtcgccgtgcccttggtcggcaaactcggcctcatcagcccggcctacctcttcctctggcccgaagccttcctttatcgctttcaggtacttaccggagacggggggcgtggagactacaggccccaggaggcccagcggcggctaagcgtaggctggcatgttgcgggcgcgcggtgcctgctgggatttgtagtgggtccggcgccggcggtttagggcggggtcctttgggcccggggaggctctgggatctggagcggggtgctggatagctggagttgtgggctggcctggtggggaggggttgacttcactggtatagtgagattgtgcttcccgctcttcgcactcagtgaaggaagcagtgagattagtcgttggtagttgtcaatctgttggacgctggcgattaggtccgcctggagcattgccctctgacctccctctgtcacccacgtgggtggcctgtaggtgtcaacttcaccaacttatagctgagttcctttcacgtttatggagtttttttgttttggttttcctataggagtgatttaaagtcagagatacaaagaacgagtgtattgttctgcatttccctctagacctaatttagtgtcccccacgtagtaatagaatgtacgaaggaatgggcaaagagtacatttgtccagaaatggaaggccttgttattttcttaagcatgaaggaaacagtccagagtaacatttctgtcaagagagtgccagttttctgaaggttatctgtattcaccaatttctgatttaaaacttcaatcagtggcag

SEQ ID NO: 11811 - DNA, 6000 bp, Homo sapiens
tataaaataggctttgcgttagatgattttgcccatctatacactaatataagtgttctgagcatgtttaaggtaggctaggctaagtgatgacattcagtaaattaggtgtgttcaatgcatttccaacttaacgatattttcaatttatgatgagtttatcggatgtaaccccattgtattgtaagtttcggaacatcctgcagtatagaatctcatcccaccattctttctactaactagcaggctgatgttgggtgagatattgtcactttccaggaccggaatttcctaatctatagaatgaaggagttggtccaagtgatttgtctcttctggtcccccttgtccatttacagattctccaactttctttttttcttttttttttttttttttgagatggagtctcgctctttttgcccaggccggactgcagtggagctatctcggctcactgcaagctccgcctcccgggttcacgccattctcctgcctcagcctcccgagtagctgggactacaggcgcccgccaccgcgccaggctaatttttttttttttttttttttgtatttttagtagagacggggtttcaccgtgttagccaggatggtcttgatctcctgacctcgtgatccacccgcctaggcctcccaaagtgctgggattacaggcgtgagccaccacgcccggcccacattctccatctttcatacttttccagtagctacaattaagctcatagcattgcaacttcagattttacagaattttaagacccgggagcaccacaaaagttcataaactcttggtctgccgatagagcccatcatagaaggaaggtgagagaggcagaatgtctcccacctttcaaggggagtgggacaccgttggcttgaggactggacaattctttgctgtgtgggactgtcccatgcagtgcaggatttttcttatccctaggctgggctccagttcccactccaccactcattatggccactcaaatactcccacacacattaccagctgccctatcggtgggcaacatcatgactttgagaaccaaaatccaagagatgtaaaaagcagatgtagcccagttgactagaggaacctattacacagcacctgttataatttatgatcactaaatatttacaaccatacaaaaagccctcccacctgtcttgtgccttctcttcacccagatcgtgtcttctcacacttccttcccagatagtttcctccttctcccctctgggcctccaagcatgcatccttccagaaatggcctgaggtcacaggaatgttccttccttccccactgctgctgttgctggtaattatcccagccaccttcctaagtacccatccacctgaggaaggagaaaaggaggggcacttagggaagcaccatctatgtcaaatcaaaacctgactatggccaaatctaaatagtcaataggtgtctacactggtagagatgttgaaaagtaaaaagacactcctgcctctcagctgtctatctttcacctggagccataaactgtatctcttccttaactaggcatttcctgtgctcagtaactcagcacccttgaacagcacttatctctacaatgagcattgcacatcaaattgccctgccccttgtgacctctgagatgtcactactcaggggtccctgaaggacgtggttaatgacacagaggtgggacacagaggacgtggccttgggaagtctgggctggcaaaaggagacagaggataataaaacaaaaattcaacactaaagaaaaaataatagtgagtgttcaaagcagtggtcattaacctacatcttcttctcttctccctcattctgctgtcaattcctggaggagagtttgtcttgcccaccactatatttccacaccaggcaccctgtgtggcacccaatagtctccagtctcaatgacatcttttattttctccaattcacaaagctctttcctatgttgagccttagcacaagctaagaacatccaatttggagcactttctctttttaaatgatgaactccttcttttaattcacagcttcagtgtgagctccttgaaaagccctttcttcatttaaagcaaagtacacacacacacacgtgtgcacacacacacatactcttatgtgcacacacacacacgggttactctttattctagcgtcctgcttatcttctccatagcccatatgacaatttataattatttatttgtttgtttcttgtatagaaatttgactgcaagttctaggaagggaaaatccatatccatcctgtccgtctttccaacaattagcacatccaaggcactcaacagataatagtttaaagaacaaaataataaatatataaaatcagaatttaataaacctatacaaaattttaattctatgttacataagaaattagctttaaataaaagtggcatcttagaccaatagtggaaaagtgcattatccagtaactgtctaggattgactgaataacaaaaactaagctgactccctttgatatagtttggatgtttgtcccctccctatctcctgttgaaatgtaattctcaatactggatgttggacctggcaggaggtgttgaatcatgggggtggatccctcattaatggctcggtgccatccctttggtgataagagagctcttgctctgcgttcacacatgatctggttgttgagaaatgtgtggcacctctgcacttcctctcttgctcctgctcttgccatgagacatactggttctccatcactttcctccataattgtaagctccctgaggccctccagaaaggaagcaccatgcttcctatacagcctgcagaaccatatgccaaaataaaaccacttttccttataaattacccagcctccggttctttctttatagccatgaaagaacagcctaacacacccttccttccttaatgtatgtcaaaatcaattccagatgaatcaaagatataagcctttgaaaattaagccattaaaagaacttggaggaacacttatgcaagaagatttaagcatcttaatgcagaaatggtttttctaagcaagtcaaaaataaaagactgatatatttgaatacatcagagctaatactttcttcacatatataccctcaaaacaaacaaagacaaaagataacaaactggggaaaaataattgttacacttcatgaaggcctagattttattataaataaagtgttttacaaacaaataatgaaaatactaataactcaaaagaaaaataaagaccacaaacaagcaaaccacagaaaaaaatacacaaatggctttaaagaaatgggatatacaatttccaggatatcaaatgaaagaaatgtaaatttaataaaacaccatgtttttatctttgaagttggcagaaatgacaaagtttgacaatatttagtgttagccaatatgtagggaaaatcacactggtatattcatatagtgggagtgaaattttcatttttttaaagtaagcctcatggatcagctggtctttaagagtggtccagcattttatgtcagtgtggaggacaacttggcaacagctatcagaattttcagtgcacatagtctttagccagcaactctattctaagattttattctacagataagaaagcacaacaaagatgtgtatgagatattcatgcaaaagatcaaaaacaatctaaatgaccttcaacggtagactgatgaaataaggtttggttcatatccataacagttgactacatggccactgaaaaagaaatgtgccagtgtcaaatatctctttagtatatgaaatatacactatattaagtgaaataagcaaggcacaaaaagacaaatatcacatgttctcccttataacaaatatcacatgttctcccttaaatgtgggagctaaaaaattgatcacatgaaggtagagagtggatagatggagaaaagagactggaaagggtgagttgcgggggaagaggagaagtgggttaaagggtacaaacacacactaagatggaaggaataaattcagtgttggatagtagagtacggtggctgtactcaacagaaatctattgtactcaggcaaacactctcaataccctgacttgatcactactcattatatgcatgtaacaaaatgtcttatgtaccacataagtttgtacaaataaaaaaagaaacatgttgtaataatctcagaaaaaaaaaggaaagacaagaaatatgcaaggcatggaacagaatacattgtacaaacccatttggtgaggaagaaaagacaagttggatcaagataaacagagaggtaggtaactagacaggcagaccgacggacatagctgaatatgcatggaccacttcaggaaggactcacggaaaacctctgggggaaggaaaaaggaagtcagtaggccgacttttcacaggacctttatgtattattagaaacaaatttaccatctgcacatattactttttaaattcaaaactcagtaaaattttttaaatgatctagtgtaatgcaatgtagccttcgaaaaattctctgtaataataataacaatgttagtaaaaaatagtaatatttttctatttggttaatgctttcattactaaaaggcataatattttaaatgaacaccagaatatgaaagaataactcaacaattcagaagtgaggcaggtttagtcttttaggtgggaagaagctattcaactttaaaagcctaaactttatttattaagaagtatattattttaaaaacatgggtaccaaggaaacctgggcagtctaagtttatctgtagctagagccactccctacccatccccaacaatgtattcaaattcagtgccaaaagttacttattaaacacaagagatattatgtccggggggaaaactgttgtaaactttgcctgtaggaggactgatctcttgatgaaatacagaaaaaccatctcagaaaaaggaaaatgggcaatcgtcatgtaagtactcattgcctttgggaattggttttaattttggttagcatgtggaagaatttaaactataaaatcatgactgatacttgtatactttatcactatggttaccctttaatattggttttagcaacagcataccatgcttttaaaatgcattgaggccgggtgcggtggctcacacctgtactcccagcactttgcaaggccagagtgggcggattacttgaggtcaggagtttgaggtcagcctggccaacatggtgaaacactgtctctactaaaaaaattaaaaaaaaaaaaaaagttagctaggtgtggtggaacatgcctgtagtcccagctactcaggaggctgaggcaggagaatcatttgaacctgggaggcggaggttgcaataagccgagattgcaccactgcactccagcctggactacaagagtgaaactccgtcccaaaaaaaaaaaaaaaaaagcactggggatatattattcccttattggccaaaaatctcttaagaggggctaaagagaaagaagtatgtaaaataaggcagtaaatagtgccttgcagagagcaaatggttaatatgtatctgtagaatgtataactaaagctgttagtttgtagcaaatttgtataaaacttcataaactaagcccattcagagttatgtgggaaagataggttcatgttgcaaatattaatagaccaaggtaaatactcatgtaagtccacacaacttggattgcaaggtgaaaatattccattattatttctaaacatccacatatttgcaaatatccatggaatggacttaataatttacatttcttttgaaatgtttaggctcctgaatagtgtgtctataaatagttaatgactaaaaactgactaaaacactaccttttggaaccaactacacacaggacagatcagagttgaa

SEQ ID NO: 11812 - DNA, 6000 bp, Homo sapiens
aactacattgatttcacaaccccacaagtcagttggaacccacagtgtggaaaaaaactgatctaggaggatttcatacatttcatacatttagtatatgtggatgccactttcaagtattaattcatgagatttactgtgtatgcccctttttccattccctcattcaatttttctgtcaatcgcttcaagaaaggagtagcagagacaaactattctttccatctttccagtttttatttttccaaaaatgtatcccaaaagaaaacttaaaggttttagaggtacaagaagttacaaggaacaaggaaaaacagaagaaggcaggaaaagtcagatatgctcaaaaaacaaggattctcactagactagaaagcagttctctgcaactggtggggttgggtgaagagtctgtgcatcctaaataatggctttttggtatatcctggagaaggcacagcatcctaaagtagaaggacaatgtgctatgtcaagtaaatgggatcatgggcagacctgtacaaaggttcacctgtctacttgttgaacaaaagcaatgcagaatgctgctggacccacaggataggaccacatgggtaggaccaacaaaagcctaagtggtgacctttgtgaatgaacagtcaaagaccagaagacaagcacatgcatgagggcatcccccacacacatctggcactgcattagcacctagaactatagcatcttcctgggattaggagggtacaggtgaaagtcccaagaaggatgtgggttaaatgtctcaccaactgtgcagaaacagaaatacattgattctgaaagggaaagagatattttttatgctaaattaatgaattaagattaatatatgcaatgatatcaatgcgactatataaatgtatttgcattataatgtctaaaaagtgctagcttagtcaacataaacatcaatagcccacatggagaaaacagtaatagagtgaaatatttttaaaaataagtctgtgatattaaaatagccatcagatagatttttttaagaggataagggaaaattatctgctttatttcccaatgggtctgctcattttttgccccaagacttcatataggtaccaaattaaaatgcatagccaaaagaagatttagtgacacgactgcactagctggaaacccactttttctttgctttcattactgcttttcattaccttatgttactaatcatttctctcatggtgtgtgtgagtgtgtgtgtgtgtgtgtgtgtgtatgtgttctttttattttaggacttcagtaagtaaagtcttaattactgatgtcatagttagctcatcctctagttaaaccagcatcaagagaatcatcttttaagaagaaaatatttaagtctatctcccttgcagttttcttcttctgactgcctgatggatgagctatgcctttcttgtctcagaattgttttcccactgatgagacactcttctccttccaggcaccagaatctaatttaaactagttcctgtgaagatccaaaatgtctacaaacattttttcctgtatttttcaaggcagagaaaatataagataaaagtaacatagacatcttctgtattctattgtgtattgtactgcattccagatgaaatgtgagtgcaaagtttttaattcatagaacttttcaaagatgatccctatgtatctaagacattgacatttcctggagtgctgtcaaagcagctgatacttttgatatttcctaagagtaattcttccaggcaaggcaggcatgtaatattcctttaaggattttctactttggaagctgctttgtcacaaacaccctccttccctttggaaacaggatctctctggtttcatgtccccttcctgaactgagtccatcttttcttttacatgtgaatattttatatgtcttcagtaagtgtcagagtttctatgcgtacttagcaaaggttatggctcttaaaaaatttaaattcatatattaatataatcaacctaggaagtcaaaggtacatcaagggagaaaacaaatttccttttcttaaacatatctactgtaaatgtggccaatggtatgtagcaacatcactaaacaaataagttattttccagtgaaacaataggatatttcccccaccaccacaactacctaaatgaaataaattacaccaagttaagtattttcgttaaactcaattgtgaaagtctggtttttttctataaattatagaaatagtgtctaagttttgaacagaaacagaattagtaggccctccattcaaacaataaagagttctactaccttcatctgcgattcaggctcatcctaacagatttctcaaagtctaaatgtctcagaagtttcttatttactttgcctttgaaaactcaaaaaagtgacatttttatttctatcagttactgactgcttatgacagcatttttattgagcatgtggatgtcagattcctgcaatacaactttaagcattggatttaaccacgagatcctgggcaaggtacttagccacatgaagcctcggtactcagtatcctagtcagtaagatggaaataataaaatagagaaggacctaattcacataattactagaatgattaaatgggacatttgtaaaaaatcttaagaaagagctgacacctagtaggtgctaaatcgtggctaacattattattatcttattatctctatgtaaattatagttgctagaagttgggggatatgggcccaaggaaaatcagtttttcgcttcagggagctcactgtttcatggggaggagtgacagatacatacgccaatggctagtccctgtataagggaccataccaaaagtacccataacagactattaaacagagaaggaagtcattagttctcaatggggatatcaggaaagttctcatgcagagacaacattgctcaaactttgaaggatgaggtaagcaagtatattcagggaggaatacaggggaagaggaggaagttgtgtgcaaaaagacactgaattgttaaaacgctgtcctcagatcacagtagagaccctgccttaataaatatgcagaggataaatgaaagcattatgaaagatctatcatagcttcaaaagaatgtgtggacttctcttgattttttccctttcactctctttctttctttctttcttcttctttctttctttgacggagtttcactcttgtcgcccacgctggagtgcaatggcgtgatctcggttcactgcaacctctgcctcccgagttgaggtgattctcttacctcagcctcccgagtagctgggattacaggcatgcgccaccacacctagctagtttttgtatttttaggagatagggggtttcaccatgttggccaggatggtctcattctcttgacctcgtgatccgccggcctcggcctcccgaagtgctgggattacaggcgtgagccaccgcccccagccgacttctcttgttttaagtggctcttaatcatttggtggtttgcatattccaaaaagcttctaaatatttgtgttgaaccaatgctttcattcaaaaacagaatgcttcttgggctgaatggcactatgtcatcccaacaagaagaacatcggaatctaattgtgtcatccatgttcttattttaaaacaatctacggtaacacccttccagccatgaagcgttcagtcagttgaacagatgtgatgtgttctccctgatgcattagcttcaacctctgagttcatgaaattgagtttctttctgtagcatgctgtgttcattcatcagcctgagtcattttatctgattgggtccaatctccccctccttggcccgcctccttttgctgctgaataaatcatcctgggagctgtccaggttggagaaagattttcataggaaagttccaactgcatccagcccctcatttattcaggctgagtccttagggccccaaggagaaagaagtgagaaaataaagtgatgccttccattgccaagtttgctaatatggtcattagcacagatgccttcgggcaatgcccgcagagagaggacacagctacccacacattctggcatagggtctataggacagccttcccagctgtgctccgtctgggttcccatctcaagttaagagactcattacccacccgagttccagtagggtgaggctgatgagtccaagaaattcaggaaggaagaagcaagaagcatttctttgacaggaatgtaattgcaggggttatttcattaagggctagataactgtaacacagagttgtttgaggtacttttacccttaacttccaggcccatgggataggccaactattctgggagatctttaatgttaacagattaattcatctacaagcagagttaaaaatagaatcagccgtctatctatttaaagttgagcgtttcattttggctttcttgggggatggtagaatacaacttaaaaggattgaaattaaagaagtcttttccagggagtgaacgaaattctagaaatctactggttagggattggggggaatattagaggattcttttctcttccttctggaattctgtgtgcaaggcaggtggcccgttttgggtttaacccgaagccgaaatgcgtggggagaaaaacaggaattaaaaagcaaagaattaaaccccgcgtttctgggacacggccgacagaaataaccctggagacagtgtatgtggttgggggtgggggtatcgaaattatttttccttaggacaggcaggagggaagggagcttctcttcttgctcaggagggactgagggggcggcaaggcaaggcggtcatttgggctttcatgggacgccacggggagccgcgaacgcgcccagggcctgacgtcattggccatcagctgactgtgctctgggcccgggctccactggctgcagccgcagtcttggtggaggaggtggtgaccaccaccgctcctccacctgcatccggctgcgggactgcggcggccgcgtttgccctgcagaccctgcaccccgggacgcggctcatctgtcattagcaccggcactaagctcccaccgctcagcgacttggtccgccgcaagctccgccgcaggctttgtccgctagcgctcggctgagtctgggcgggcgggaaacctgggctagggcgaggcggggcccctggacatgcctttctccacgtccgcctcctcgaccctattgtaagcggagaaacttagtgtgcgaggcaggcaggggacgtccccattttgatgtcccgtaccctccacccccttcggatcgaggtagtaaagaggctcctgtaggaaactgactgcctctatgattgcggcctcttgggggattttgcgtttagcccgaaagttggctttgccaaaagacgcacgggtaggaagggcgaaaaggaaaccctgtattccgtcgcgctgggctctccgagtccgtgcgcaaagcggcctacgagtcctggctccgcacctgcagaggacaagagccaatgcctaaaaaagaacagcggaggaaccggctggcgcggccagctggaacgctggatcgcagtgcgcccagggaaggccgggggcgcccgccggccctagccctcagtggtcctctcccacgccggcccgcgcgtgcctctgcctacaagacctggggcgtcctggccagatctggatggcaggtccctccgccacccccggcccggttccgggggcgtggcttggcgcgggggcgggtttaagtcaccgcgggtgtctgaccactctgacaggtctccaaatttctcccagtcgcctggcgcccgcggtgcgtttcagagctccagggtggcacgcggcggcgcttccctagatccagaggcgtctctgtcgacttccacgcggcctcgggcctcccttctcctccaaaccttcgcctcatccgccaa

SEQ ID NO: 11813 - DNA, 6000 bp, Homo sapiens
ggaagcaggctagaaataagtctggcaacttttttcaggtcactaagtgcaaagtcacagagccaggacgatctaaatgctgaactctattctgccctcctctgctgagtgacatgtacaagggtgttccttagcttcttctcgttccttcccaggaaggcttctcacctgtaagggaacaagagttcctctgtcctagtgtacagtgatatgaagtctaggaaagggaaagacaaaaagaagacctggaggaagagaagagggggcagtaaatttgaggatttgctgagattgggttttcaagaataaaaaacgcatatagggtagtaatgggatccattgttcccaaacatatttccttttggcccgggttgttcctagacccagaattagagcttgtcgtgtctcctccaaacaagcaaagagtgctctttttggctacaaagatctgtctcactggctcctctgagaggtagatttatacccaggtccagagtaagcatttaggggacaaatgatttcatcagaagtagtttcatgtggaattctttgacggtgaatgaggcattcctaaatgcatggatggtgttgttggcagaatcattgaggactggagaggcaattctgtacccaggatacgtgtctattccagtaatggcatatgtccgcccccgcccatgtttggaaggtccagtgtaatcaacttgccaccaagtggctgactggtcccctagggaaggtgccccactgggggctgagcatctccattgcttgcaggtcaggcatgcttcagtcctgttggcagtagtcatgatcagaatattcacagagggtgtttctgggtaacaagatgattactgttgccttctggctgatttacatttcataatttcctaacaactactttgcatttcttgtgtaacaaataataaaagtaaatttaaaattggcctaaagcaattatttaatgtgtttagggaacagagtgagaggggcaggcaggaccaccatttgcatatgcctgtgaacctgagactgtcctactcattcaatgacagtcataataaccatcactggaatatcacctcatcatgagatgcttacaaccctggatttacagaggcagaaatgtaggctcagagaaagccctttgtctctctctttttactcattcccaggaagtgcctcacctgcaagggagagagagtttacctgaacatctcgcctatacattgagatgaagaccagctaaagagaaaagcaaaaatgaaagctaaggcatggaggaggggaagcaggtgggtgggttttcaatgttacactttgagctggggctcaaagccaggagaggaatgcctcattgttgtccttgttgatagtgtgtcgctaactctttgctttggtgccatgttcagctggaacctgaggctcttagggactttaggcctctgagaagtttccttccagtgggatataggatgtttgattttctttagctgaaacctgtgctgtggagcgctgtgattacacagttcctccaatgacactcagtgcacaccctgcttttgatgacatttccaaagcccctattagaagcctaaacactgcttgccattggattataaaaccatcaaagcaactccatttactagactcaactacctggcagtttccctatcattgggtttaattggctcagttatgaatttgttattgacttaacctcatcttttatgggaggcatgcaaatagcccctgcaccttatcttaaattgtaatacttgacagtctgaagctcccatcaaaatagaagtcttttcatgtatctgaggatccaaactgtcattctgggaatctgaacttttgattaattgcacaataataaattctcacatcttctttccacattccttgactcgtcttctttttatgtttatctagtgagcctttttattttaaatactgtcaaaatgtttttatcatgtttcttaagttgcaaggagcataaaggagcagcaagacttcctaagtatgaagactttcacaatggtaaaacgaaaccaaacaaaaatctcacccacaaacatacatggaatgcttgtgtgccaggcattgtgctgagagctttacactcttcattcgcttattcatcatttattcatgctgccaacacagattgagagcctgtgatatgacagacacacttccaggattcaaaactaggatgcttagtccctgctcttgtttagtaagataacagtaaacaagtaaacagaatgtaaatgcgatcatttttggcagtgataaatgtaatgaatgaacaaaacaggaagagactgagggagaacagcgactttggaaaaggtgctcagagataaagggcaagattgtttcctggttagttgggatgggagtaggacaggaagaatacacgtgagtttggtgtgttgggcatggcagggctaacacatgggcaggaggaggctttgcagtgcccagctcccatttggagatattctgatccaagcaattccctttccttgggctttttctcctttccagagcctgctggactggttacttactccaactcactgctgagcatttatctattcacggatgtacaggggtcctactgggcactgccacgtttccatatgctatttcctataattcctcacaaaacccatcaaccagtgaacagccttttcccctggggttcttgtcatgaactcttcccgtttaatattaagttcccatgctagagtctgtttctggacaaagaattctgttgcactgagagtttatttttgtaccgatcccacactgttttaatgatttcagtcttacagtttaacttcctctggaaactcctcccttcttgatttggagacctcttttgaggttctcccctttgatagtcattctatagggtggtggttctctgacccttcccctgccccagcccatacattcctactcccttcccttccttcttcccttccctgtctcctatgctctccttggccaacttctccaggcaaatccagagctggtgttcttgcaggtctgattcctcttttcttatacactagggatagatcctcggccttgttcacagggtctcccctcaccccatgtctctcaccccagctgacagacatgaggtgagagagtgggaaggaaaggaggccacagatgccatggggcagcaggaatggaggcttccccgatggcggtgggcatggaagaagtgcaggatgctcctgtcctttgtcagtgtcttacaagatctagcctttgcctgtggcctactctcattaagctcaagccacccttcccctccgcacccgctgttctgctgtttggagggctctctggacatttacatagttgctcccagcttgtcattagggtctcacctcgaagcatcacctccacaataaggccttccacgaccagccggtttagagtgactcccccagtcactatagcgcagcactctaatttgttaccacatactatttaccaatatcggaaattctactgttaaaatttgtcttttcattgtcttccaccggctaggacggaggtcttaggagtgcagagacctcatatcttcaggacagagatcactaccctttgccagggaagctcacgaggggttacagattggttgattgaattgaaatttggaccagagagggaatgactggcttgggtgcaagtcgggagcaaagcaggaatcaaagattctgactgcatttcttcagtcctttgcccacccagacaggtgaaggtgctattcaaagattgggggaggagagggccgcggcatccaccatgaaccacgaactagagggaagagggaagagggaagagggaagagggagtcacgagcttcgctaccacagagcaggtgcgttcgcggtgcgcccggccttgaccaacccgacaacttggcttttacctctgaagccgaggagcaggggtagggggtgagggaaattcacaaagctgcaaccacagagccaatgtttggtgggcgacaaccccccagtccctcctcccttcctcttcttcccccaactgcccgccgtcacgccccatccaggggaagccccaacgcccacgggagctccaggagccgggctctgcagccgcctggcgcactgcctggttgcaacgggggcggcggtagcccaggcgatcctgggtccccagacaatcagcggtgggggtcggcgggaagaggcggggcgccgccgcccgggcctcccgccgcgacggggcgggacaatggggccccaccccggggaaggagggagggagggacgcggcgtgctctcggcccgcggcgcgctcgctgctgctgctgctgacaggctgaggctggaacgggcggggaggggcgcgggtgggagcgcggaggagggaggaggcggcggcggcggcgcgtgtggctggcgggcgggagggcggctggcaccgggcttgtaaataaactgcgatgctgtcttgggctcgccggcctgggtgccgccgccgccgccgccgccccggagcgccggttccaggctcccgccgccgcgcgccctagcgcctccgcgccagcctcgcgcgccctcccagcttctccgcagcccccggcccgcgaccctcggggtcctgcggctgacccgcgcgggatgtgaccccctgaccccctgcctggcctcccctgccccccagggggcccgcctttgcctgcttttgggggggggtggggaggggcgcgcggatcatggcattggagttcccgggcttgcagccgccgccgccgcctcgttcacgcaccccgagcgccccttcttcccagagcagcagcggagaaggcgaagcggccggcgggggcgaggcagatggggctcaaggcgcgcagggcggcgggggcggctggcggcggcggcgacgggggcggcggaggcggcggggcggctaacccagccggaggggacgcggcggcggccggcgacgaggagcggaaagtggggctggcgcccggcgacgtggagcaagtcaccttggcgctcggggccggagccgacaaagacgggaccctgctgctggagggcggcggccgcgacgaggggcagcggaggaccccgcagggcatcgggctcctggccaagaccccgctgagccgcccagtcaagagaaacaacgccaagtaccggcgcatccaaactttgatctacgacgccctggagagaccgcggggctgggcgctgctttaccacgcgttggtgtgagtacccggccgctcggggcgccctcggcggcggcgcgcttggggacttggggtcggggctggagctgagaagtctctggggctttaagacccatggatgctttcccgctgaaggggagaccagcccgtcctcagcacgcgtttccctgggtgtgtgtgtgtgtgtgtgtgtgtgtgtgtgtgtgtgtgtgtgttgccgctctccgggtgttccacactaggggcttaaaaaacgaagcgtggttcccctgctgatttgggcggatgtgtgcgcgcgcgggtgcacatttatgacatcttctaggggtgttggtttggaagcttaaaataattatgtgggtttttccaattaatgtgagggttgaagaggataaagcgggtcctcccgtgagctctgtgtttctgtttcgggtggatcccttctgttgggatcgccactgagtttagttggggatgggaggggtgcgcaccacccatagtggggagcgtgtgtgtgtgtgtgtgtgtgtgtgtgtcgcttgcttgtgccacccttctgatcgctgggtactggtacagagaagaacctggtgctgctctgactgggagctgggactggccaaaatgcatgttctaggattccttttagggaagtgaatgggaacgtgtgtgtctaagcctagactgaggggctggggcttcacagagccaggaggtgagggggccgggga

SEQ ID NO: 11814 - DNA, 6000 bp, Homo sapiens
aggtggagataattgaatcatgggggcagtttcctccatcctattctcatgatagtgagttctcacaagatctgatggttttataaggggcttctcccttcactgggcactcattcttctctctcctgctgccttgtttttttttttttgttttttttttttgttttttttttttgttttttgtttttttgagatggagtctcactctgtcacccaggttggagtgcagtggcgcgatctcggctcactgcaagctccgcctcccgggttcacaccattctcctgcctcagcctcccgaatagctgggactacaggcgcctgccactgcgcccagctaattttttgtattttttagtagagacggggtttcaccgtgttagcccggatggtctcgatctcctgacctcctgatccacccgcctcggcctcccaaagtgctgggattataggtgtgagccaccgcgcccggccctgctgccttgttaagaaggatgtgtttacttcccctttggtggtgactgtatgtttcctgaggcctcccaagccatgctgaactgtgagtccattaaacctctttcctttgtaaactacccagtctcaggcatgtctttcttagcagtgtgatcatggactaatacaatcactcaatgtggcttctctttggcaacattagccatggattctgtacgcttagggaccgtgaggaacaaaacagcatgagattaaatcaagcacaagagaaaatgatgcaatcgaaaaaaatgagatgaatgaggctactgccggtatgacacagaatactgttttacagtaaactcttggttttataagcagaagaagcacactctaaaatgatttaaagtatagtacagtaaatatataagcctgttacatagctgtttattatcattatcaagtattatatactgtacatattgtatgtgccatactggtagtgcagtaagtttgtttataccagcatcgccacaaacacatgagtaatgcacggagttgatgttatgccagctacaccactaggtgacaggaatttatcagtgtcatcagaggggaccactctcatatacgcattccttttttgaccaaaacgtcattactcagtgaacgactgtacatgtgagaagtgtggctgggttctgccaaatagtttactaactcaaatgcctgccaagattctcagagtcaggaccatgtctcctacactccctctaatgcatcatctcctggaggactgtccttctgcacagtcattcatgggatgagctcaggctgcctgggcagtccatccagtattggattggtgattcatgactctgtagatgaggcctgtcagtcagattcctctcctggaaaaactaaaacacctggtggaaccacagtgggaagtgaagctgaaaagattatttccacaattgccaggatgcagaaaggctgaggccataaacatgcagaaaactttagaacagaccccaggatttaacagagaaagcctgtgggcagagagagaacagagcggagagggggagggggggcagcggtgggggtcgggagggagacagaaacacagagatgggctctctctccttgcagcttgttttcagcttcagtctgcacatctctacattaaaactcttttttctaaagaaacttgagtgagttcctcacagtcccaagagccctaaggaaaacactgtctaaaacacaaaacaccatgtgctgtgcccagcacctctgaactcatctctgacaagtggtgcagcccttttcttttctgcacaatcacccaaatgggaccagaacccattaggatctttccactctgctgtgccaagaaacgggggtagggaaaggatgaaatcaatttccttaaccatcattactgagagctttgctggtgctccaaaaggtaggaggtggcagcatgcagtaaatcaatgtcagcgctccctggagacccactgtgaagacactcccagtaatgactatgatccttgttctctggcaggatgtgatgggacatacactcagggtgacaaagaggaatgcatgcacacacttctgacacacagcccctggcaagggtcctaaaagggggtgttaagagagctacttgcatggaatgtcaaaactctggaaaaaaagggagagggagaggctgtccctgttacctgggaagaaacttaacagaaagaaagtggggctttcagaaaaggccttgcccaggttaacccttcagagatgaactaaagatgcatctgatgtacaatgttttattcaaataaggtggtgatttatgtgtgtttcaccacaatgtcaattaataaggaatttccatctcactatggagtcatccaggggaacttccaagacatggtcctgaagcctccctccaaccctgagaatcttggtgggatttgcgttagcagaactgtttggcagaacccatacaatctacactattcacatatatagtcatgcattggataacattttggtcaatgatggaccacatgcatgtaagacagtggtctcacaatatattaatgtagctgaaaaactcctgtgcctagtgatcagaacatcaactcaatgcattactcacatgtttgtggtgatgctggtataaacaaaactactgcactgccagtattgcacgtggaatacatacagtaagaactcagctaaaactgagctgcttttggttcttggctgcaaagtgcaacagctggatgacctggggctccttacttgccaaatctgatcctctttccacagaatctactaggatatagtagcatagtcttatatgagtatagcattttctatttttcgaatatgttcccatacattatttgatccatacaataaacaacacttttgttatttcatccaaaaactctttattggcccagacgatattcccagccaaagctaaaagtctggtgcatgttagaagctcttctttgctggaagacgctgctggtggaggggacagtagccgatgtaagcagaactctctgcccccctcctcccatgcacacaagcaatctggagatgcagtgaacaccttgacctgagtttcagaaagaggaaagcccacaggatgtgtccaggcagacaaaagggctcaccccttctctagaattctatcaaaaaccaagggcgtcaggcaagaggtctcagagcaggtcccgaagtacctaaaaggctattcatcttttccttccctttctagtagttatttttctcattctctctcctcccccttttaaaagctggtttttcttctacttttctcatctctgaatatttctccttttctctcccaagtccctgaagtcttccccaacaccctagcccccatcttctagcacaggtcatcttcctgctgtgggcagggacctgacactggagaaacccaccatctacacagctgacttactacatgtcaaagacagttctaaaggttctatgtgtacgaattcactaactcatcacaacagctttatcagacagacacttcttaggtcggttctcacagatgaggacaccgaggcacagagtcacctaggctgggaggttcagtcactagcccaagctcacacatccgttgagtggcagtgcaggatttgaaccaagaagtccggccatgcgggccctggcctgaatccctgtactacagcagccgtctgatgaaacaaaggctgggggactctccccttccactgcaaaaggttgatctctctccagctggagcaaggggcgctggaaggatgcaatgaccccaaaggcaaactgtgcctctttcctctaacattcctccgaaaagttgcgaaagaggtagtctcagtaaggggttaagaaccgtaaaaccagatttacatgacttgtgtactgcatttagcatcaaagcgctgcactctgcctttcagcaaaagaagtctccaccgcccccgcttccctgtaaaagagggagggctgaataactgcaagcctaatccgcaaaccccaagctccagccgcagcctccgcatctggaaggaaaaagcggcggcaggcgagccagggcaagggctgggccagggccggggccgggaccagggccggccgcagtgcccggctctgtggctctgaacgcggttctggccgcaagagtcgtccagcccacgctcctcccttccccctccctaaatcccacctcgagtcccgcgcccttagaggaagtgggtggctctgcccggtcgccagcaggggatcggccccttctccccaccgtgcccccgactcgagttcttctgggcactgccatcctctcggtgcgtgcccgtcttcctgctgaaacggaccccagtggctcccgggcctcccgggcgctcttccttagccccgccagcttgagggccgcgtccagagagcggggagctcctctcggggcgccgatcaggtccccgcgccgcagccgccgcctccggcgtctcccaggctcggcctctgccgagcccgctgcggtccacgtggcttggcagagctaaattcggcttgcaggaagcccggagccaagggaaagccgagccaagttggggtgggcggggccgaacggaggcgcagagtcgggaggggcgggcactgggcggaggaaggggagggccgcgcgcaggggaggcggtggctgggctctggcgcgccctggcacccggccccggccggccagggaaggcggcccctcctcggtcgccccgcctttcactcccgttacacccgggggaaggtgttcccgagccctctcccaccctcatcccgcctcctcgcttcctcggctccagcctccgccggcggagcccactatgccagacagtttcgacactttgcaaagacaaagagccctagaccggagggaggaggaggaggaagaagagcggagagagaaggaagaggcgatgtgagctgggaagggggcaagtgtccgggacacccacacccctgtattctcctccgaaccccttcatgcccaaatcccggaaactccagcgtgtctccagccgtggtgagtgcgcgcgcggaggcgaaccctgctcggggtgcgcgggggctgcgtccgcctgagttggggctcgggcagtttcctgtggattctcggagtggaaggttgattgtctggacccgggaactgaaggggtggggaggggactaggagggtgtgacagtggagctgggactgaagaccccgggattctagtggaagacattcgaagggagaccccttccttggcagcggcgaccacccagggctttgggagaggaagaaggtcggggtggaggttcgggcttaggggtcttcggccgacactggaggagctgcctggagctctgtggggaacctacgccaagtcccgggcagcggttcccgaaagcagccccagtgacattgcacccggcgccgggctgggatctcctccgctggggccgcccgtgggaggagacctcgctgggtggccgggctcaggcgctctcgagcggatttggggtcacaggctgggacaccgcggaggccgccagtgttctggacgagcggccgtgggacagtatccggatcgagtcccccaatccgctgcaagcaggcgcagatccgggaggtggctatcggccccggggacgccgtcagagcgcgctgctccggatctgggggtgaagttgacacccgggacaagagagctgaacgcggcgtggcggacagtgggggacgcgggtgggccaaggagagcacggccggagtcgtgttagtggcaactcgaaactctgaatccgccccaaccccgtgaggcgtcgcagctcccaagaaataatctgacaaaagttagcaacttgcctgtgtctctcgtgtgtgtgacctgcgtgggggcagggccaccccttctgggagcgcacggggacggacagcggtgaccctggggcgaggcgctctggtgagggtacagttagtt

SEQ ID NO: 11815 - DNA, 6000 bp, Homo sapiens
cctcagcacaggttcccagcacacacgtgtgtgatttgcaggttgtcgacattggcctgcctgccaggtggtgcacagggctgtgtcctgatgcagagactgccaggtaaccccaaccttccctttttactcagtgcaagagtccagctcttagctgagaacacagcccctggggtggagacatgtcctagcctcctctgcagctcgaaatacccgagacccagctgtggccaaggggggctgtaagcagaggtggggtgtgcaaaatccaggcagcatccgtaaaagcacgggttgcaaggttgggaagagtatgccaatgtttcctccctgctggctgaaagcagacatgatggctggagcttcaacagccgtctggtaccgtgaggcaaaaggcctatttggggattgatggggcaaccagactaagggggcctggggtcctgatgattgtgaggccacctttccagtcctactgcctacctggacataaaaatatcacattaaaagcaaccgtcaatcaagccactgttatttgggttgttctgtcatcagcaaccaaatcaaactggacgctatccccagatcctagcatgttgcgcggcgtggaagtaaagcttgttcaatgagtgaaagaggagacaggctttgccgatgagatgaactgtggcaggaaagaaaagggcagctgtgcccagcagcaggcctagcggtggctgtggaatctggggggactgcacccttgcagggtggagactcctcctgtccccacgtccccacctgctgatctgaggctcagggatgccaggagggggtcggggagtgggaagcattcccaggaagggtggcaagtgtcctttcctggacgatgcatcagcaagaacagcactccacatgcttgttgatggattttctattcttttacttcatttttctttttgtcactcctgctccgtgttaaacaccttgggaggctgttatgcacatcaggatggagttggtttctaagagcctgatctctgatgacgcagactgagtcttgaatggtcagaccactgtcctgtgctggggctgtgtcaggcccttcccagagactcccacatgtcccctcatgacactgcctctgcgtgggtgacaagggaatggaccgccaccctcccacacaccccatgcccttggttctgcccagccctttaccaacctcactcttgggcaggcctcatgactgctctgcccctgcattgcggctttggtgaacaagcctagagaaggtgtgcctcaggctgagcatcacacagcaagacagggcttagtctggtgttaggaccaaagtttcttctcctcctcgtctttttattttttaagatgtggttggaagcccgggctgcatggggacatgtggaaaacaggcacctgagagtgtggctcccgcgccctcatgcctcacaagctcctccaggctgttccaggtgtggggcactgtgtgttccaggtgtgtggggccatgacgcgcccttggggcctgcccgcaaggagccatcgttgttgaggggcaggacgcagctaatagaacgatgtcccactcccgtgagcttaggagcccaaatcagctacaatggaagtggcactggcttgagttacagaaaacctgacgaaatccaatgaggcagccccataaagggagcaggggcttgttctccccatggtgatgagtctgacggtgccattggggcaccaaggcagctgctcacatcctcagcttgggaccctgccccttgctggccacatggctgctgtcctcgggatgccgtgcccacacttcaggctggagccaggagaaaggaagactgtcagtgaggtgggtggccacagctgccccttccaaaggaccaggaggctcgattgtgcctcctgcagtcatcccctgggcaaacagtgtcacagctggcccagctgctggtgaggctggctacattgatgccttgaacaaaactggggttctgttgctaagggacaaaggaggcctgggtaatagtgagggcggctcggcggggttggtgggtgcaggaatcaaggactgagtgcccgtgggctttgctggagcagaagctgtgctgggagcagagcaggaggtgcacaggccttctcctgtccaggcaggggctgcaggggagcaagggatggtctcctgagcaggtgacattgaagccaggcagcagagggtagagaggaagggtgggagggtggggaaactcacgacaaagccataggttgacactgacctggaaattcagcttaaaccctgagaagtccatgctactattcagagagggagcatttctgaggttggctttagtgggtgctgcctcaacgttccttccgaaggccttggaaccaccccctaaccttgttgcccacattccctctgggacctggaatggtagatccaatttggggggtgccagctgaggaccaggcaacccccacccccttaggtaacagaactcagcgtcctggggccaatcccacttattcaccctgttggtctcgctggttggccaaggggtgggaccagagttcttcccagggagtcctgcttctctggaggaaggagggagcccagagctgcccgaggtcatgtgatgacctcttccagggaggggcagagatgagggaagggaggggagccccggccctaggcccaggcagctattggctatttccctcatcccttcctgaggaccccttagcatcctcctccccctccccatcggctcagcctgagggagtgggctcctggctcttccacggagaggtttaccttccctgacttgctgtggggcactcaggcgggctcatcccagatttcggaggagccaacaggtacggagcccctcctctggtggttcctacccacgctagaccattccccctgcagtgtccaggcacagaaacagccccatatacgccttgtatggtcaagaaagcggctcctggaggtggtctgccctgggaggaaagggcttcactttcccctcctttgcacacctgaacacggagctgtcagaggaggctgagtgaggtggcggccagacagacagcgccagccacggaaggggaggtgggcaccgtgccaggcacccggcatcctcagtccagactgacagctgtcagacaggcattggtcctggcgaaccttccccttcaagtggaagctggggggtcagcagtcatgggcatcctccctggttaggagccggcttccctgcactctagctgtcctagccgaagagtgaagccctgtccaaatcatggcgaggctgcaagacaggcacacactactgcctcctgggagcccaggggagactgaaatacaccaaggcaaggagcgtgggtgggcccaggacaggccggcctgagcaccagcccaggaatgctggtgggcatgtgcccctcttccctcccacccatgtgtgcacacatttgtgccatatactaccgttcccatgttcgcgcctgggcacacacttgtgccagcatacacacacttgtgcacttgcacctggtgtccaggaacactccctcagctcacagacgtgcgctgtgtgcacagtaccacgcagtgtccacgagcacacttttgtgttcgtgttcacagaacccgtgtgcgcacacgtgcacagtcctgggctgcagagaaccccagccagcggggcggtgggggaaggggagggcacgcctccttcccaggagctcagcaaggctgtccgcgggagcccagggctgcctgcagggctttggcgtaggcctcgcaagcacagcaagcatcacagagtgagggcggcgggagaacctccgcttgccggagaaggtgcagcggactcatcactcttgctctcctgccttgggtgtgactcttggttcacctctggggaaacaggctgaaaggtgaccctggcggcccaaggacacacacccattgtccgcaggttcctcccaggtgtcttctccagcaggtcaccgggagagcgaggggctggagtctttcgggagctcagtgcccgcaggcagagcagggaaagggaggcgccccaggcccctgcggaaggaggtcccaggagggtctccgcaaggggctccatactctgcacttcagctcctccagggaggggctgcgacctcgggcaaaggtccctcagatgtcttgagactcagtttcctcgttggtgacactgggagtccggagtccccgcggggcctgccagcccccgggcgagcacggccccacgcggagcccgtgcagcctgacttggggcccaacgcccgtccccgcagcgcgagacgcgcaggtgcccggccctgccctggccgagacccgccgcctgcgcagccccgcagaagctccagctttggcccgtgtgaggtccgggctcggcctgggctgggcggagcccgctcccgaagcgcctcagcgccgggccgccgccctccacgtgacctccaccttcgccgtcatccccatatgcaaaacggggaaacggggaaacggaggcccaccaccaggcaggtgaggacagccgactcgcgcgcgcacccgcagaggcctcttggcccagccgaccgccgtccgcgccgcttccggctccgcgccggggcctctggggcgggtagtccccgcgcgcgtccgggaccggcggccattggctggtgcgggagggggcgcgcacgccggcggcgggaggggccgtcacgtgatgtttgggtgcccgccccgcccgcctcgcccgccgtgagcgcccggagcggtccgcgagccaccgaggcccaggtgaggcggcggcggtggggctggggcctggccggggccgggcgtggggcggcgagggcgaggcggccggggaccagcgcggggcccggagcccggcgggggccgcggcgtggcgtggtatggggcttgcgggaggccgggcggggggcggggccgcgccggtggggaggggagggggcgggaccgtgccgggggtggaccccaggggcgccagggaccctgagccgcagccccgcgagagcgccgcatttcggggaccggcccgcgggcacatgagcccctcggcgggtcctcgcgcgctgttcagaccccaggtcggtgggctctgggccgggcagccggtgcctgcgcctggaggtcagtgccgtcccggggagcgccccagcgcctacttgctgggtgcaagggttggtgccctgcagctcaacgagcggagcccgccttcgagcctgagctggggaccccgttcctgtgtgcttgcctctccatgcctttctgtcccttctccaagttgtaagaaggtgcttcctgggtactggggcctgcgacatccccaccagggactttcaggtgatgttgatctgtgttgcccccgcagaaactctccagggacctcgtgtttgttgcctcatggcgcactcctcctgctctggaagctctgccatgtccagtgtggtagcccctaggcatgtgtggctgtttacattgtccttaacgtgaaggattcaggtcctccgtgccagtggtcacatgtccgacactcagtagccacacgtgtctggtggcggctgtgtggggcagcgcgggtagggaacactgcttatcacaggaagttctgtgagcggtgtggtgcggctcaaaatgggcctcgcgcgtgctgctccgccggtgcttctccgcccctcatcctgccaggtgcctttccagccacacctggcgccctttctttcctctgctgcacacttgcctcttcttttagttcctggctcgctcctggcttgggggcagctccgcttccggcatgtctgagctcacctttctgaccgctctccctacagtatttcttgtttgtcattgtcactcatctgcttgttttctgttttatctttagtgtctgtgagacaggggtggggattgttgcttaggatactcccagtgtggacacagtattg

SEQ ID NO: 11816 - DNA, 6000 bp, Homo sapiens
aggacagtcacagctcatagcccatcactgccctctgccctgtgcctccaggggtccctagctcagtctcccagcctccaggctgcttctctgtgaccctgctggacagctcctcaactgtcctggacacaacctgaccccagccccagccccagccaagactctgtcaggcatcttcagtcccacacagggcctgcaaccttgtaggtgtggacagcgcagctggccagagggggccgacagccctgcccccatgtcctgagtgcccctgaaggaggagctccctctgccagagcccaagctcagaacttgcagggagatgcttaggcataggattgagtggtggggccccaaggcacagccactgaggtttggccagcacccaggggtggggcactgtccctgtcatggggtgcatggctgactctcctggcccatcaccggatgcaattttctctatgccttaaaaatggaaatgctaaaagcagtcaaagcacaatgtccagacagagggcagctgtcagggagactgtgcaaaagcaactgaccaggtcctctgaaaagggatcctccctccacctgctcggaacttctgctctcctcaccgtccagtcgggcctgagctcccacccggccccctctggccagctgcgctgtccccacctacaaggttgcaggccctgtgtggggctgatgacgcctgacagcatcttggctgaaaggccaggtgggagaaagaaaggagcattattcagtcagatcaggggggcccaagagcctcccttaacgcccagtctcgacagccagatcccacggagggctggaggggcagccccagccgcccactccactggccagcccccaactcagaggcagctagctttggtttgcaagaggtcctttctctggtcctgccatggacaagccggactggggagggttgttgaggtcctcctcctggaggggcattctcaaacattgctctcattgatttttctctatcttctttttctacctcacttttttttttttttttttttgcttttatttttgctattttcttcattttgcttaccttgggtttgatttgctctttttgttctggtttccgagggtgaaagtttaggtggttttttttggagaacttctttctcttccaaaagaagttttagctcttttttttctaaaagaagcattagtgcaaaatttccctccagggcccacttcagctgcatcctttgactttgatgaattgtgtttgcattttcattcagttggaaatattttctgatttcctttttggtttctcctttgacctataagttgtttagaaatatgttattactcagtttctaaatatttgatgatcttttagatatatttctgttattgatttctaatttagctccattgtagtccaagcaaataatctgcatgattttaatccgtataaatttactgagatttgttctatggcccagaatacagtctgccttggaggacattattggtaaataaaggtgtgttccccttctgtgaggtggagtgtcctacaaacatcaagttggtcatgttgactggtaatgtgatccacgtcttcatccttacagactttttgtctattttttatcagttctcgaaagaggagtgttgaaatctctgttattgtggattttctttttctcctttcagttctatcagatgttgtttgttttgctttgtgtattttgaagcttaattgttaggtgcatacatatttagaactgctgagtcctcttcatgaactgatcaatttatcatttggtaatgtccctctttttaaattttttttctttctttctagtacagatagtgttttgctgttttgccctggctggtctcaaactcctggcctcaagcaatcctcccacctcagcctcccaaagtgctgggattgcagatgagagccactacacctggccagtaatgctcctctttatttctgattatagtctttgctttaaacctactttgatattgacgtagtcatgtctgtgttcttttaattggtgttagcatagtatatctctctccatctttttacttttatcttatttgtgtttttacatgtctggtgagtttcccactgacagcatatacttggctgtttctatttttatccaatctgacaacctctgtttttaattgagatgtttttgtttgtttttgaggcagagtctcactcactctgtcgctcaggctggagtgcagtggcaccatctcagcttactgcaacctctgcctcccaggttcaagcaattctcctgcctcagcctcccaagtagctgggattacaggcacccaccgccatgcccagctaatttttgtattttttagtagagagggagtttcaccatgttggccaggctggtctggaactcctgacttcaagtgatccaccttcctcagcctttcaaagtgttgggattacaggttaggattacaggtgtgagccaccgtgctcagcctgattgaagtgtttagatgacatagtgtcattattgctgtggctgggtttaaatatatgtcatcttgctatttgttttctatttgtctcattgttttttcctttctcctcttctgcagtctctgtaacatgtgcttttataaataaataattctgtatcatcacttttgttgatttattaactacagtgctttgacttttgcttttttctttgtctttttttagtgacactttagcgtcttagcatacacctttgacttactagtctacctccaagaaatagtaggccacttcacatagagtagaataaatctacaacagtgaacttccattgtccctctcctggtctatttgtattactatttttttttaaatttatttgacacagcgtcttgctctatcacccaggcttcagtgcagtagcgtgatcacagctcactgcaacctccacctcctgggttcaagtgattctcccacctcagcctcctgggtgcaacctcaggtgtgcaccaccacacccagctaattttttggtatttttttttttttagagatgaggtctctctacgttgcccagccaagcctggtcttgaactcctgggctcaagcgatccactcgcctcagcctcccaaagtgctgggattacaggcgtgagccgcggtgcccagcctgcactactattatcatacaatttacttctacatttgctataaattccttaatacattgttattatttttgctttaggtaatcaactatcttttaacttgattcaaaaataagaaaaaaattaccttctatttcctatttctggtgtcatttattcctttgtgtagatccgtatttctgcctgaagaacttcctttaacataaaggtccccaacccctgggtcacagaccggttaggaaccacgccacacagcaggaggcgagcgctggcgggcgggcaagggaagtttcatccgtattaattcatcgtggtctgaggctgaagaccgcgacatactctggttctgacctatgcgttccttccacgccccttatcccaccagagtgtgagctccatggggtgggaatattctggaacgtctgctggttttattctttgccttctccccaactaggacctggcacaggagggtgcgcattacctctcggcaaacagaacaactaactggcctagtttgctggggaccgaaggatttcctggaaccggagcccgcttgcccagcaggcatggtgtattctgtacctcaggcccgcaaaaatgttttaaagaaaaaaatgagctttagggtagaagaaaaggttttatttttctttctcacattggaaaaaatgaaaactttcggacccatgaaattttattacattttgccaaaaacagaaccaataacataagtattcaaagttatgtaaagataattatttaatatgaacattatgatggtgagagggaccacggagcaaggggctgccttgcaggcctgccttccagctttgctacagggaccagaagcgggagctgagcgcaggggaggcaggcggaggccatgggcagcgaggcgggtgcgccaaagggcgccagttccggagctgctgggcctgggctgcaggagggcggagctggggccgcaaggctggtgccggccgacaaacgacgcggcgcgggcgagtgggcggaggcggctgcggggaaggctgggctgccgcgggacgcggtgaagatagcctgcggagtgtccgggctgaacacgtgagtctgagggtcgccagggaatcactgcgtggctgcctctgtgtcggagatccagatgcctggactggcctcggggtcccagcgcttgcccggcgagccggcggtccggggacgggtccgggccgaggcctgcggtgaactcggctcggcgggtgcccaggaggcgggtccggggcggggcctgcggtgaactcggctcggcgggtgcccaggaggcgggtccggggcggggcctgcggtgaactcggctcggcgggtgcccaggaggcgggtccggggcggggcctgcggtgaactcggctcggcgggtgcccaggaggcggggcaggggcggggcctgcagtgagcgcggcttggtgagtagcccaggaggcgggtccggggcggggcctgcggtgagctcggctcggggggttgctcaggaggtggggccggggcaggcctggggcggggcctgcggtgagctcgcgctgggcgggctgttccgggggcgggactgggctgggcctgcggtgagcatcaggcgatgcggcacgggtgctgcgggacacacagacacgcctacgattagactcaggcaggcacctaccggcgagcggccgcgggtgactcccaggcgcggcggtacctcacggtggtgaaggtcacaggtgaggtcaccctgatagtcccgctcgcgccgagagccctcccctcgacctgggaccgcagtgtttggggcggggctctccgtgagggggttgggaagctcgaagccgcaggcctgactctggcctttggcatcctggggttggcctgggcaaatgtgtcgtgagagacggatttgttgttctcgggaaggcgtaagtttaatttagtcctccaggacggagaccgagggccgagtatcccggcaggggtaggagagccgtaatccaacccccacctccccactgtaaacctctttccagagagggcattcccgttccaaacaccagacccagccggggaaatgcttcttcttgtctggcccaagtgccctcctgggaggggctcaaaatgcattccccccaagctgggcacagctcatccctgctggggagcttctgcagtggccgaggactcagacaaccctaaccagggctctggaggtcttctggaagaaggaaccccaagtagggacaccccaggagcagagaggaggggaacagcgagaagagacccagcttttgggcccagtcctgccatggccagccatccggcccccagggccctgcttgggatggggctgcagaccacctcccatgggacctctgcaccaaccatcccctgggtaaaatccttgtttaggcctggtatttaaggcccctctgcccatccctactccttctctagcactgcccctcatcctccccccatctctcctccatccagcgctacaggctgttttgagcttttgcaggtgctggtctctgattgaaatgtcctgatctcttctcccttcttgtcccatcccaagtgtctcctcctccaggaaaccttccctgacacccactgagttaggtggcccctctgcccaccatcatccctgcccaggcccccatgggtccttcaggcccagtactgaccacctgtctttgccacctgctgtgcagggttgcagcactcccagtagaccaggagctccgggaggcagggccggccccacgtcctctgcgcaccaccctgagttggatcctctgtgcgccacctgag

SEQ ID NO: 11817 - DNA, 6000 bp, Homo sapiens
agtggagaatgagtgggcagatggtagatggatggatgcatggatggatggaggatagaggatggatgagcaggtatgtattgggagcaaatgaaggcaggggagtgggggaggaaagtgaggtgggccctgtgctcaccagccttgaacctacctcatggagctaagggttggcagccacaagttccaggccacaacaggaagtagactgagctgtggcctagcagaggggagaacccaggagttcagcattaacacaaaccctctgacattccctagaatgctggtgggagcatgtcctaatgtgtgaaaataacccccgtccagggcacctgattctcatccaggttccttaggtcttgcaattctagggttctgtgttctgcaagcccatgctaacagcctgcagtcttgggactctgaggtccccacagttgtttgcgctatggttccgtggctccagggctgcactctgctgcaacctctctccccctaccacaggctggacacagttcacaccctgagggattctccctcatcgcccagactttggcactgggcacccttgactagccccctgaatgccagcgcttcgcagggaccatgccggtcctaggtgctgaaatggtgcctctcccagggaaggtgccagccccgcctgtgggcaccaccagccaggcctgggaacaggtttgtttctcttgggccttaggaacctagagccccagtccagcctttgctgggaacaagctgtgccccaaggtagaagggtttctccatccacgaaactgctccctagattgcccccctggcagtgcaggaaagagagacctggcaaggatgaggggcctgtgtggaggggcagagctggcctccatccccggcccctggcccggcccggcccggcccatggacactaggtgtaccctgggaggggtggctggtagccagggtcccagggggtgacctaagactagggcagggccaggcttggccctgggaagcaggtgaaagagactttgcctgagattgtggtgctatgtgtaaaggtgactccggcactagaaagaggagtggggaggccaggtgtgagggaagagcccaggcccagaggcccagcccagctgtggctcccgcttgctgggtgatgccgggcaaggccgggcccttgctgtccatctgaggccccatctgtgcaggtgagggggctgagaggatcagggcagcctctagaaagacaccacacactcagccgctcagcttggggcagccacctgcccctgcgggggaaagagacagaaaagcggcctggcacctgggccccaatgcccttgcccgacacccacctgcttaccaggtaatggccacacacccttccctgcttagacagctccaacaaggttggtcctcccttggcttctcagccccagatcctcaccctccacatcatcacacccctgctgtgggtcccacagaggcagcaattgtctgttcccactccctactggtctgcaggccctgggacctgggccctgtctctcttctctcctggtttccattatatccaaagtgccttgcatatggttggtccttataaaatgttgaagaatgaatgaatgaatgagtgagtgaatgaatgaatgaatggagtgcctcaaggcagacggatgcattttggaacccctggggtgtggctgggattctggcttgcccaggtaacagcctgagggtgaagaagcccttccttgtgccctggggcttcccagctcctccagcccaggcagctcctccagcccaggcagctcctccagcccgcggccccgccttgtccaccgggcacccactcagtcagctcctccaggccagggccctgacttgtccaccaggcacccactcagccagctcctccagcccagggccccgccttgtccaccgggcacccactcagccagcttctccagcccggggccccgccttgtccaccaggcacccattcagccaggacagggcccagggctgggctggtgcaagcctggagtacggtgctgtgccgccctaagccaggcgcttccctctctgagccaccacacccttgtgtgttcctaggggcccagcataaggtagagggggcagaaggtgggggaaggggcatgagcaaggaacttcggctccagacagaagcctgggcttgtccccgtgccgggtttcctggttcagggagcagggggcaaggctaacggggtggggcggtggttttccctgccccaggccccttcgtcgcctctcccaggtgtcatttctgctgccaataccctgatggtaccaaccaggcccagggccccagctccaggggctgagtgggaggggtggagtgggggagggcccaggccctagagaacagaggagggaggaggggggaaaggctggcggtgatagtgagaagtgcttgagaccccaccaggttctgccccagaacgtgcctggagctctctggccctcacttcctcaccagtgaacaagcactgggcagggactgacatgaggggccacagtgtctcctctccacattccaatccctggctctgaggctctagtcaggtcactgcctacaagaaaccctccctgactgcactgtccccagaagctcagctgtccaagggctcctggcatcagaagcacccgctttctcctgaaagtgaactgtgtagggctgctgttcatgcttttgctaggaccacctgggatgggcagctcatcctcgtgggcagccctgccaggtcagaggccctcatcccacaaaactggaaccccgctccggctcccatgcctggcagggacgcagccacagtgatgcctgaggtgtcccacgggggtgagccaggtgtgcagggccctcctccagccccaggtgtggggagcacactcccccatggccccacactcagaacccactctcaggccacctgacatcccggaccctccagctccaccagacccagcaggaattccaaacctgtttttccagcagctctcatgcccctggccacagtgagtcaccctccccacctgccatgcccaccgagtcatcaccccgccaccaagccctgagctctgcctcccaaggcccctggaagcaccttcccccaagctgcccatgcctctcactgtgacccatggacacagggccttggagctggaggaaacctcctctctctgggtgggggcatggacctttgggtcacctgccttggcaagtgagactacacacgtccccaccaagctccagccagggccaggcaccagatgcaaatgtggggctgccccagggggctcccgcctgcaccctggtttctaaaggcaccaccaggcaacccctcctgtaggtggatcctccaggccccggcactgtgtcagggagagcccggccaggagcattctcaggagacatttgctgggatccccggcatctgagacgtggggctcagcaagggagagatgccgggaggaagggccagagggtctgtctcaagcccaggcctgactggccccagtacccacggtgctcccaaaagcctcagcccagcccaggaccaccctcctcggaaccggccctgccctgccctgggcctgttgttgtctgttcatcagccacgtggcagcggcggcaggaggctgggcccagggctgacctccatctgtgccccggctcccactcaccttcagcctagccagggcaggggcaaagcaagtctgtgggcccctccacaccactcaggtgggtgctgcccagcacaggcgagcggcagagcgtgctgggctgagcaggtggatgggggccccaagaggtgggctcctgcgcgaggcggtgggtgctcagagaccccgtctccagggaaagaaagtccctcctgtgagtataaagagggtgaaggcggggactggcctccactcaacgggcagcagaccaagaacctgctttgaggccctgggtgctggggcccagccccaaagagttcacgattttggggagactggagccgggacacctagagcaatagttacaaagtggccgggatggcgctgcccccaacgtagcaggaggggcctggagagtgggggaaggaatcccacggggagggcttctggggccctggagggcgggaggcagggctggtggagaccaggagggctcagtctctccctgcacaacgcagggtggagttgctgcctccacagcccgggccttctgcccacagggctccccaggcaacttcgagggccgggtcctcacagtcctcactctgtccagtgctcacctcactgctgccccagctgccctccctgcctcggagtggcctctgcctctgcctctgcctcacacaccccatcagcccacagccaccccgagcccttgcagctcaaggaccttctgcatccccggcagcaaccctgagcccagagccaggagagtaggaccagcacctgcccttcctacctcccctgccctggacacccacgggcacccacagggcaccgggcacaggctgcaactctattgagggaactatggggggaatgcagggacaaagacacaggatggtgatggatggtggggggtggggggcggggggtagcgggtggcaggtcagagacaaagtgacccaggaacggacggcagcgagagaacaagacccacagagacagagaagtgaaagtgggagagatggaggcacagcagcaggaacagcagggccaggaggccactgggccccgttgcggagggcagacctctgcctggcggggggcagcaggggcagcgcccagcgacagccaggctggtgggcgtgggccaggcagggtggggcaggtgcccgtcctgggctgacgcttgcacagagccctgcagaatgccgctggctggcggactgcccacccccgcccagcccgtgcctataaggccttggcaatgcaggggcccgcactgctcccagacgacatcagagatgaggacagcattgctgctccttgcagccctggctgtggctacagggccaggtgaggggctgggccaaggggacgggcgggtgggcggctgtggcctgtgtggtcaccaaatactaggagcctggagctgacgacatctaggcacagagaaccccgacactgtgggtgctagactcttcaaatttaaaacaacatggagcccgaatcttaacgagtgtcagatttacaatgtttcagaatctgaggatcttagaactgactcctggagtcacggaccctgagagagtggagcagggggttgtcttgagatgcttctcactgggagagcggccatctagtccctgccaccagcccctcccggtccccaggtctcccccagcacagcccaggacagcccaaaggccaccaagcccttcctgtcataggctcagagcagccaagctggctgcccccggggccttagctccgtcaggccctcagaaacatagccatctcctccagggacatcccctggggtggggacaagagccagtgtcctcttggcagtcgcagagctccctgagaccttggaggaaaggcttgcaacacaccctagacaggggcagggcaggacacctcttccaagccggcccaggctggaatacatgtcccctgaggctgcactcagggcacatgccctgccaggacccagagcccgggtttgggggcctagggcaagggcagcagggcctctgtccaggaggggtctctgcaggtgggggagcaggccctgctgagtcaccaggaggcctctgttgggcccgctgagccggactccctccccgccagcccttaccctgcgctgccacgtgtgcaccagctccagcaactgcaagcattctgtggtctgcccggccagctctcgcttctgcaagaccacgaacacaggtgggtagcatctgtccaggtgtccctggggctgggggacatccctggctgttgtgggtgttggctgga

SEQ ID NO: 11818 - DNA, 6000 bp, Homo sapiens
atcacttgaacccgggaggtggaggttgtggtgagctgagattgcgccactgcactccagcctgggcaacagagtgagactctgtctgaaaaaaaaaaaaaaaaaagaagtatcacctgacactggttagaatggcctctataaaaaagggggaagatgacagtgttgtgagaatgcagacaaaggggattctagtaccctgttgatgggaatgtaaattatcacagccattatggcaaacagaatgaaagtttcttaaaaattaaaaataaaattaccatatgacccacccatgtcatggtgagtctacataaaggaaatgaaatcagtatgctgaagatacctgcactcccatgttgattgcagcattattcacaataatggaatcaacctaagtgtccatcaacagatgaataaagaaaatgtggaatatagacacaaaggctttaattcagccttaaaaaaataaggaaatctattatttgtgacaacatggatgaagctggaaaatggttatgtgaaataagccaggcacggccaggcgcggtggctcacgcctgtaatcccagcactttgggaggccgaggggagtggatcacgaggtcaggagatcgagaccatcctggctaacacggtgaaaccctgtctctactaaaaatacaaaaaaattagccaggcatggtggtgggcgcctatagtcccagctactggggaggctgaggcaggagaatggcataaacccgggaggtggagcttgcagtgagccaagatcgcgccactgcactctagcctgggtaacagtgagactctgtctcaaaaataaataaataaataaataaaaaataagccaggcacaaaaaaagcaaacaccaacacataatctcacttatactgtggaatctaaaaaaatagaacccacagaaacagagagtggaatggtggctaccagcagttgagggcagggaggcagacgtacctggagggttgcggtggggagactgttggtcagcaggtgaaaggatacaaagtttcagttagccagggggaaaaaggccaagagattgatgatgtgacatggaaccgtggttaataaccacggacttgaaaatctctaagagagtagacttgatgtattctaaacacacacaaaaagtgtctgagctaataaacatattatttagcttgattgtggccaaaattatatttcagattttatatacatatttcaaaacatcatgctgcacaggatagatacatgtaattttaattgtcaactaaaagttaatgaaataaaattatttttatttttatttttattattattatactttaagttttagggtacatgtgcacaatgtgcaggttacatatgtatacatgtgccatgttggtgcgctgcacccattaactcgtcatttagcattaggtatatctcctaatactatccctcccccctccccccaccccacaacagtccccagagtgtgatgttgtccttcctgtgtccatgtgttctcattgttcaattcccatctatgagtgagaacatgtggtgtttggttttgtgtcattgagatagtttactgagaatgatgatttccaatttcatccatgtccctacaaaggacatgaactcatcatttttttatggctgcatagtattccatggtgtatatgtgccacattttcttaatccagtctatcattgttggacatttgggttggttccaagtctctgccattgtgaatagtgccacaataaacatacgtgtgcatgtgtctttatagcagcatgatttacagtcctttgggtatatacacagtaatgggatggctgggtcaaatggtatttctagttctagatccctgaggaatcgccacactgacttccacaatggttgaactagtttacagtcccaccaacagtgtaaaagtgttcctatttctccacatcctctccagcacctgttgtttcctgactttttaatgattgccattccaactggtgtgagatggtatctcattgtggttttgatttgcatttctctgatggccagtgatgatgagcaatttttcatgtgtgttttggctgcataaatgtcttcttttgagaagtgtctgttcatatcctttgcccactttttgatggggttgtttgtttttttcttgtaaatttgtttgagttcattgtaaattctggatattagccctttgtcagatagtaggttgcaaaaattttctcccattttgtaggttgcctgttcactctgatggtagtttcttttgctgtgcagaagctctttagtttagttagatcccatttgtcaattttggcttttgttgccattgcttttggtgttttagacatgaagtccttgcccatgcctatgtcctgaatggtgatgcctaggttttcttctagggtttttatggttttaggtctaacgtttaagtctttaatccatcttgaattaatttttgtataaggtgtaaggaagggatccagtttcagctttctacatatggctagccagttttcccagcaccatttattaaatagggaatcctttacccattgtttgtttttctcaggtttgtcaaagatcagatagttgtagatatgcggcattatttctgagggctctgttctgttccattgatctatatctctgttttggtaccagtaccatgctgttttggttactgtagccttgtagtatagtttgaagtcaggtagcgtgatgcctccagctttgttcttttggcttaggattgacttggtgatgcaggctcttttttggttccatatgaactttaaagtagttttttccaattctgtgaagaaagtcattggtagcttgatggggatggcattgaatctataaattaccttgggcagtatggccattttcacgatattgattcttcctacccatgagcatggaatgttcttccatttgtttgtatcctcttttatttcattgagcagtggtttgtagttctccttaaagagatccttcgcatcccttgtaagttggattcctaagtattttattctctttgaagcaattgtgaatgggagttcactcatgatttggctctctgtttgtctgttaagtgtgtataagaatgcttgtgatttttgtacgttgattttgtatcctgagactttgctgaagttgcttatcagcttaaggagattttgggctgagacaatggggttttctagatatacaatcatgtcgtctgcaaacagagacaatttgacttcctcttttcctaattgaataccctttatttccttctcctgcctaattgccctggccagaacttccaacactatgttgaataggagtggtgagagagggcattcctgtcttgtaccagttttcaaagggaatgcttccagtttttgaccattcagtatgatattggctgtgggtttgccatagatagctcttattattttgagatacgtcccatcaatacctaatttattgagagtttttagcatgaaggttgttgaattttgtcaaaggccttttctgcatctattgagataatcatgtggtttttgtctttggttctgtttatatgctggattacatttattgatttgcatatattgaaccagccttgcatcccagggatgaagcccacttgatcatggtggataagctttttgatgtgctgctggattcggtttgccagtattttattgaggatttttgcatcaatgttcatcaaggatattggtctaaaattctcttttttggttgtgtctctgcccggctttggtatcaggatgatgctggcctcataaaatgagttagggaggattccctctctttctattgattggaatagtttcagaaggaatggtaccagttcctccttgtacgtctggtataattcggctgtgaatccatctggtcatggactctttttggttggtaatctattgattattgccacaatttcagatcctgttattggtctattcagagattcaacttcttactggtttagtcttgggagagtgtatgtgtcgaggaatttatccatttcttctagattttctagtttatttgcgtagaggtgtttgtagtattctctgatggtagtttgtatttctgtgggatcggtggtgatatcccctttatcattttttattgcatctatttgattcttctctctttttttctttattagtcttgctagcggtctatcaattttgttgatcctttcaaaaaaccagctcctggattcattaattttttgaagggttttttgtgtctctatttccttcagttctgcactgattttagttatttcttgccttctgctagttttgaatgtgtttgctcttgcttttctagttcttttaattgtgatgttagggtgtcagttttggatctttcctgctttctcttgtgggcatttagtgctataaatttccctctacacactgctttgaatgtgttccagagattctggtatgctgtgtctttgttctcgttggtttcaagaacatctttatttctgccttcattttgttacgtacccagtagtcattcaggagcaggttgctcagtttccatgtaattgagcggttttgagtgagtttcttaatcctgagttctagtttgattgcactaaaatttttaaaaagtaaaaaaaatacatgtggtttaatacaattcatgccaactcattccctcgttttttgctataaaccttgcaaggagatgaataatccaaggctcttggataagataagggccccatccatcttgctcctctcagccctggaggaggagggagagtccttttcccctgtctacgctcatgcacccccaatgagtccctgcctccagccctgacctctgccctcggtctctcaggcagatccagggccagttctcccatgacgtgatccctctcgaaggcaaggcaccaggcaagataaaaggattgcagctgaacagggtggagggagcattggaatggcactcagggcaaaggcagaggtgtgcatggcagtgccctggctgtccctgcaaagggcacaggcactgggcacgagagccgcccgggtccccaggacagtgctgccctttgaagccatgccccggcgtccaggcaacaggtggctgaggctgctgcagatctggagggagcagggttatgaggacctgcacctggaagtacaccagaccttccaggaactagggcccattttcaggtaaagccctccctggccctcgctgggaacacccagagccctgcccttgctgcccaggaccctgccgggcactcagcactgccattcccagcaggtcccggcactctgcatcctttggaagatggggaaggagtgcagcacgtgctggtctgtggcgctgccagggcaggggatggtgcagagcaaatcccagctcgctgcagagagggcaggactcagaggcactgaagttaagaggttccgggcagtcagcaagagggctttagctgtgaagccgctaatccaggagaggggagggtggacaggagacactttggattgggactgcagggtggggctagcggggacatggtcccatccagcacggcctcgtgcttggccccacaggtacgacttgggaggagcaggcatggtgtgtgtgatgctgccggaggacgtggagaagctgcaacaggtggacagcctgcatccccacaggatgagcctggagccctgggtggcctacagacaacatcgtgggcacaaatgtggcgtgttcttgctgtaagcggcgagctgagagctgggagcagggtgggcagcctgggtgtaggggggaggcgagagaggcaggacccaaaagcacatctgccctgggcccctgtggtgggcagtgagggtgagcacccgacccagaggacggccattccgtggggtcgtgtctgccctgtgggttggggaagcagggcggtggtggagaaatgggcacgggcacc

SEQ ID NO: 11819 - DNA, 6000 bp, Homo sapiens
ctgcagtgctgtgcggggtgggatgcacaccctctctgggcccgtggagtcctggggacatgcagctgtgtgagccgtgggtatgaaagggccccttcctctaggctggccccgggccacagctactgcagggcagtccagccccactctggcctcggctggtgtggcggtacacaggctctgacctgcatcagggtgccccagggcaccattcccagggcatcaggaaccctgtcatcctcccccatggccaggtgccgcccccctcaacttggagtgagtgcctttccaagggagggtggacaggcagtgccaggtgccactgatctgtcctcccaagggaaggcgggggccctggcgggcagcatcagcagggaggggcaggcagctcaggcctggcacggcaagcgaccaggcgtgttctcctacccaggggtctaggctgagggtccctggggctttggcgggtccccctggagtctccaggctctgacatcggagggttggagtcagaggagctgagacagagcccagcggagcagatctcgggattttctggtccttgaaactggaaaaggccacagcatgtagaagccactgcggggcagcaggaggggtgtagtctccctggggccggggctgctcggcctcaggctgggccactgggctcagggcttggagggcacatctgaagggtgctgaggagtgagagatctgcggtccctctgacccactgggggacgtgaggccggggaccgcacaccctggacctcagtttcctcctgtggaatggggacagtgacagcaatgctcccttcctgggactgctgcaggcttccgtgagacaacatgtcaccaaaccgcagatccccctgcaaggttcggtgcctggtgtgtggctgctggagggagttcatgggacagtggggaccctgagaacggccctcaactcagtcgtcacaggccccttatggctctatgaatctgaactacggacaacacgttttaggacagaaaagggggatgtgagctgctggcacagggcccctgcccggatgaggacagactcaggcaagcactgctcgtcttccagcctgggtgtggctcccagcacccggcctctcatggtctcctgggtattcccagctccttagcaggaccagtgaggtgagcccagacccggcctcggacatgttttcatctccttccatgccaccttgtgcctctggggactcacagaattgccccgagaggactgagcccctcacagggaagggcccctgcgggctcttgttcccgctccttgcacccagcatagggcctggaagaggaggtgaaataccatttggtaattcgggaagtacagccctctgcccttccttcctgtgtgggaccttgctccaggcagatgagtaatccaaggtccaacctttgcgtccaattcagcatgctaggaacttgaagttgttaattcatcctaacatcaagtaaaaaggaaaaaacttcccaaaatcagcaactcttcttagattcccaggagaagtgagaccacacagcaaactgccacccccaagactggagagtcagacaggtgaaaatggagaattgccactcaccaagggcaggcttcttgagggctagtgacaagaaaaaaaatccagagcaatcccagaagagcttctggggctcagtgtgcacaagcgtaagagctaaggtcagtcaggaacccgggcactcacttatgtgagtttcacctccagaagctctacgaggtgctcaccgcaaatatcagaaaagctcgtctatgtcaggcagcaagagaaaaagaatggtcattatgaaatacaccagagcattctgttctttaaaaggccagcctttcagagagactgtcttgccagagcctaagctgctgggttttatcagagctgaactatctgggaaagaagagagacatccaaccccagtccgtgtagcgtgccacatgtgagaagagccacacacagccccagcccttactgctcaacctgtctatttatgtcaaggaaacactgagaagcccttgtaatgttcacgggttggggacacaggctcactgaaagactcagacctactcacaggaccacaacacactcccctctccgcacaccttacctctgcatcatcaaaggcacctatttgcagcagtttcttttatgcagtatattatgtctggggcttaataaaaaatgatacggcatactaaaaggcaaaagccaaggtttgaagtgatggagtaaatactacaaggaggctcagatatggcagggacctggaatgatcaactgggaattttaaacaacagtgattaatacgctaaggaccctcatggaaaagtagacaacacgcaagaccagatggggaatgtggacatccagatgaaaattcaaggatgggtgaaaaaagaaattctggagatcaaaaacactgtgacagaaacaaagcgtgccttagataggcttattagtggaccgaacacagctgaggaaagaatctccgagcttgagaatatgtcaatggaaactggaagctgaaaggcaaaaagaagaaaacggaacagaatactgaggactgtgaaacaactactgctggtgtaacatacacataacggggacattggaaggaggaaaaaagaaaggaacagaagaaacatttgaatcaataatgattaatgtcagacaccaaaccacagattcaagcagctcagagaacaccaagcagaaaacaaaacaaaacaaacgtctccacctaagcatatcatactcaaactttggaaaaatcaaagatgaaaaagaaaccaggggttgggtgggggacaccttatctatataggagtaaagctaagaattacatgtgacttaccctcagaaaccatgcaagcaagaagacagtggagggaaacatttcaagtgttagaagaaaaaagaaaatacatcaacctagaattctgcatcctgtgaaattatccttcaaaagtgaacataaatattttctcaggtaaataaaaattgaggggattcgctgccaatagaactgacttgccagaaatgttttttaaaagttctgcagagagaaagaaaatgatacaggtcagcaaccctgagctacataaagaaaggaagagcatttcagaaggaatcagtaaagagaaaatgaagtcttttattttttcttaatcttaattgatctaagagtttgctaaaacaaaacaacaacaataaaaataggccgggcgcggtgactcaccacacctgtaatcccagcactttgggaggccgaggtgggcagatcacctgaggtcaggagttcgagactagcctggccaacacggtgaaaccccgtctctactaaaaatacaaaaattagctgggcgtggtggtggcacatgcctgtaatcccagctacttgggaggctgaggcgggagaattgcttgaacccgggagacagaggtcgcagtgagccgagatcacaccattgcactctagcctgggcgacagagtgagactctgtctcaaaaataaataaataaataaataaataaataataaaaataaataaataaaagccagaaagtgtatttgatgatcatagttatgtatatgtgaaatgaaggacagcaatgatgcaagggatgggtgagtggaattaaaaatatcttattatttatttattttgagatggagtcttgctttgctgcccaggttggagtgcagtgggatgatctcaactcactgcaacctccgcctccttgattcaagcattcatcttgactcagcctgctgagaagccgagattacaggcatgcgccaccacacctggctaattttgtatttttagtagagacagggttttgccatgttggccaggctggtctcgaactcctgacctcaggtgatccacctgcatcagcctcccaaagtgctgggatgacagacatgagccactatgcccagcctaagaatatctgatgattataaagtgcttgcattacctctgaagctgtatagtgttatatgaaggtggagttggagagatgagttttaagcgtatattgcaaactctagggcaaccactaaagaagtgagacccagcctctagaaaaaaaaaaaaaaaaggaaattagctatcaagccacgaaaagaaatggaggaaccttaaacgcatattactaactgagatacgtcactttgaaaaggctacaaacggtgtcattccaactatacaacattttggaaaaggccaaagcatggtgatgataaaaagatcggagatgtcagggactggggcaggagggatgagcaggcagagcacaggttttcttttcctctttttaagacagtgaaaatactcctaggatcctgcaaggagggatacaaattacatacatttgtcaaaacccacagcatgttgaccaccaggaggagaccccatgtgactccaggaccctggttgataacaacgtatcgagattcctcacatggaaccagtgcgctcctgtggtggagggtgtacctgtgtcagggcagggggtacgtggacattttctgcagtttttgatcaattttgcaatgaactaaatctgtggtataaaaataaagtctattaaaagaatccaaggctccctctcatctcacgataagataaagtccccatccattttactcctctcagccctggagaaaggagaggccaggtcccaccaccttccaccagcatggacccccagtccagaccccacgccttttctcagcatcctcagaccagcaggacttgcagcaatggggaattaggcacctgacttctccttcatctacctttggctgggggcctccagccttgaccttcgctctgagagtctcaggcaggtccagagccagttctcccatgacgtgatatgtttccagagcaggttcctgggtgagataaaaggatttgggctgaacagggtggagggagcattggaatggcactcagggcaaaggcagaggtgtgcgtggcagcgccctggctgtccctgcaaagggcacgggcactgggcactagagccgctcgggcccctaggacggtgctgccgtttgaagccatgccccagcatccaggcaacaggtggctgaggctgctgcagatctggagggagcagggttatgagcacctgcacctggagatgcaccagaccttccaggagctggggcccattttcaggtaaagccctccctggccctcgctgggaacacccagatccctgcccctgctgcccaggaccctgccaggcactcagcactgccattcccagcaggtcccggcactctgcatcctttggaggatggggaaggagtgcagcacatgctggtctgtggtgctgccagggcaggggatagtgcagagaaaaccccagctcactgcagagagggcaggactcagaagcactaaagttgaaaggttccagggagccagcaggagggctttagctgtgaagccgctaatccaggagcagggagggtggacaggagacactttggattgggactgcagggtggggccacgagggacatgaccccgtccagcagggcctcctgcttggccccacaggtacaacttgggaggaccacgcatggtgtgtgtgatgctgccggaggatgtggagaagctgcaacaggtggacagcctgcatccctgcaggatgatcctggagccctgggtggcctacagacaacatcgtgggcacaaatgtggcgtgttcttgttgtaagcggcgagttgggagctgagagctgggagcagggtgggcagcctgggtgtaggggggaggcgagagaggtaggacccaaaagcacatctgccctgggcccctgtggtgggcagtgagggtgagcacccggcccagaggacggccatcctgtggggtcgcgtctgcactgtgggttggggaagcagggcggtggtggagaaatgggcacggg

SEQ ID NO: 11820 - DNA, 6000 bp, Homo sapiens
caaactcctggtctcaagtgatcctttcacctaggcctcccaaagtgctgggattgcaggtgtgagccaccatacctggccctaaccttctctctgtgacaaattttctccttgaagtgcagtctttagggaaggactgttagtggtaagctctctcaatgtctctgatttttattcatctgaaaaaaattatctaaagttaaaaaaagtttgacacataataattatacatatttatggggtacaacgtgatgttttgatatatgtatacattatataatgattaaattaagctaattaacatattcatcacctcgcacacgtatcatttttttttgtggccagtgtttgtttagctgctagagaaaaagaaaaatccttatggttagaacatagtttattctttaagtttaggggtgtgtgacttaatccttgcctgccacagccttaggtcttatttataatttggaatatcattgccacaaagagtgcatcccatcagtttcataatctttattttaacactttatagatctacatctatctaatatttttatttttaaattatttatttatttatttatttttgagacagtctcactctgtcgcccaggctgaagtgcagtggcgtgatcttggctcactgcaacctctgcctcccgggttcaagtgattcttctaccttagcctccctagtagctgggattacaggtgcacgtgccaccacacctggctaatttttgtattttttgtagagacagggtttcgccatgttggccaggctgttcttgaactcctgacctcaggtgatccccccgcctcagccccacaaagtactgggattacaggtgtgagccaccgagcctggcttatatctatctaatctatctctctttctctctgtcactttttcttttttccattcatctgctgatggacacaagtggattccatgtcttggctgttaggaataatgctgcaatggatatgggcatgcaggcctctcttcaagatactgatttctatttatctggctatatacccagaactggaagtgctgggtggcaaggtagctccatgttcaattgtttcaggaacttccatactgcttttcctaatggctgcactaatttacattcccaccaacagtgcacaacggttctcttctccacatcctcaccaaaaattgttatctctgtctttttgatggcaggcattctaataggcaggaggtgatctctccttgtgattttaatttgcatttccctgatgattataatgctgaacatttttccatacacctgatggcattgtatgccctcttttgagaaaggtttattctgcttctggctcattttttaattggcctatttgttttcctgctattgagttgttttctaaacttttaattttctgaaaattctattttacacttatttttggaaaatatatcaagttcttagtgacagttatttccctctgagccctttacagatccgattttcctctcctttggctgtcactggggctcctggaattctgctggcaatcttattgctgtttcctgggagctgatcttccttttctttttggctggcttaaaggtcttctgcaatttcactctgtcatctaaactttatttttctttattctatttagtccatgttgtgcctctctgtgcatacttattttttatcagttctgaaatattctcaggcataacttcttcaatgattgactctctttcctttgagatttcaaccagacttccataagctctctgcacaccatctttttgttttattttattttagttttttcttttcttcttttcttgctcagacttaagtgggcatcaggaaaacaccatcttttatgtttcttattttccctattttctatttccttatcctttgtgctacattcttggtaattttttaaagatttatcttctagtttatgaattccctcttcagttgtgtttaatttgctgcgtaatctgtttgctgagtatttttttaaacacctttattgagatatcattcacataccatagcatttacccttttaaatatacaagccaggggtctgtagtatattcatagagttgtgtgaccataatcactatttttagaacattttcatcactcctaaatgagtgcttttatcactttatttattagtagtgcctattaccagtccctaaggaggactgattcccctatcccacccttctagcacaaggcaaccactaagctaccttctgtctctcttggattgtttattccggacatttcataaaaagaaaaccacacaatgtgttttcttgtgactggcttctttcagttaccgtaattctttcaaggtttctgctgaccttttcatttcaatgaaaagtttttcatttctagaggttctatttttttctgataagcatggtgattggtttcatagtgctttgttccttattttaatatatcttaagcataacaaataggttaattttatatcctatatttgatattttccatttagaaagtttgtggtgatttaaatctgttgctcgtcactgtcagctgagtctcacttggaggcttgctttctttagacatgtgctgatttttcattttgaactcatatttgattcagttaaatctgtgggaacctcagtccctaagttggggcttgctttctccagagtattcatcgttggttttgcttttgcaagcagggatgctactgacctgggaccaccctggctccccggagggctctgtgtgggtgccaagtggagggtgcaggagaaagcatccctcggggcagccctcaatcaatgactcttgggtgtcgctgtgaaatacctgttccctcatcccttgggtgagttcacctgaggctcacagtttacaccacttcccagagtacctctctggggtcaggctccatttccccactgcggggggttgctgagtaccacatgcttgccagcctccttccccaccctggaccacttccccactccccagggctgctatccccacctccaaccaaagggcttgctctggaatccctgcctcaggctctgcttccgggacctcagaccccgtgggggtccaggtctgcccaggaccactgtgagtttcacatctgcctcctgctcagtgggcagactttgggagtccattattctatttacttctttctttatggactcagatttcttttactttcttgcgagctctgtatgttttgaaaagaattgtgtttgaaccttgatctagctcttgccctctgcaccttatgaatctcaactcctcattcagttctcggctaaagtatcaggtcctgggagaagctctccctgaccctgaggcaaagcacgctcctgtggtggtctcttgtccatctcgtccttgcctccacccctctggagccacaatggagcggaggtgtgcagtccctgtagcccaagctgcttgggttcccacttcagctgggtcacctgtcacctgcgtcactgtgtgaccccgagcagggagcgccgcctttccgtgtgagtctcctcatctgtgagatggaaatgatactatctgcacagcagggctgtggtgagactataaggagataataaatatgaagtgtctagaacaggtggaatccatagtacatgctcaataaatgttagctctgtcacatcctgcaaagatatgctgcagtaggcatcaccatttgtccaaggggagagtcaggagggcagaaaccaggtctctctcctcatgccctttcccagggctcagggcagggctagggcagcagggagcatgcagtaaacattttcaggtcaaatgaaagggagcaggaccaaaggcacgatggcagatcggggcttccccagtgccccggggaggcggatttcaggcacagggacacgtgcaaaggcacagcttttagggagctggagggcagggcgggaaggccaaggaagccgagaaacgggtccaaggctcggatgctctggccaggatttgtacctttacctccgagtgtgggagtatttggcgacagaagcccctggggctgcggcttctggtgggggtcttcatggatgctcaggggaggagaacggcctggagccactggaaacggggaaacggggaaacgggtatgaggttggggaggggcggggaggagggggagggcggggccccagggcgggagtctgaccccaggggtctgcgaacccggacctgcgcgtggcgccgcgccgggtacctccccctctctgcgtctttgtgcattttgcttcctttcgcagtaaacgttcttccgagaaattccaaggggatctcagccaagcagagggggaagggatcctgcccacgcctgggtagggggccgcggaggctggggaggagcagggggcgccgcgagggagggagcgggaacccgagggagcgcgcgcgccagcaagggggcgcggagggcccgggccagctacctgcgtgggggccgcgagccccgggcgccccccgccccgcgcgtctcccagccgcccccgccccccgcgcggcccccgccccggctccgccccgcccctcgcgcggggtccgcgtctgcggctgcgttccccgaaagacgaggctgcgcccggattccggtccgcagggagaccgaagggcacagctccccgcgccgcgcacgccgcccgagcccggagtgcggacacccccgggatgtgagtgagccccccgaccccgaggcccgcgctccacgccccatccgcggtgagcgccgaggcgcgcgcggaaggccaagggaggggactcggcccggggttcccggccccccagcccaggggtgggggtggggacctggcacgcgcccctccccccagtggcaggtcccacccgctcccgcccctgccgctcattcctgtccggacgcacctgcagctccccggggagaagaggacgccccccatccgctcccccacacaggtgccggcgcggggcggaggcgtctcgagctgtcacctcgccccagaggccagacgtctcccggcggggatgctgtgacggcggacgctctggagaaggggctgggggtggggctctgcgagctccgggcggaccccggccttggattccggggagaaggttgcatcctgaggctgggaaaggagagggtctttggggtctcctgaccgatgcttctcccctccaggcttgcgccccagaggacccgcgccccaagcccccgcgccgcccccaggcccacccggagcatgctgcctgcagccatgaagggcctcggcctggcgctgctggccgtcctgctgtgctcggcgcccggtgagtagggggcccgcgggctgggtcaggtgcctgggagagcccgaggcgccgcgggagagccgggtgtggggctgccaccctctgacggttcccaccgcacttcgcatagagcccacgccccctccgggacccctgcgaccccagcccggccctcggcccctctgccccggcactgggctctctccagcgctcttcctccagggcctggaactggtgggcggctggccccgcacggaagcccttggtcatccgtcacctctgagagcctcccgggcctcctttcaaatccagtttggtccttcacagcttggaacccacggacctctgggggggatatgtgaggcggggcgggagtgtgaggggggcactgtcggtgtggggtctgtatagcccgtgtgtgtgtttgtgtgtgtgtgtgcacgcacgtgcatgggggccagggaggggccataggggctcccctcaaactgccaggatggggcacagttgtcccagggcctctgctccccctccaggggtcatgggggcctgctccctcccgtggggtcgggctctcccaggagtgcctgcagcagggggatgggtggggggcgcagggggctgcctggtttggaccccagtgcctctggtcaccctcctccccatg

SEQ ID NO: 11821 - DNA, 6000 bp, Homo sapiens
cccacgccacctgcacgcacggggtgtgcccacggcctccagccccgtcagtctccaggctgcctggctcttgggttggggtcaggcccctgaggagagaggggtcctaactcatggccccatcagaccctggagggaggatggttggatggggtgggggtggggggacccaagcgagcaagggaagggcaagcagggccttgtgcctggctgtcagcaaggggcagaggccacgcagccagggcggaggaggcaggggccatggctatggccttggctgtggtgggcagaggagtgtgggaaggaggtgtccctcccttcccccagaggcaggctcaggaggaggccaggtcccatctcggggatcctgaggggaagatgtggacccttctctgggagcctctgttcagaggggtcatccctgtgtgtggctcccatggggcaacacacgccttgttctctctgggaagcatctgaatgggagcccgggctgggggtctggtcagggagagagctcttggcctgcctgggggtggggccccacactgaaaaggagacatggccctgtcttgggggaaccatgacctgagggacaggcctggtctcgtgtctggggagcctgctgagtgagggggatgtgattccacctttgggggggtcttgctctgagtggggagcctgaggtctgtcagggggcccagtgtgaggagaacacagtctcgttttcagggaatgcctggtttgaaggaagatatctcaccttgggaagtcccttgatgtggagagatgcttccaggcccctctccacgggatggggaggttcggcctgcattaggccagctgatgtctaaagagggaaactggtctctggccacaaggccttttgtggagaggggcagggcctggctccagctgtctgctttgcctgccctggcccacaggctccctgtggcccactgcgtgtggctctggaagtcccctgtctggcatgcctcctgtgaggtgacaggggcgagaacccgtccctgagggtgtggggaggtccctcagcgcaatagccaagctcacagccaaggccctggaccggccaggcctgtcaccagctctaaggagcctgggggcttctcgtagggtctctgctacctcatggtgcccccgggggccaggccagtggtctcgcctgggcccgctctctcggctgggggcacaggctccaggcagctcctttgtgaggagttgcagggcactgggaaggcacagcatgagcccccacctgagttggcccagcatgagcagctgctcctcgttctctcttcagggagcccccatctggctcctgagctcctcccctggggtctcttctgggcagtggctgccctgtcttctgacctcctctcttctggccaccaaaccagtgggtccctccagcttggatggttcctccttccctcttctgtcgtggtccttggctgggacagtgggaggatctcccagcccagcctgggatacccagcccccagactggaggggtggtctgggtgggagggcgcacagccctgcctcctgaccatctgtcggctttgctgccgcagtctgcctgggaccttggcgggctggggtgcgtcctgtcctgccgctgggcctggccttccttctttgggtggcggggtcctgcgacccccacactatgactgcagggatggagcccgcacctccctgtcatgtggggagccctccccacagcagggctgggtgggtgggccaggaggggagtgggctgcccagcttcctgccgcccctgacgagccagcggttctctcccctctgtcctgctgcagatggcggctcagcggcagcgggcgctggccatcatgtgccgcgtctacgtgggctctatctactatgagctgggggaggacaccatccgccaggcctttgccccctttggccccatcaagagcatcgacatgtcctgggactccgtcaccatgaagcacaaggtcagcaggcttggtccgccccggccacttcgggctcgcccccacccctgggctcgcgcagcctgacaggtgtgtccctgtgtctagggctttgccttcgtggagtatgaggtccccgaagctgcacagctggccttggagcagatgaactcggtgatgctggggggcaggaacatcaaggtgaggcagggagccaaggcctcgatcccgcaggcgtgcagggctgcccctccacggaagccttttgtggccgggcctgggttgaccggtctttccatctcaccgcctcttccccaggtgggcagacccagcaacatagggcaggcccagcccatcatagaccagttggctgaggaggcacgggccttcaaccgcatctacgtggcctctgtgcaccaggacctctcagacgatgacatcaagagcgtgtttgaggcctttggcaagatcaagtcctgcacactggcccgggaccccacaactggcaagcacaagggctacggcttcattggtgagctggggtggctgaggcgggatgggggccacctgaggctggggctggccctgctcactgctgctcctgcccacagagtacgagaaggcccagtcgtcccaagatgctgtgtcttccatgaacctctttgacctgggtggccagtacttgcgggtgggcaaggctgtcacaccgcccatgcccctactcacaccagccacgcctggaggcctcccacctgccgctgctgtggcagctgctgcagccactgccaagatcacagctcaggtgagggcccacacagctgtcggcttgagggtgggcgggctggcccctgattccttggagactgattcaaggtggtcttgagtagccagaccagggactgagcacggtgaccttttgggttgcaggaagcagtggccggagcagcggtgctgggtaccctgggcacacctggactggtgtccccagcactgaccctggcccagcccctgggcactttgccccaggctgtcatggctgcccaggcacctggagtcatcacaggtgagtcttaagtggtaccagatcctctcctctcctgtcctggcatctctcggctcgctgccctcagctgcctggccctggtggtctgggcacaaccctctgagcccagggcaggccagctctgtgcctttctgggaaggggggtggtagggagtgactgatggacctggttggttttcctgcaggtgtgaccccagcccgtcctcctatcccggtcaccatcccctcggtgggagtggtgaaccccatcctggccagccctccaacgctgggtctcctggagcccaagaaggagaaggaagaagaggagctgtttcccgagtcagagcggccagagatgctgagcgagcaggagcacatgagcatctcgggcagtagcgcccgacacatggtgatgcagaagctgctccgcaagcaggaggtaggcagaggggcagggtggtggcgggggagagggtaggggggcggggccgcagtgctcagctgtcttcccctcggccctgccccacagtctacagtgatggttctgcgcaacatggtggaccccaaggacatcgatgatgacctggaaggggaggtgacagaggagtgtggcaagttcggggccgtgaaccgcgtcatcatctaccaagagaaacaaggcgaggaggaggatgcagaaatcattgtcaagatctttgtggagttttccatagcctctgagactcataaggccatccaggccctcaatggccgctggtttgctggccgcaaggtggtggctgaagtgtacgaccaggagcgttttgataacagtgacctctctgcgtgacagtggtccctctccccggacttgcacttgttccttgtttcctctgggttttatagtgatacagtggtgtccccggggccaggcgcgctctgcccagcccagcctacagtgcggataaaggtgcggatgctgctggccctgaacgtccgtgtgtctgccgtcggtcctgtcaccgatcctgggcgtgtgtccttagggggtctagggcgaggaggcagggttgggggggtctctggacctgcttcctgttggcaggaggggcctgccgtgggcgagacctgggcagggggttggcgccccgggccccgtcccgcgggtggcggcggctgggtgggcggggctgcctggggcgccaggctctcgcgcgcgggctcgcagccgtccccgcagggtggtgctgagagaaggctgggcaccgggacaccgcgacccgctggacagcgcgcgctgccagtgcttttgtgccgcagagccggccgtccaaggcgggcgggcgggcatggtcgcttcccgggaggaggctgtgcgttaagattcgtggccaaatgccgcggggccaggggccgggctgaagaccggagggcggagggcgccgcctctcgtggattgtagctcccaatatcccgcgcgcggggcgggcccggcttcccggcacgctttgcgcggtgccgctacgggtcctcagaggcggcggcgcgcggggccttctgggggccgcagtccgggcgtgctaggcggcgagggccggactcggcttcccgacgggctgcgcggcggccgggtgggtgtcggcggggcagtccggcgggcagcggcggttccggtgcggcacagcgggcggacgagcgggcgggacgagctgagcaggaccaagcgggatgcggagccgccgccgccgccgctccccgcgcttcctaagagtctgagacccgccgggccgcgccccctgcccaggcccgcagtccgagcgttccgagcgcgggccgggcccagcgccggccgcggccgcgtccccgtccagtctcgggcggcccgccccctgcctgcgccccctccccatgcgcggcgcccatgcggactgagccccgccccccggccccgagcccgccgagcgccgccgccggagcccgcgccgcccacccgcaccatgctcaagtgcatcccgctgtggcgctgcaaccggcacgtggagtcggtggacaagcggcactgttcgctgcaggccgtgccggaggagatctaccgctacagccgcagcctggaggagctgctgctcgacgccaaccagctgcgcgagctgcccaaggtgagcggccgcccgcacctgccgcccaaaggcgcgcccccagcccgtgattcctccggcggcagaatctgcccgggcgagtcaccgcagcctccagccggccctgctggtttgcactggccaggtccccaccccagccagccccacccttctcttccagccgccctggctggcgcaggtggcagcggtcatcaggtgcttgcctggggatagcgattgtcaccgagcctggaggcggagcctcagagtgaaacccgtggggattcagggaggtggatggggttagggtggaacttggattcaggtggctgatgagtactagcttcttgggccgctctggaggtgggtccagacctcctctccttttttgctgggtgcaggggtgagtgggggagccctcttgatgtactctttgctctcggatctgttcgctgtccccctttctttacccttgcttctcgtggtcaggtgctctcctaaggctgctacaagaaaggaggctggagaaagcagattaaaaagtatttcttttctggagatggggtgctgggtgatcagtacctaggggttgggtgtcccaaagaatgtgaccctgttctggccgtggcagtgacagctcggtcctctgtggccacctgcaggcctcgcgcgtagcactgtgcctgtggtactgtgttattgtggggagcgtttactgagttcttgctgcagaaccaggccaggcttgttgtcaggatgcagtagcagaggccagtgtgggcccctggagggtggcagaagtggttcaggggctgggtgggccctgaggtaagacacagggtaggggattggggctttgtct

SEQ ID NO: 11822 - DNA, 6000 bp, Homo sapiens
ggttgcccccaagacccctccttcaggcattaatcattcactgaccgttcattgagcacctactatgtgccaggccaattgctgagtccgccaggagcgcagccacctgctgggaggtgtgtttgcaggacaggggtccaaccggcttgggtgggccagggaagaacggcagatgcagagagaccaggtccctaggttcacatgccccctacactcctccccacctcaaccagtccctgctgggcacaactgggctctacctttgagttaggccttttgactccagctgagggggacagatccagggctcctgggcccccacacaggtggccacttctctgatcctctggccaacacacatctgccatgtccagccaggggcagagccatggctggagaagaaggtgccagctgtagcctatggtgtggccagcctcacccccagcagcaagcgtggctgcccccacaaggatgacccaccgctctgcacagcagtgcccacatccaaacaccctacacaaccaggtgtggtgcctgcacagctcccaagctggggcctgcccacctgtgccgcatgcacacgcacacacaggcgcccccacctcaccccaccccatactcctgtctacctacctaaggagaaagctggagggctgtgggcccgtcagggtctcctgcttccccctacaccccgccgccgtggaaagccatgggccccctcccgcccccataactaagcagcacaataaccgacttagcgaattcaggtagaaggaacgtttaggtagcacctattttgtactgattctacaagtagggcccgaggtgcgggggccctcgggtgggggctgcggccgccggcccgcccgcccccacccccgcctgtgccccgccgccttgtacatattcccacccggaataggccgggatttttactcgggccgtgcccctcttccgcccccatttggggccaggccggccggacagacggacggacggacagacctccttcctaagcacaatagcaccagctccccggagcaccgcacctccacaaggagaataaatgccactcttgatagaatttggagtgtcgggctgatgtgtcctgggctgggcccacgctgttgggtggctgggagggtcttcccagtctggcagtacctcagaggctggtgctgcaagggtcagcctgaggcctttcacaagacggccctcttcttccactggggagggcaggcttggcaggcccaaccacaggagcatcaggtctgaaggcaaagtagttggcatttcccctggggtaggtggatctgctccacaccaggaacaggagcactaaggggttccagtctaaagtcaggccaagcccacggttggaccagagtgggcagggtaggtatagtaggagctgctgttccccagcctgggtgccttcgctcttctctccctgaaggagctttatgctgtgatggaaggcctgatagccacctcaagccctctgagatgctgttgcaggaaatggggacagtggagagttcgaggtctggcccttttcctgtggcctgctgcccacattctgacccccaggcttcccagatatgctcccccagtgtctgcggatgcctccatggatagctgggttggaccggttccagggaggaggtgcccagggggcagagaggcttctgcaaccatcgcccaagggctctagacagaatgagtagtggaggagataagggacagggaccctttgcccagcaatgtcccctggtaaccaggtaggcaggcatgagccgagaggcccaaagtcttcgggcacatacattcaaaccaggtcagtcctagatccagggccagcaaagctgcccacaccctagcagggacaggggacagacctgcccagactccactagggtggagagcaggggaaccaggtctgcagcatgtcatggcctgtgtgcctggcacttggaggagctgtggtgcaggtgggtgctctctttgggagagcactaccagcaatgacaatggcagacagcaatggccaggaggaaggctcctagcctcactccttccaaaggactccaacagcgactggctgtttctacttctccaggattctgatgcgtagagtgggtggaaggatggaggtggcctccctgaggcctgggatgagctcgaccccccagttcctcccagccacagacacaagtttccctctgaatgagcagcacaggccatagaccaccactggctgtgaactctcctgggacccttgcttctcacaggccttcttggcccacccatggcccctaggccctgggatcagcctgaggccccaacccacttccagccctttattccactagccctggaaggcaactcgcttcgggcttgggccccctcatttgttgctgcccccagcagggtgatctgcatcatgctttcctcgatgacccagccatacacacccttgtccccaaccaacctcacctaccctgaccattcccctcaccctagatcccagggtatagggcctgtctgggcagggcttcacccacctctggagctgctgccccgccacgcccccacccccggtggcaaagcccttccttaatggcccgcccacagccagtgctttccccattggctccaagcctggctctgctcaccaggcccgacccatcctccctggtggtccagtccaccctcccattgtctttctcctgtggccacttgccggctttgagttgggacgcgaccacaggttgagtcgttgatctcctctgcctagcatgaggtgctccgtggccaggtccagacctctctgagcttgctgtcagtccatactcagacaggtctgggcctacctggccacagagtgtgtctgccagcgactgcattcaacaaatgaatattctgagagactgggtaggagatggggctggtcctgaccgaccaaggcccatgtgtgaggggctcttgggtccagtgagggcggccccactcggcaggctacacaaagggcatctgccaggtagctccagcctgcctgatacctggttggcagcaacccacagcggcctgtggtgacaagaatatgtcaccaggggggcaaccaagggggcagccctgctggccactgttggtggaggtggtggaagaggacggagctcagaggcgaggctgtgaccagcccacgggagaggaccccacctcaggaggagcacctgtttgcttccagagaagtgctgcttgcccctgctcaccccagaggaatgaaggtgtttctagagtcagagtcctcagtgaaccctggcatcctgagatccaggatgttctcactccatgccctgtgcaatatgcacaccaagccaaggtgggccgcaactgtggctgttacagttgattagttgcttcatttaacatacaagatgtctggggcagtggctcatacctgtaatcccagcaccttcagaggccgaggtgggaggattgcgtgaggccaggagttcgagaccagcctgggcagaatagcgagacccccatctttagaaaaaataacaacaggccaggcgcggtggcttgcgcctataatcccagcactttgggaggccgaggtgggcggatcacgaggtcaggagatcgagaccagcctggccaatatggtgaaagcccgtctctactaaaaacagaaaaattagctgggcgtggtggcacgcgcctgtagtcctggctactcgggaggctgaggcaggagaatcgcttgaacccaggaggtggaggttgcagtgagacgagatcgcgctactgcactccagcctggcgacagagtgagactgtctcaaaaaaagaaaaaagaaaacaaaaaacaacagggcggttgcacaggccgtgcaaatgcacagaagcctcttgagtcccggcgatccagcggcccagacttctgacatcctggagaggctggcccacgttggaaactgggaggccctgagagttgagggacgtggagctccttgtggagagagtgggtgggctgagaagacaccaccaaggggcctgcgccctcgccctcgccctcgccctcctctcgccgggctctgcaggcggggaggtggagagcctgggagtcgcgtgcaaggcaggcgtcccggtgacgcagggcctggtgcatttctccagcttggtcttctgacctggcccttgtctgacgtccccctaaggcgaagaaaagcaggttcctgccggggtaaccagagggctcgcggagcagaagcgcgccagggacgttactgtaagctgcgtgcgcagaaaccaacgcgctgggtggcgggcgacgcgagccgccgcggacaccggcccggacagctggaccgtggcgcactaggcgcttcctaaatgattgcccggagtgactcgccgagaccccgtgtgtacacaagtgggacgaggggcgggcgcacagcggccaggaagtcggggcccagcgcacccctcagcggaccatcccgctccgtggggccggacaggaccccgggaccacgcgggagcgatgcaaggtccgttcccgctgcgcgcacttgcggcccgcagccccggccctgggagctgccacggctcccagggtgttctgcgccggtgcggccgcggcgactacgactcccagggtgctctgcgccggcgcgcccgcggcgactacgactcccagggtgccctgcgccccgtcagcctctccaggccccgcctcaggtcggccgcggactacaaatggacgagagaggcggccgtccattagttagcggctccggagcaacgcagccgttgtccttgaggccgacgggcctgacgcgggcgggttgaacgcgctggtgaggcggtcacccgggctacggcggccggcagggggcagtggcggccgttgtctagggcccggaggtggggccgcgcgcctcgggcgctacgaacccggcaggcccacgcttggctgcggccgggtgcgggctgaggccatgggcgaccgcggcagctcccggcgccggaggacagggtcgcggccctcgagccacggcggcggcgggcctgcggcggcggaagaggaggtgcgggacgccgctgcgggccccgacgtgggagccgcgggggacgcgccagccccggcccccaacaaggacggagacgccggcgtgggcagcggccactgggagctgaggtagcggagcgcctgaccccctaacctctgacccaagggccccgcgactttccggggttggccgaagcgcgagctccgagtccgagaacatgggccctgggctaagcggggatcggtgtgccctatgggccctgtggggaaactgaggcttggggagagtcacctgacaaggtcactgggtaggggctctggagctggccttggccaggcagaggggagccggcaggtgtcccgcatccagatcctcttgggtctgtgcatcctcaggggctcctgaggagcttttcgaggggcgggctggtgggggcccggccctggacagtgtccccttatatggaaggagtcagataagatctgggcagtttgtggtgataggttccttcttggtgctatgagcggtgccttgcgggtaggaaaggctcccagaggagggctggcctgccagggagggggccagaggagcccaggcctgtccgaggacaggggaatcagcagctgccccggacaaggggcagtgttagaggcgttcttgtccttgcagacccttctgagagtggctgcgtggcccattcattgctccagtggttaggctggcctggagccctgccgatgttgccagagccagcgtctgttgtagggacagagagttgggttctgtgttgggacttccatcctccaggtggggagtggggtatgggggtggtggacacacctgcaggcgtgtgccctgctcagctggatgactgacagagaggggtggagggagagaaccatggccgatgggaagg

SEQ ID NO: 11823 - DNA, 6000 bp, Homo sapiens
tggcaccatccctgctcactgcaagccctgcctcccgggttcatgccattctcctgcctcagcctcccaagtagctgggactacaggcacccgccaccacgcccagctaattttttgtattttcagtagagacagggtttcaccatgttagccaggatggtctggatctcctgacctcgtgatctgccggcctccgcctcccaaagtactgggattacaggcgtgagccaccgcgcccagccggctagtttttgtatctttagtaaacacggggttccaccatgttagccacgctagtctcaaatcctgacctcaggtgattcgcccgcctcagcctcccaaaatgctgggattacaggcgtgaaccaccgtgcccggcctattttattttttttactgtgataaaatatagcaaattttgccattttaactgattttaagtacacagttcaggggcattaagtgtatttacattattgtacaacctcaccaccgtctacctccagaacttttccatccaaacaaagtaaagctccatccccattaaacactcacacacattctccccttcccagccctggcagtcacccttctttcttttctttctcttttttttttttgagagagagtttggctctgtcgcccaggctggagtgcagtggcatgatctcagctcactgcagcctcaacctcccaggttcaagtgattctcctgcctcagcctcccgaatagctgggactacaggggtatgccgccagcctggcttaagttttgtattttgttgtttgtttgagtcggagtttcgctcttgttgtccaggctggagtgcaatggcgtgatctcggctcactgcaacgtccacctgccaggttcaagagtcgcctgcctcagcctcctgaataggtgggattacaggcatgtgccaccatgcctggctaattttgtatttttttttttttttttttgagatggagtctcgttctgtcgcccaggctggagtgcagtggtgcaatctcggctcactgcaagctccgcctcccaggttcaagagtcgcctgcctcagcctcctgagtagctgggattacaggcatgtgccaccacgcccggctaattttgtattttttttttttttttgagacggagtcttgctatgttggccaggctggagtgcagtggtgcaatctcggctcactgcaagcttcgcctcccgggttcacgccattctcctgcctcagcctcccgagtagctgggactacaggcgcccgccaccacacccggctaattatttttatttttagtagagacggggtttcaccgtgttagccaggatggtctcgatctcctgacctcgtgatccgcccgcctcagcctcccaaagtgctgggattacaggcataagccaccacgccctgctggctaattttgtatttttagtaaagatggggtttctccatgttggtcaggctggtctggaactcccgacctcaggtgatccgcctgccttggccctacaaagtactaggattacaggcatgagccactgggtgccaggcatgtattttttttaacttatttaattttttgtttttttttttagacagagtctcgttctgttgcccaggctggaatgctatggtgcgatctcggctcactgcaacctctgccttccgggttcaagcagttctcccgccttcgcctcctgagtagctgggattacaggctcctgccactatgcccagctaagttttgtaccttttagtagacaggttttcaccatgttggccaggctggtcttatactcccaacctcaggtgatccgcccgccttggcctcccaaagtactgggattagaggtatgagccactgtgcccggcctgtattttttttatttattttaaaattttttgttattactatttttgagacagagtctagctctgtcgcctaggctagagtgcaatggcgtgatctcagctcactgtaacctctgcctccggggttcaagcaattctcccgcctcagacttctgagcagctgggaccccgccaccatgcctggctaatttttgtattttttagtagagatggggtttcaccatgttggctaggctggtctcgaagtcctgaccttaggtgatctgcccgcctcggcctcccaaaacccttttactttctgtctccatgaatttgactggctggggtcctcacatcagtcagatcacaccgtccttgcccttttgcgtctggctgctttcgttcatcacagtctcctccaggtgcatccaagtcacggtgcaggccggtttccttcctttttctggctgaatcgtgttccactgtggatgaaccacgatgtgttcactcatgcgcgtttggatacttgagttgcttccatcttttgaatagtgctgccattgaacgtgggctttttttttttgttgtttttttctttttagagtcagggtcttgccaggttgcccgggctggagtgcgtgatgcgatcgtggctcactgcagcctccacctcctgggctcaagcaattctgcctcagcctcccgagtcgctgggactacaggcacccaccaccactcagggtgccttaatttgtttttgtgtttttagtggagctcgggtttcaccatgttgcccaggctggtcttaaactcctgactttaagtgatccccccgccccggcctcccacagcgctgggattacaggtgtgagccagcgtgaccagccggtgttgtttttaagatgggccagttgcagtgagcttgttggatgacagagtgggcctgaggggcaggagagtgcaacccgtctgctctggggaagccggccttaggctggggcatgggcaggtgaaaccctcaacagctgctcctgggctacggaagagagtttctgctgggaggggtggggtcacatgaatggagggaatggaggaggcctgtagcccagcactgaggcctactggggaggcagctcaggaaggccacagagtcaggcccaggccaagacctttgcccagaagctaaagtaggcccttgagcctattttagcatgggtggcctccagccagcccattggtcctggggtggtgtgggagggaaagggccagtttgggtccgcagcatcttcaggctgtgtgtagagcagccccctcatggtcctgggacccagaaatcatctgcacccccagcaggctctgcacccccggcaggatctgcacccccggcaggctcccctaagggcccccagaaggataccactgcgggtgggcccagccagaggagcaccatgagatccgcttggtggggtgaggccggcaggggaagcaccctgaccccaggacactgggctcaatgcccgccctgccccgtcccaccctgtgtatggcgggacagagtccttgggcctcaggcacccagctccccaccccagccccacccacaatgctcagggtcaggctggctggaccgggcgggaggtggcatctggactcccccttcagaaggcaaagctgccctgagatctgccttccccttcccccagacttcctgccatcaccaccacggtagagataaggcctctaggctcaaaggccagagagggagcccacagagagggcagggctgggagccacagcctccctgcccccggggctagagctggggtcttgccccaatcttatcctgacccaagctcggccaggtggctgccagggcccagctccgtcttcctgtttgtctgtgttggagcttcctggggctgtctccggcctaagggagcatgatgcagcaggcaccttttcagtttctttgactccatcgcagtccccaacagggaccacagcccaggacccaggaggagggaggtccatgtccccacccccaacaggggccaccgagggtgtctgggcagcctctgttgggaggggcagaggcagggacctgggagctctcaggctctgggggcatctgtgcacctctgccctgtgtcccccagcttggaggcagcccccagatggacagccagaaggggacaccccagccctgccccacagcttggggggcagcaggcagaggacagaagcccacccaggctggcctggcgtggtgagccacgccggtaatcccagcactttgggaggccaaggcgggcgaatcacctgaggttgggagttcaagaccagcctgaccaacatggagaaacactgtctctactaaaaatacaaaagtaaccgggcgtggtggcgctgcctgtaatcccagctactcgggaggctgaggcaggagaagcacttgaacccgggaggcggaggttgccgtgagccaagatcacgccattgcactccagcctgggcagcaagagcaaaactccaactcgaaaaaaaaaagaccaccgaggctgcctgtccaggggaaggggcccagccctcgacccccacaggcagtggctccaggctgttggggaggatctgccactggaatggttaacccaggcatctccagcagccaatcacagagctctgcaggaatacctgggagaggtcctcatgcagcccgggcgggtcctagcccagccccagtctggccctggacaaccccagcaaagccgccctcagccagcccagaagcactgggccttggccacagcaacacccactgagcacgctgggagctgagtatggcgtccctggtctcgctggagctggggctgcttctggctgtgctggtggtgacggcgacggcgtccccgcctgctggtctgctgagcctgctcacctctggccagggcgctctggatcaagaggctctgggcggcctgttaaatacgctggcggaccgtgtgcactgcgccaacgggccgtgtggaaaggtaacagccccacccgacgggtcccccagccctggcctcttcccgccagctccgccctgccagccggcagcaaagggccctgggcaaactccaggaggcggaggaggctagtggcagtacctgggcaccctgaccctccccacaggccagagcccaccctcctgctcatgagggcagacaggcctttccagggacacagtccctcttctccccaggaccccagggccaactccccctgccggccctctgccatcaaattggcagtggctccaggggagtcccctggggatgggggaccactgttggggacccctctgcgtgcacccctgtagttggggaagcaggacaggggcctggggagacggaagggcgccaggggttgagagaggatggtggacgttgttggacttgaaagggaaacaggccctcggggaagcccctggccaggcctgcctctcccctccctggtgggcccagcgcccctgctcacttgtctctgcccacagtgcctgtctgtggaggacgccctgggcctgggcgagcctgaggggtcagggctgcccccgggcccggtcctggaggccaggtacgtcgcccgcctcagtgccgccgccgtcctgtacctcagcaaccccgagggcacctgtgaggacgctcgggctggcctctgggcctctcatgcagaccacctcctggccctgctcgagagccccaaggccctgaccccgggcctgagctggctgctgcagaggatgcaggcccgggctgccggccagacccccaagacggtgagggagagtccaggcagaccaggggagtgggtgaggagggtcccacggcccatgggacccggcctggctgcaaagccttcggggagcctgggggcctggggagacgcccaggagtcggcctgcggctggggattcacaacgtggggctcactactgggcagttgggagcctgtaggagccccgggagggacctcatgagggaggaacccagaggcctgagtgggagcctgaagcagctgggcccggcagggagggctgtggctccagggaggggcggggctggtgggggcagatcctgtagttggggtgggagatgcatccagg

SEQ ID NO: 11824 - DNA, 6000 bp, Homo sapiens
tcactttctggaaggtgttgatgatgcagccacctgggcccgggcctctgaggaccggttctgggaagcatcctgcttccttcccttctcaaggcgcactgcccgagtctcccttccaggaagtgtgagcagcttgtgacattgagacgactcatcactgagcaaaggaaggcaaacgtggcgcacccagcacagtgatcacggcgccctatgtttgattaagggccatcacagaccctctcagatccacccagacccctctgggccacaggggagcaggacagccatttctctgaagctcaagggtgatcagagatgttagaaagtgcgcctgtgttgtgtgttcactcgggacaggtccacgctctccaggcggcacccgaggcaccgcacacgccatccgcacgttcgctgctgtgcccagaggtgtgcgttgctggaggagggttgggtgttgactccaaggaagcaccagggcacagaatagccagacgaccttgctacagctcccccaagatggtttacggggtctccagtcacacgttgtggagtatggtttacatggtctccagtcacacgttatggaatatggtttacggggtctccaggtcacacgttatggagcactgccttcatcaagctccagcagatgagaaaggtgactcctaaagtacgttctgccagagggaccctaagcaaggggtctgagtgaggaagccccacccggagttgccgcggtgaaagactgtttctccagtgaagacagatgtgcattcccacgcgtgaatggatgattcccaagacttctcagtcaaaggcacgttttgttttggcgatggaaatgtgaggtcagaggtcggcgctgtcagtttcacagcaccgatcagcctcacacatgggatgggatagcgtccagcctctccctgggaggtattcagtttggaccatgggaagtaaagaggctaggtggaggaagcttacggtcacgtgatttcagaacgtctcagagcgcagagagagctgtagttgtatgacagcagccaacgttggcttcctaggccaggcggcccatctttccaatgactggtggagcaaatggttctcctcccttatacgaggaggccaggagagagagatctaccagaagaaggaggatttccttgtctctttaagcatagataagggcatttctgaggtcgctgagatggtaattagcatttctcccatgctgtcccagatgcggaagatgtaaggaagaacatggctctacctatggcctgtccaggcgaacagggttcttgcctagtgagggttctgaactgggggtgggaacgtggtagaagtacggtagtccccgctgtccacggggacatgttccaagacccctagcagatgcctgaaacctcagccagtaccaacacttgtaggtagatttttcctgttgtcgacaaaaagagttgaactctgtaaagtattttgaaggggtttattctgagccaaagatgaatgacccacagcccgtggcacagccctcaggagatcctgagaacatgtgtccagtgtggtcaagatacagcttttggttttatacactttagggagacataagccattggtcactacctgtagatgtaccttggttgggtctggaaaggcaggacaactggaagtgaggcctcccaagtcattatggagtcaaacattttccgattggccattggttgaaagagttaaattattgtctgaagacctagaattcatagaaagcgatgtctgggtgaagataaggggttgtggagatgcagttcccaccgtgcagaggaagcctccaggcagcaggctgcaaagaggatggatggtaagtgtttcttatcagagtcaattctctcctggatctgggaaaaggaaggaaaaagaagggaattctcttcagaatgtagattttcctgcactatttcaagatacggcaaaataaataaaaaaaaaaaaattacacattcgggatggaaatatttttattttgttctttatctgtcacgtgatgtgcccgagtcaggttggaaagtgagccatgttatgtagggtaaagaaaacccctctaatgagactccgtggtttgtagggcatgactccccaggccccttggatgggaatttgggcaagagcagaagaaagccagagtgcagagctcactgtgtctgtgcagccgtgataaagctcagcacatacgttaagcacagtaagagagtaacctgaataactgtaatgaaatcggcatttataacaatctactttaataaaacgtatgtgaatgtggtctctgtttctctctcaaagcagcttatttcatacctcagtgactgaagccacaggaagagaacctccaagaagggggtgctgccctgtacaaaatgtaggctgaaaatacaaagcctcgttagataaggaaggatggtacccacagttatactgacacacatgctgcattaagctctcccagctagaaggccacaccgcactcggaaaccttccatgcatgtaccctcagcccatgctggattgttaactttgaacggtgtcacctgagccacacagcttccagacctcctgttctctcatctgataaacagcaagggcgggtgggaggagatcaggcaaggaagcgtttgtactcctgcaattcaaggctgaccttcaaacgtccccactcctcattcttggagtgctgttctcaagataattaggtgtgttcctccagcaaatcgcaggcttccgataccaagcttgtgctctgtgtgaagcacgtggctttgctaaactccatgcctgttgctgctggtgttgttagcggagtgctcatgcttgtcattgcaactgggtgatgttggcccatccttcaagtccgccctgtgagagcccctgccttgtctctgtgtgcatgtgtgctgaaagtctggtgtaaggagggctgaggttgaagggcccattgttttagttcatccccaaattcctttctcacacagctggacgctctgttctcacattactcacacatatgacgatggtctccatggaaactgtagttaattagagctgtccatcatatttctacatgaatgagaccattccagtctgtggttttatgttatacttaatgtggacatttggcagatgtatttcattagctgaaaaacgcagcttaaactatgcaaaaagtgctgttagccttgaagaaatggggttatgttaaatcatttgagctgtcttgtaagatacttaacttaattcagatagctatttcttatacatgtgtgtttttttaaaagctgtaactgggagatcccatgaaatgaactcttagttcacatttacctgagaggcgaccgtatcctcttcatcagcatctcacattccaaatctgtcatcttcctttcccaaacctctacgaacttattgaaaatggcagatgccgatttgttgaatcagagatggtgattgcagtgtaagtggctccagcatcacactctgaaataaatccgtttgcagactacagcctggctaactgcatctaacacttgggtggggggggtgggggcaaatgtgagatgtgcctcaaagcctgtccatgaatattggaaacccacatatgtgtgtgaatacatgcctagagtctgaacatgcaatcatatttatatttggggcatatatgccaaaatggtgacaaagatgtgtgtacgcacatgtgtcatcattctgataccccataaataacatgtttacatgcacatgtaacgtggtgccaaattctcccttatctgatgctccctgcccccctcctcaggccactccccacaccactcactgtggctggtgtcgggcagagcctccctgagatccagctgtgtctacactgcctctgcagccaggtagaaaccaaggcagcctggagagtcggcacctggtttcctgggcagagcctccctgagatccagctgtgtctgcactgcctctgcagccaggtagaaaccaaggcagcctggagagtcggcacctggtttcctgggcagagcctccctgagatccagctgtgtctgcactgcctctgcagcctggtagaaaccaaggcagcctggagagtcggcacctggtttcctgggcagagcccactgggaggagagctacgggatgatgctcagtccagctcctcagggaccagttaaatcaagtgacaagcttgtctgtctccccagttccctgttgccccacacatggagggaagacagtgctcagtgaccccaagaccttttacagccacatgctgatgtcattctaagaaagtgatgtctgcttttgtgttagcacagatcgaacaatggaaaatcaatgccagtgacctgggtgatctcccaacagagggaaattaaatcagcgttttggtcaaagtggacctaatatgaactaatattaagcactaagatcacaaatgcaggctttgaacattgcaaaatgaggcttcgaatggcatgaagctttctagaccggaaggaaagtctttctcatgggcgatgcagggccctcatgggactcacccagctggaaggaaccggggaaaattagagtggactgattttactcaagtctgttccaatgcaaataaggcctaataaatttgaagttaggccagagttaaagctgagaatcattgggactcactgcctatgtccgtgtctaggtgggagaaatacgtgcatctgtggtcacaatgctgctttacagaaaacactggttgttcctgaggttattggcacaaaatgctgggctctgagcggtgacgtttgaagaaatacaaaggtgtctgtcatgtttgaactgttgagtgtggagggttttgaagatgtgcagggaatgactgcagtctacaccagaaacgcattaaagagtgactttgtttctgtctttgcagaggaagaagctggagacttggtccagccgggcatcagctttccggggccggcagaggaggatctaggtagagtacagacgtcagccccgctctggcggggcccggacagaaccgggcatgctccgggcacctcccatcatgcggaccgtcccacaaacacacgttagcatgtttagaaagggagctaagaagaactaagtacaatgcggcacttttttccaaaaataatagtttttaagcattacggaagtgctaggtgaggaagggctgctcctggccctcaggaactgaggcagccgttcacataaacgatgcatgtctccagaggtgaaggacccctccttcccttgctcctctgtgtctaaacatattctaagcaaactcaggaagcagggtgttcccgcatttgcatttttcatgtagaccttccttggcaggaagcagctcatctctccagctggccccacacactggggtctggatgctgagtatgactgtgcgcttccttccaagggccctgcgagaggctgccacgacacactttccccgatgctggttcaaatcacgtggaaatttcatttctgagctgccaccagcacagcaaagctggtgccatatttgccatcagtcttttgacatggagctatgcttacaagaacaaggcccaatgcttctgttaaagatgtgaaatgttgaatacatctgacatcaaactgttgaataaaatcaacgtcaaaccacagctgaagacggaagccccatcagtggctctgtctgtggttattctctaacctaaaagaggtttgttgctgtctgtggttattctctaacctaaaagattgtcagcctctttctcaagccactgacagctgtctgcagtgacagcactcagggctgggtctcggatcataagttcaatttatatttaaatgtacatttttaaaaacgtatttcagacttttagccagtgcatctattgctggtttgatttgcctaaagaataatatcgaaaattgaaggagtccactttgtataaa

SEQ ID NO: 11825 - DNA, 6000 bp, Homo sapiens
aaagaggtgccagactcttagttaaatctctcctagatcagggaaaagacctggaaagggaaggggattctggcaggatgtggattttcccctcaagagacagccgtgtggggccccttcaaaatatgtcaaagaaatatattctggggtaaaatgcttgatttcttccagggcctgctctctatcatgtgatgctatactagagtcaggttggaatgtagtatcttattgctacagagtctgttttgtcaaccttaagatctctgctttgacgttaatgcaggtcagctgtgcctggatttcaacggaaggcgggtataaggagcctgtcccacccccacttcccatcacggtctgaactagtctctaaggtttactttggaaagctcgtggctaacggggttggcgggggactagaattttatttttgttttacagtctcaaaggaatcgcgataggtgcaggggccactgcagtgggactaggctcaactctgagtgtaagaagaaaaacgggaatgtacagccacggagagggtgagaacggacggaaaactatgaagaggctacatcaggccaggggggttcttgctagaaccacttggtaggattcgtgccacaggcaggccaggtgataagataccgagggtgagggatgaggagtatgatatcaggggcggggaactgtcactgcattgacccagcaggattcttttggacgaaaggggacaggggtccaggtcagagccttgagggcttcgaggaccctgcctggagttaggtcaggtagagtctttgccacattgaggctgagaagctgagcagctgatctgcgggagtccagagaccctcatgcttcctgcagatgtgctgtcagcagatcctgaacttgggttccagtgttttaaagtgttgtttgcaagcaccgcggtcctgctctcccactcacagaactactattgctcactggtgaaggacactggatttaaaatcacagacgttctttttcgcctctcgctcattatacatccctttgaggacaccgtcattttgctgtttaggaggaagaaacaggcagaagagaactcctcccatccctccgctaatggcttttaaaacagtcttttttgtaatggaacaaccaaacctcacaatgagcgtatattgcttgtgtgaccagaaagtaagacagtcccctgacacctcaattaagtcattttggttgtctactccagacacctcatggcatcgtacttcaaaattcagctttgtcatttagcagtgtgtggaggtgcacacattgctaacctcaggctcactgaacactgttttttttctatgacgtggataatggtgcctgcgtcagacacctgtgatgtttgaaagaaccagtttatcaaagtgcttagcctgacgcctgacacgctgtgcacccaagataaatgtttgttgtgtcattcgatctgtcgaggaaggaggtgagacacttgtgggtggcagggcgggaggggagtacacaggctgtaaacagcagtgcccaagctgagacggagcaagctgggaatccgcccgggtttcattcagtgttccacaccccgcatggatactggttatacctgtgatcagttatgcctgtgatggttttttagaaaacaaaactattttatcactctgctttaaagatggccgagtggaaagacacagtcctggaatgtttaaattcaagctgaagagcttactagccacgtgactgagcaagttatggttccatctttctaagcctcacttcattctttgttaagacaggcctcagcatgctgttagtaggaatctaaggaacccagtgctgatggagaaaggggtccagtccagaccctaagagagagttctcggatcttgcgcagggaggaactcaaggcagtcgcagagtgcagtgagagacagctgctctgatacagagtggggagcccgcggaaagcaggaagaagaatgtgccatctttgtttcaaaggcatcttgtatcaatgtaaaagccaagctacgtgtaagtgcaggtgggctggcagtgtgacaagatctagtacttggtggatgtaaataacgttatccttggcatttcagtgcgtaactacatctaagcatgactatagccatctttttttttttttttttttttttttgagatggagtcttgctctgttgcccaggctggagtgcagtggcatgatctcggctcactgcaacctccgcctcccaggttcaggcaattctcctgcctcagcctcccacgtagctgggattacaggctactgtaactgccaatcaggttcatgttgcctacacagagctgatttatccaaacaggtgaactgcatagagaaagaataatccacacagagctggctgtgcgggagaccagagttttattattactcaaatcaatttccccaagaattcggagttcagagtttttgctgttgtttttgagatggagtcttgctctgttgcccaggctggagtgcagtggtgcgatttcagcacactgcaacctccgccttcagggttcaagcaattctcctgcctcaggctcccaagtagttggcattacaggcgtgcaccaccacgcctggctaatttttgtatttttagtagagacggggttttgccatgttggccaggctggtcttgaacttctgacctcaagtgatccgcctgcctcggcctcccagagtcctgggattacaggtgtgagccaccgtgcccagccctggagttcagagtttttaaggataatttggtaggtagggggccagtaagctgggagcactgaggggtcagatcagagatgaaatcgtatggatcaaagctgtcctcttggcctgagccggttgctgagtgcgggccacaagatcagatgagccagtttatccatctggatggtcccagctaattcagcaagtgcaaggtctgcaaaatatctcaagcactgttgttaggtttttcaatagtgatgttatccccaggagcaatttagggagggtcagaatcttgtaatctccagctgcatgaattctaaaccataatttctaatcttgtggctaatttgttagtcctacaaaggcagtctagtctccagacaagaaaaggatttgtttcgggaaaccataaactaagtttcttccaaagttagtttggcctacacccaggaatgaacaaggacagtttggaggttaaaagtaggatggagttggttaggtcagatctctcactgtctcagttataattttgcaatggtggtttcactggttttaagatggagtttattttattttatttttatttttttgagacagagtttcattcttgttgcccaggctagagtgccatggcgtgatctcagctcactgcaacctctgcctcctgggttcaagcaattctgcttcagcctcctgagtagctgagattacaggtgcccaccaccacacccggctaatttttttctcccaaactgctgggattacaggcttgagccaccgcgcccgccaagatgggttgttgattttaaaacgatgtcaccctggctctcctaggttcctgttcccctaacatcatgaaggctgctggcagttctctggcctccagggaggcctccacacacatttacccatgttcttagacaatcctagggactcaaggcttcaacaaacctaaatgagccagcagaaaaataaacttgaacatgaatgtcaacgttttcccacatgtactaaagggttataataattttgaaatgtttatttcaaagagcgttggtaatttaaacgtcctatttaatccccaaaacagtcctgagggggagataaggcagttatcttcatagtacaggaaaggaaaaaagcgagggtccaaggccgactataccctcagctccattagcccccgaggcctccctgacaggcggggcggacaatcccagtgcagatgctctgtatcgatcgcatgctatcggttctttcaaggaacgtgtattgatcatcaattaagtggtgagtactcctctagatgtcgattctaaagagggaacaaaacacattagacagaagaaacataagtaactcgaataacaaccttagagagaagaaacataagtaactcgaataacaaccttagcaaactgcggaaactcctacagacaaaaactcaggtgtgggcgcagaagggccggggatgcgctcggtcaagacttgaaggtccggggcttgggccctgtgtcctcaccgagccccggggaggctccggctccgtccacacccggagcgcgactcagccgcggccggggctcttctggagaacggcgcggtcaggctctgccgcagctttcaggtcccctcggccccgtccgggtgcagcgcaaccaggctgcccgcggagccccaccgcccccatgccgccgcccgccatggttcagcccggccccgcccctcccgccggccgtggttcagcgcgtccaccccgccgccccacagcgcccgccgcgccgcgccccgccccccgccgcgccccgccccccgccgcgccccgccccccgccgcgccccgccccccgccgcgccccgccccccgccgcgccccgccccccgccgcgccccgccccccgccgcgccccgccccccgccgcgccccgccccccgccgcgccccgccccccgccgcgccccgccccccgccgcgccccgccccccgccgcgccccgccccccgcgccgcgccccgccccccgccgcgcccctcccgcgcccgccgccccgcccctcccgcgcccgccgccgtcgtagcgcctaggcggggcctctcgtagcgacgcccccaggggggcagaacgcgtgcgcacgcgcgtgcgaacgcgcgtgcgcgggcggtgtttgaggccggccagtcgtgactgggcggcaatgaggtcagtgactgccgggagtcctgcaggggcggggcggcgccaagcgcagggagcccggctgagtggcagcccaggtgagcgctcagggagcccgggtgagggccgggaacccaggtgaggggcagcccaggtgagcgcgcggggtgcccgggttaggggccgggaacccaggtgaggggcagcccaggtgagcgcgcgtggagcccaggcgagggggctgggaagcccgggtgaggggaccggggatcccaggtgaggggccgggaactcagctgagggggaacccagatgggcgcgcgggagcccacgtgagggggagcccgggtgaggggccggggtggctcctggcgtccgcggtcccagccctgccttccggtgggcgtgcggcaccccgggccgtgcggttcccggacagcagcttgtgggggactttcgagccccgcagcccggggtcctgcctgcgcgggttgggcgtggggggctcctcaccgcgacgctgactttggagtccttgagcggcgcggatgccggacggagggaggggacaggcggaggcggaggcggcgccgtcgcccctgacctcgcttccctcagaccggctgggcaagtacggtcagctcacctgtgtgcccacgaggcggggaggcggctcctgcagagccacagaggtgccgtcggagctgctgtcaaggacagcaggtgtcacgtgggtgtggcctccactggtcaccgagttagctggggcggaaggggacaaggtgcagctcaacatggtgtgggaggcggagggacgctgggtcagtcagaacctgtaggagcggggagggacgctgggtaaggtcaccaaagtgtgcgggggagagagcgggcgctgggtcaggtcagcaggaggtgggacccgcctgggctctgggccctatagccagctgctctaggttggggttgggtgtggacagtagggaggggagccaggggctccccagcctgtgtagattctgctgtaagtgactcttctctgaaagactggcgcgaggcggctgcttctga

SEQ ID NO: 11826 - DNA, 6000 bp, Homo sapiens
ggggtggcttgtctgcatgaccatcttagtcacctcaaggagggaaggggcaaaggattgccaagcatctactgcgtaagtagatagctgtaacctctgggtaagaaagtgggattgggtgcggcatgagggaaatgtccacatttcattcaatattcaaaacataggattgcttacactttttataacaggaatgccttcttgttttatctgtgcaaacagcaaaataaaagcatgaatgggaactgaccaaagttttatttagtttttacagaaataggatcatagtgcatgtattatccagcaacttgctttgtcacctagtgtcctggagatctgtccacgactacgcatttagtgctacttattcctgtccaactgctgcataccatttcacttatcagtactgtgtatccacaaagctattctgctactgatgtgcacttaggtagatggactgattaaaagggtatctgtctgtattaggctgttcttgcattgctataaagaaatacctgagactgggtaatttataaagaaaagtggtttaattggctcacattttggctggctgtacaggaagcatagtgctggcatctgctcagcttctggggaggcctcaggaaacttacaatcatggtgaaaggaaaagggagagcaggagcaagagtgagtggggaggtgctacgtggttttcaaccaccagatctcgcgagaatcactcactatcctgaggacagtgccaagagggacggtgatacctattcatgagaaaactgcccctgtgatccaatcgcctggcaccaggccccacctccaacattgggggttaagactgataatgagatttgggtggggacacagatccaaaccatatggctgtccattcttagaacatactgtcaaatttccttccaagaacactgtacatgagggattcgtttttctctccatacatggtcaccaccaaaggctaagctaccatcatcctttctagctgggagtctagctatagtctccaaactgtttaaaatatactctccacaatgcctgaacaacttttaaaaagatcaaatataagcatgtcactcctctccttaaaatctcagtagcttccctgtcctttgggataaattctaaaatccttatgtgtcccccaagaccctgctgtcatctggttcttgcctatctttccagactcaatccctagcatccttgtctcctttccttaccccaattatttctgtaaaaacaatcttcaaatggaggcatgcgtatccctgagaatatggacacgtggtcatgaggagtttcaagggattcagttttcagatcccaactcttctaaaagtgatctgtctgaggactcctgcagtccaggcccacctggcatttcataatggctcctctcccccctggcacatcctaaatcttactacattgtgctgccctgctgaggtagaaaggtgtaataaaccttaggacaccaacagagataacttatttaagagatgcatttcttgtaacttttttttttttttgcctacaattccttatcagattttgtgaaacacattgattaaactgtgtattgctaataatagtaacagttcaatccagaagaaaatttgcttcttaggaccctaatgatacagtctgatcagtaaaaaactttgaaggatagagcatattcaattatgatagaatcctgtggtagaagtgaaataaaaatattttcagggagaaaaataatcaatgcaaaattttcaactggtcaaaggcttaagtatttttgaaatgaatgatggggtggatattaagtcactataatatttataactcactgcatacatttaaaaattttctgtaatcactttattttcaaaacatcattcataactcatcagaacttcataactacttaaatttataattaaaagcctttttaaatttatcattaaaagcccccctctccccacctttttttttctttgagatggactctttctcttttgcccaggctggattgcagtgacgcgatcatggctcatagcagctttgaactcctgggctcaagcaatcctcccaactcagcctcctgagtagctggggctacaggcatgcacaatcacacccagctaattaaaaaaatatatttgtagagatggaggcctcactctacaaagcgcttaagtgatccttcctccttggcctcctgaagtgctggaattacaggtataggccaccatgcccagctgagaaaaacatttaaatatcagtttaagaatgtgtgatgggaatacacagcattctttcaaggggcatctcaacaaattttaaaaagaacactgtggcccactccagtgctatgcatgagaatatggtgatttctcagcttcaggcgttcaaatgtgccattctcccatggaaagcccactaagtccctcaagcttcacctgaaataccatttcactgagaagtcttccttgtctccagactaaattagattgccttgatatatgctcccagagaaccaagaatgtccccttttcatcccacaggtaactccttgttaaatgttgtacaaggaaggcatagacagaattcacctttcactgttccactggtgcccagcagggtatgcaaaggaggaaatcagctgtgctctgaaagaagcaccattccagtaaaggggaggaaaaggtcatcagactgcaagggctcaacaaaagtacaaggtaaggaggcagagggtgtgggctgattatcaactaagaggtttgcacggaaaaagggaaaaaaaaaaaaacagaaaaacagggccgggtagtggcagaaagagagggtggatctgtgactgttcgcaggaagagaggagcgggagcaggacagacaataactgatagtcaggagctgggtttggagataaagagggaacaagagaaagttaagttctgtgttttcatggcaaacattgcacaaaagtttacaacttcgtgactaacagtaatctggggtgattcacaacaaatttacacataaacacatatttactgactttatacacagcaatcctaacgtgaacacagaacctgctttatcttttcgcacactgttctagtgtagagatgtctggtctcagttaaagaaagcataaggagcattagttgtgcacactgtccacacctgtgacttttttccaccagtactaaacctagtgcttcttacagtacaggacaatgacagccacagaaagagagaagctccttttactgtgtaatgcttcctgctggccttcaaatacttgttacttgagagatctccattcacctggctttgtccccaaaggtcatcatctaccaatgatgttgttatttgatgttaatcatgtataaagaaagtagctaccatcctggccctgattagaacttcccactgaaataccgtcctgcctaaaggtagcacaggctcccattatggtggtggtggggagggggcgggaatatatatatatatatatatatatatatatatatatatatggtaaagcattcggcattcttttaaagtacaactatccttgaaaagggttacatattaaaccatttttaccacagccaaaggggaggagaaagatccaaaagtcctgtggatctgctttaacatcaataaaacagttatccacccttcgtagcttttagtgaaggctacaaaagtatgctttttatggattacacatgtgcacgcaactactttaattactacagaaaaaaacgaggctccttattaaaaaaaaatcagaaacaagtccaacagactctgaggaaatgaagcaagagtgaattctgaaaaggtctaataaacagtatggaaatatccttgtgggattgttcttcagctatgcataaacatgtaattatcatcattactgtgatggggaaaaacacggaccctaattctgaaacaccctggtagcgagagacgggcaggaggggctgctgcgcactcagagcggaggctgaggaggcggcgtccccttgcaaaggactggcagtgagcagatggggacactcgagctgccccgcgacctgggccgagctgcctacaacctgggcccaggtgcctgcaagaattagacctccgataacgttaacacccactttctcactgctctaattgtgtgcatcccggcgcccaggggcttgtgagcagcaggtgcgcgttccaggcagctccagcgacccttaaacctgaccgcgcgcacgtccggcccgagggagcagaacaagaggcacccggaccctcctccggccagcacccaccttcacccagttccgtcagtcgccaccacctcccttcccgcgtccgcagccggcccagctggggagcatgcgcagtggccggagccgggttgcccgcgccccagcaggtagctgtactgcaactgtcggcccaaaccaaccaatcaagagacgtgttattgccgccgaggtggaactatggcaacgggcgaccaatcagaaggcgcgttgttgccgcggagccccctgccccggcagggggatgtggcgatgggtgagggtcatggggtgtgagcatccctgagccatcgatccgggagggccgcgggttcccttgctttgccgccgggagcggcgcacgcagccccgcactcgcctacccggccccgggcggcggcgcggcccatgcggctgggggcggaggctgggagcgggtggcgggcgcggcggcccgggcccgggcggtgattggccgcctgctggccgcgactgaggcccgggaggcgggcggggagcgcaggcggagctcgctgccgccgagctgagaagatgctgctgtccctggtgctccacacgtactccatgcgctacctgctgcccagcgtcgtgctcctgggcacggcgcccacctacgtgttggcctggggggtctggcggctgctctccgccttcctgcccgcccgcttctaccaagcgctggacgaccggctctactgcgtctaccagagcatggtgctcttcttcttcgagaattacaccggggtccaggtgagccgcctcccgctcccgggtctcggcgtccacccgagctcccgggggcgcggacctctccgctcccccacagctggcgagggtcacccggccggcccggcggacccagcacggagagcacgtgccgcctccccgccttcctctccgcatgcttcctgccgttctgccgagatcgctctctaggaagctgtggctgcgtcgtcctgaggctacgagtgggacccgccgcccctttccccgcccctcgcctgggtctgatgctgcttagcaaagtgggtgcagatgcacgttttaaataatagggcacgcgtttagcagtttctggcctttggtccaaagaggtggtcatgttggaacagatcggagacgtctacactccgaagtgcgcttttacagtgacctcttgaaacagaagtacaattcggtcttgtgttctttcccctggacaagtgaaagctgggcgaagaaatgaatacatttgttaaccgtagaagcctaactagatacatttcttgccaactttaactgggcttgaatgtgtgggtgatctgttgtctgattactttctttctgttactgtttctctgtagagattggattcgtagattaaacttgagaaacaaaccataaaagtggaaggccctctttaacagtaggtatttgaagtgttataaaaaaaaaaaaaaggtgaatttttcttttatttctcagtttgaaagaacagctttattcttggttattcctaatgtccacctagtcctcttttacttttcttggtagggttagggtggcatggggaaatgggacggtatcattttgtctttttaactttttttttttccacctacagcagctgtttttaccctgtggtcagtcaggtactatatttagtttgcagttgcactgctgatcgacccttgatggcccc

SEQ ID NO: 11827 - DNA, 6000 bp, Homo sapiens
tattagaaaacacgtggcagtgataaattctataaacagaacaaattagagggaagtgatactgagctaacaagagggctatttcacactcgatgtgaaaagttattgatttattttctacaatattaggcactcacagttggtaaaacagctgttggactactggccaaaaagaaaaactaatacaatattgaaggggctttgttcaattcaggctgttttaatgctatttaaaaataaagatcatagtttaagttttttcatagtctaatttttattctataactcactgaagtagatttaccataggatgattatcagtggagttcatttctcactcctattcagaattctcatagtataacattgtgaacaaaattgtcttatcgcttagcaaacacaggaaagggtgttcagagttccaggaagaaaaagagaaaatagcctttggagaaagtaaaataaagacctggcagagggaatctgaggacatcttattatggcaaagtgatctagtgcaggggtccccaacccctgggccaccaaccagtaccagtctgtggcctgtcaggaactgggccacacagtaggagatgagccatgggcgagcaagcattactgcctgagctccacctcctgtcagatcagtggtggctttagattctcatgggagtgtgaaccccattgtaacccgcacatgcgagggatctaggttgcctgatcatccaagatggaacagtttcatcccgaaaccatctttacccccacaaccccatggaaaaattaccttccatgaaacctgtccctggtgccaaagagtttgaggactgatgatctagtggaccctctgtcctagccaaagttggtaatgtgactttccaagatgaagctgttgcaggttgcacctttgtgcgaggtggtagcagaggcctagagtgcaggcaaacaggggactcagcatcagtcccttcagaattcactgctgggggctcactattcatttcaaaagctgcagcatagtgaacagattcttgcattactaccgggcccttcttcagaaaagaaatctgtggtagaacctgggtatccacttacacagccaggtcctaatgtcagcaatcattcattcattcctaccacagagtgactcatgctttatttctccctcagacttcagatgaactcagaaggccagggaacagaggtcagctctatccccagatgctatgcttaacacagtcacttctttctctattgtcgcagaaagtgagccccacaggcctacgcttatttgtcgtaaatatctggagctatcccatactcgtatgggatagattgttttctatgctaaggaaaaagaaacattcaaacaaatcaacctgcttactgagatgtatgtcacaatctgttttggccagacggtcatttgttggaaaattcagtaggtactatgtggaagaactcagggcagaaagacataatattgatttgttgagtggctgcggtggcccaggcaccaagatgtgtttggaggacagaacagaacaagatctatgtggtccctgccctcagagaactcccagaccagctagaaaacaaaatgattcaaggactaaggaactgtggtaagtggtgtgacagaaggggtgtcacggaagtatatgaaaggaaaaattaattaacttcatctaggggatgaggaaaccctcccagagaaaatggcacttaagcaaagatctaaggatgcactggagtggggaagtgataggcagggcactaggaaaagagaagggcatttgcaaaggtctggaagcaaaagggcacacaatgttcggggaaaatgtggggggaaatccagtttctttgggttataatgtgaggagatgaggcggcagggagggagagacagggctggaatgcagggctgggtgggactgggaatggtcttgtaaagggttgatgcaggccagctgtgaggttcgtgtggctaataaaaagggagccacaaagcccggtgtaggagaccagttagcagcttaaggagaaagatgggagaatggcctgtactgggaagaggcagtagagaagaaagagacatggaaggacgaaagacagatttaggaggtagaacccccaggatgcccttcctccccacaggtaaataacacctgggcttcactcattccacagagatctaagcaaaaacgaaactatgttggaagaggattcaaatcacatgaagcatttatgaagtggcagtgtcacacatgataccttctgacatgtatgagagggatggcagactgattcctgctttagatagttaatcaccacacagttaatgaaacaagacaaattttaaatgatgcataggccaggcacagtggctcacacctgtaatctcagcactttgggaagccaaggttggcagatgagttgaggtcaggagttcgagaccagcctgagcaacaaggtaaaatcccgtctctactaaaaatacaaaaattatctgggcatggtggtgggtgcctataatcccagctactaggtaggctgaggcaggagaactgcttgcttgaacccaggaaccagaggttgcagtgggccgagattttgccgtcacactctaggctgggcagcagagcaagactccatctcaaaaaaaatttttttaattaaaaaaaattaaaagtgatgtatatatcactattacataaatgatgcaacagcattattcacaatagccaaaaggtaaaagcaatctaagtgtctatggatggaagactggataaacaaaatgtggtatttatgcacaatagaatatcattcaaccttcaaaaggaaggacattctgacacatgctacaatatggatgaacctggaggacattaagctcagtgaaataagccagtcacgaaaggacaaatacggtccgattccagttctatgaggtacctaaagtagttaaatttatagagagaaaaaagtagaatggtgatcaccagggcctgtgagggagggaggaaaggagagttagtgtttagtgggtacagtgtcagtttgggaagaggaaaaaatcccaggagtggatggtggtgagggtatcacaacaatgtgaatgtatgtcataccaatgagctgtacacttaaagatggttacaacggtcaactgtatgttacatatatgttaccacaggttttttttttaatttaaaaatattcttttaaaaaaagcagtcactgtcattcctagtgttgtccactctggaatattcaaaattatttcaaaccaatgctaaattaacttgaattttaaaaatagttttaattttaaacaattataaaggcaatacgttttcattgtaaaaatctagaaaatacaaaaaagtgttattaaaggataatttttagaaaaaatgtaaacatcgtgactttcacacaaatataaaatgaatatgtgtgaaagaggttatttaactcattattgaataaggaaaccagtatgatgttaaaaccaaagaagctggccacttgcctgcagtcctagctactccagaggctgaggcgggagactcacctgagcccaggagtttgcaaccagcctgggcaacacagcgaaactccccaaccctgtttaaaataaataaataaataaataaataaataaataaataaaagaaaaaggaaaaaaaaaaagcaaagaacaaaaggacacacatatacagacaaacaggaatgctaaaatgaatttacaaatcaatgccatactggtcagtatccattggacaataatcattccactgggacgaactcattagccttgatgttggcaaaagtcatttgcaatactacaggctttctataatttatagagttgtaaaataacctacagacgagaaaggccacagtacactgtaaaattaaataaacctgcaaaaaacgctaagcaggacatccgggaacactggtccctctttctagtccccttgaaagtctcacaaggctgaaaaaggaaagtaaaatccttgtgtaacccttctgcccagaagtacactggcacagattctttagagacgaatttaatccagagtgtggagcctttattaaggaaataatccggtgcaacgttctgggacacgctcctggactgggtgggcttctgcacactcacccagcgcacctccaatccccgggagcgctcggcaccgcccacttctctgcgagtggctgcaagttgcagagcaaaccagggggcgatctggaaccctctgggagtaaagggctaagctataagcgcagggtcgacgggcagggaccggaaacaaattctaggaaccgagatccgctgagcagcagggaagctgcgcagccaccgcgtcccgccagcgccgcctctttccctccccgcccaccgcccgcctggcccggcggggcggcgcgaggacccaggggcggggcgacctttgctccggccgtgagcagtccaggccaggcgtggcccagccgcccggctgcaaggtggggtgtccccgccgctcggatccccatctcacctgccgcgggcgaggtggccccgccgcttcctgcgctcacctcgggtccctccctcccgggccaggtttggccgcggcagccgcccctgggcgcccgcgcccggacccgcggtttcggtcagacccgcccgcgggctggtttcgattagggccagtaggagggcggagcggccgggacgccaggagggaactagcctaagtggggacggtccccgtgcaggagacaaagagcgtccctggagcgatcagggctcaggagcccgacccggagcccggggcgtccgcgctgacttcgggtccccggagcctggggcacggcagggagaagacgacggcggagaaggcgacagcggagaaggaaggcaggctgcaggggcgccgtcggcgcggcgggccgggatgcggacgccggtggtgatgacgctgggcatggtgttggcgccctgcgggctcctgctcaacctgaccggcaccctggcgcccggctggcggctggtgaagggcttcctgaaccagccagtggacgtggagttgtaccagggcctgtgggacatgtgtcgcgagcagagcagccgcgagcgcgagtgcggccagacggaccagtggggctacttcgaggcccagcccgtgctggtggcgcgggcactcatggtcacctcgctggccgccacggtcctggggcttctgctggcgtcgctgggcgtgcgctgctggcaggacgagcccaacttcgtgctggcagggctctcgggcgtcgtgctcttcgtcgctggcctcctcggcctcatcccggtgtcctggtacaaccacttcttgggggaccgcgacgtgctgcccgccccggccagcccggtcacggtgcaggtcagctacagcctggtcctgggctacctgggcagctgcctcctgctgctgggcggcttctcgctggcgctcagcttcgcgccctggtgcgacgagcgttgtcgccgccgccgcaagggaccctccgccgggcctcgccgcagcagcgtcagcaccatccaagtggagtggcccgagcccgacctggcgcccgccatcaagtactacagcgacggccagcaccgaccgccgcctgcccagcaccgcaagcccaagcccaagcccaaggtcggcttccccatgccgcggccgcggcccaaggcctacaccaactcggtggacgtcctcgacggggaggggtgggagtcccaggacgctccctcgtgcagcacccacccctgcgacagctcgctgccctgcgactccgacctctagacgcttgtagagcctggggggcgccgggtggcaaaggactcacccccgcacaggcccgcctggcttcgagttggaacccggacacttgcccctcactggtgtggatggaaatctgcctttcgtgggaccaaacaggactccttggacgattagttcaggttgggtttgg

SEQ ID NO: 11828 - DNA, 6000 bp, Homo sapiens
tgaattgcttgggccaaggccggatgtgaagtactgtagcctgttcgggggacaataagtgctgctaggactggatcagggtgtgaaagtagtacaagaatgggtggacaggaggctgaaatcccaacaaaggatgtagatgccaaatggcaaggacgtttttattctatgccagaaggcttgatttcctttaaatcaatccattgattcgaagacatttcattggaggaatttaaaatggaaggattataatcaagtgtgtgtttttattttttatttttttgagacggagtctcactttgttgcccaggctgcagtgtggtgtggtgatctcggctcgtgggttcaagcgattctccagcctcagcctcccgagtaactgggattacaggcacccacaaccacgctcagctaattttggtatttttagtagagacggggtttcaccatgttagccaggctggtctcaaagtcctgacctcaagtgatccgcctgcattggtcttcccaagtgctgggattacaggtgtgagccactgcacccagcccagtgtgtgttttagacgaataactctacctgccatatgggaaaggacaggggaagtcaacttcaacatggtttgggaaagaagatgtggcttaaaccaagatggagcagagaggagagattaaaatgaaaggtatttgttttcttggactccacaggacttgatgaatgattttgaaggggtggatataaggagagaaagggcgttatcaatgacacctggattttgtgattacaaaactgagaggctgttaacgctatccacaggagaagcagatttaatggaagagagatttaaagaatgggcacgttaactaactttgcattgtttaggcaccatcgtgtcctatacgcagctcaattcaataaatactcattgagcacccaataaatattcattgagccagtatgtgctgggcactattccagatggttgaggggacattagtgagcaaaacaaaggtgtgtcgtcactgagcttagatttctagtgttgacttaaaaaatatgatttatcaatttagaaagggagaagagcctttatttcttctaaagggttacagcatgcttccagcttagaccacagacgggcactttgaaggaaaaggcgtttgaggtaggagctttatgctgactgggttggctaaacgtacatatttaacagattacaagaggagctacgaatatttatgatggcggacctgacacattgaacaaacatgtatgtaatatatgacccatattcactttgggatagagactcaacatgtgaatgcattacaattacaccctataggtcaaaaggtctttttaggacaggaaggcgccttgagtgtacagtttctgtaaactggccagaccagtccacggtcggcggtcttatcaggagaaagttactgagatcaatctcttgaccagtcaaagctgtagttatggctggtggaacaggggttcaattagtcactgtctggtggagctgcaggtgttttactattgcttatctcaaggccagcgtttagctgctggagaaaaagaagagccctgtggcagttagagcttagttgattcttcaagtgtaggggtgcctgacttcaccattgcctgcatggccttaggtcctgtttataattgggtatcttattgccacagagtctgttccgttagtcttatgatctctgttttaatgttaatgccagccagttgtgtatgaactccaaaaggaagggggtacaatgagggctatctgatctcctgtcccgttatttgaaatgctttttccctggtgctggaaagaaatagcacttgtaggctgggagccgtggctcacgcctgtaatcccagtacctggggaggctgaggcgggcggatcacgaggtcaagagattgagaccatcctaaccaacatggtgaaaccctgtctcaactaaaaataaaaaaattagctggccgtggtggtacatgcctgtagttccagctactcgggaggctaaggcaggagactcacttgaacctgggagccagaggttgcagtgaaccaagatcgcgccactgcactccagcctcacgacagagtgagactccatttaaaaaaaaaaaaaaaatgaagaagaaatagcactcgaaggctgggcgcagtggcttgcctgtaatcctagcactttgggaggccgaggagggtggatcatgaggtcaggagttcaagaccagtctggccaacatggtgaaaccctgtctctactaaaaatcgaaaaattacccaggcgtggtggttgggcgcctgtaatcccagctactcgggaggctgaggcaggagaagcacttgaacccagaaggcagaggtggcagtgaaccgagactgtgccactgcactccagcctggcaacaagagtgaaattctgtctcaaaaaaaaaaaaaaaaaaaaaaaaaaaaaaaaggcgcttgaacattaatttactaagcaggccatttttacttcctgcagaaagggtacactcgccagcagttttgccatgggagtataccaaacaaaggagacagggtcatttataacctgactcgtccaccccactgcttgtgtctagtttccattggctggaacggtgcctcacgttctgtatttgtcccgattggctagcaacttagaagtttttaaaagaggcaaaggtagaggagaacaaaggaaggaggaagtaacttgtggaatggtgacaaaggttgaaacaccttcaaataaggaagaggaacaggctatgacctaatgctttcttggaccactataagcatgccagggcaaatatttaggctaaattgtgagagctaagaacatgaagtacattgatttctttatcatagctagcagatatttaagaatgttagcacaggtctttgaataaagtttgcttctaagagaagttactatttattcctaattaaatggggaggaaagtctttgaagaggaacctctactttactttttataccgtcatggctggaaactaagtttttaagatttttctggggttcccttggccgaggtggggagtgggagggctgtccagtggtagggacttaggatttttagtttacagtagtaggggaaacactctgtaatctaatacataagtaaatgatgtattagaatatggtaaatataggcaagtagacccccactgggattagcagtggtggaaatgtgagagagggcaaacaggtgggtctagatgaggtgtgagcagactcgaggggcacaggagttagtcaagccagtatctgggggatagtgcaggaatagtgaacagctagacaaaaagtcctagggccagagaaagcaaaagcataagagatggaggccagagaggtaatctgggtggaaggctgcagcctctcaggatccctataggtgctttggcttttgttggagagacactgaacagctttgggcagtgaacgtacctgacaggtttcctgtttgtttttgagatgaagtctcgctcttgtcccccaggctggagtgcaatagcgcgatctcagctcactgcaacctctgcctcctgtgttcaagcgattctcctgcctcagcctcccaggtagctgggattataggcgcctgccaccatgcctggctaatttttgtatttttagtagagacgcagtttcagcatgttggccaggctggtcttgaactccagacctcaggtgatccgcccgccttggcctcccaaagtgctgggattacaggcatgagccaccgcgctcggctagacctgacaggttttaaaaggattactggttgctgtgttaaaacagactgcaggatggcttaggtagccagtaggtttttttttttttttggagacgtagtcttgctctgttggcctggctggagtgcagcggtgtcatcttggctcactgcaaactccgcttcccgggttcaagtgattctcctgcctcagcctccggagtagttgggactacaggcgcccaccaccacactcggcttttttgtatttttagtagagacgggtttcaccatgttggccaggatggtctcgatctcttgacctcgtgatccacccgccttggcctcccaaagtgttgcgattacaggcgtgagccaccacgcctggacgggtagccagtagtttctagggctggagagatctaggatgagagaagtttccacattcctgttacaggctctctaaggcttcagctcctttttctaggactaagctggatctcaagtaaacactagagagggggcagctgaagctccaggagtgtgtggggctccctggggctggatggcggtggcgggcaggcgagctgggctgtgctcgggtgtgttacagtaaagacgcccagcttggcgctggcccggccttttcacggttttaggctctacagagagcggctgcagagctcacccggctggcaggagccaccgaggccggacacgtgggcgacttattgaccaagtggggaggaagcagccccgcactgctctcccgactgcggaccaccgttgggctcctgcgcatcctaagccccaccgcctcacctccagtccccacagcgttcgcgctcccagccggggtaagcggaagaaaacaaaggcccggctccatcagggcaccaatcccgctcgtcggcctctttctcggcctccaatgagcttctagagtgttatcacgccagtctccttccgcgactgattggccggggtcttcctagtgtgagcggccctggccaatcagcgcccgtcagcccaccccacgaggccgcagctagccccgctggcggccgaggccggttgaagtgggcggagcggcgggcggggcgtcgccgtactaggcctgccccctgtccggccagcccctcgaagcacctactccacaggtccagccggccggtgagcgcctggggaccgcagaggtgagagtcgcgcccgggagtccgccgcctgcgccaggatggagttcgtgaaatgccttggccaccccgaagagttctacaacctggtgcgcttccggatcgggggcaagcggaaggtgatgcccaagatggaccaggtgggccgagcctccctgcttgcccggggcggggaaggagctcgctgggccggcctcagggcctgagcggccgggcccggatctggggcaaggggcgcggcgagcagggccgacgcctgggtgttcccgtccccctttcctcgagccttccccctgtagggcccgggtggacgcggccgtcctggctgacctgtccctgcccccgcaagccgccctgggcatgagcgacttttgcgtggttcccggtggttgcgctccccgtttcgtcccctccgtgagcatcggcgcttaccggtattttaacccgagggttacacatctgaggcaatgtgggtgggttacgcgggagaggacgagtgagttttttggtaagcggaatgaactatgcagataacatcacatgaaggccgtttctggaatgaagtctgactcctccagtttcaccacctcttccggagctctccccgccttgctgccttccatcgcttcatcctcggtgcttcctgagttttaaaatcgcctatctacgcttccaagttccaatgagttatctaacgtctatggattagctaggtggttggtggaaggtcagaacttggttttacttagatttttatctgcctcatgcctgtactatttgtttaatgaatgcataggaggtgtttttattccaacaagaaaattattcgtacgcgattattgaatgaatagacaaattcagccaagttcttctggtctggaccagcctggctgatttctgtaacttttttgggccaacaggacagtagcaaatgtgactcaggccgaggcttgataggtgcctgaacatcggagtctttctttcagtgtccatgtgcttcagtaaacacactagaaaata

SEQ ID NO: 11829 - DNA, 6000 bp, Homo sapiens; identical to SEQ ID NO: 3824

SEQ ID NO: 11830 - DNA, 6000 bp, Homo sapiens
ccacttctaataatctccagttgaacttcggacattgtatcaccccttagagatccatagtatagctgtgtcagtccactggaaggacatgtctgctcaccttttgggttcatagacagtgcccctccccatttaggggcaaagaagggaaacagtgtaagcaaaaatattatttcaatgaaaatttcctattttatttccaaagagattgaccttagtgcgaattctaaagaagtgcacgcagaatcagaacgatttactatatagaaaaatgctttaagtcttttaaattttttgaatagggttgtcgtttttattaatcgttagccattaaattataatataaaaactgtataattataacataactttttgttttgagaaggagttttgctcttgttgcccaggctggagtgcattggcgtgatcttggctcactgcagcctccacctcccaggttcaagcagttctcctgcctcagccttccaagtagctgagattacaggcacccgccaccacgcccagctaattttttgtatttttagtagagatggggtttcgccatgttggccaggcagctctcaaactcctgacctcaggtgatctgcccgccttggcctcccaaagtgctgggattacaggcgtaagccaccgcgcctggccaattataacataattataattagttacaatgatatataattgttcatgaagttataattcatatttataattgccttgcttaagctaacagttgataactattgaaatctatggagaaaaggtgaagactgctgcactgcttggtgtgtgcctgccatctagtggcaggacacattaatgctaccgtgaaagccctagtgtgcctgaaaggcaggtttgccagggacagtttgctccactttacattgtcccagtgtttcgacccaatcaactgtatacagagacatccttaggcttttgaaattatctcccattttattcaatataattacagctgaattgcaaacataaatctctgacagccaaaacatatctaagcattacttcattcctacattccctaagcgcgattccttttcttttattttatgtatctccagaaacaaaaagtggtttaggcatgctattcttctcccacagagaatgttttgaccgctattataaacatgcacattgacactggagtcactgatgtcatggactgctgccttctaaagagctcttctcccccaaaagagtgataagattaagtttgagaaaataatgaaagagaatctatcagtattcatgcagaccactctagtaaggatgggagagccattagtaaataagatatagatccagacctcagcttcattgcttccaatccttgtaagatttagaactccttgtatttgtgaagtatcataccctcttagcaaactcaagacaatcaacgtctcatatacatgagactaatacgactgacctcatatcttgttgcaatgttgccctctaagaacccttccaaaaggaaggagtaaatatcaagcaagtgtcctaatagtttctggtaggtgttttggctgaaaagcttgagatgaggttggcataggcaacattaagggggatctgtgttctctagcagcaggtgcgtccacgccttcctgggtttggctagcatgctatgtttgattcatactatgcaagggactatgttaaaatggtaatctggatctgcaggcagaaggaagattagcagtattaatcatgaaagtacggcagacttgaggtttgggaactcaagaatttgggggactgggctggagggagaggaggaacgtttaaggttcctgggctgggcacggtggctcacacctgtaattccaacacttccggagaccgaggcgggcggatcaccaggtcaggagtttgagaccagttcggccaacatactgaaaccctgtctctactacaaatacaaaaaattggccgggcacggtggcgggcacctgtaatcccagctactcgggaagctgaggcaggagaatcgcttgaacccgggaggcggaggttgcagtgagccgagatggcggcattgcactccagcccaggcaacagtgcgaaattctgtccgccccccccccccaaaaaaagagagattccttcatggggcaggaactgaaaataagagttgtgaaaatttgagaggtgaatgatgttgctagaccgctgagtgcaaggagcatacaggcagaggcctagcgaggatggagtcatggtcattagggactggatgaacccagcaagggggcttttctcccgttctcagtcactcccctcacccccctccttgcctggctgtccgctcgtctcttctcttccttagcgtcgccttcttcctcctttgctgtggctggctttctttttcataagtggtcatatcagtttaatcacagttatacatgaaacctacaatttcttatgcttattgaacatttaaattaaaattcgtgagttgaatcttctgtatttctaaacagtaagtctctagtgaagtttcttcttgtctatgaccttcaaattattttttctgtttatgtagtcctaaagaaaaagaaaataaatcaaaggctctctatacctcaaaataaaagctctccttccactctcatcaaagactagtatctagagattggctactcaccaaagagcttacatttgtgcgtgctgcttatgcctaattagagactacgcagagatcaatcctgttatcttgtggctgtggagatgcttcttcctaatccagactttttctgtatttaagataagagaacttgaaaaacccagtaatagtagtatccttaaaatggcaataacaaaaaaaagttgaaaatatttcacaaatatttattataaataggaacaattaaacaacatcttagatgagtaataaaaatgtagctccttcaaagatatgacacctgcatacttttccaaaagggtagatgatgtgaaaactgggcagaatgctattccatttccgatttcaagaccctgtaggactgtgagaggaggaagagcacagggcatcgtcgcatccaggatctacagaggcactatttgcactttctccaccgtttccagtatggaaaatccgattccttccttttcataccttgatggtctctattgaccttcagtcactgatttgcttctctttgtgagggtatttcagtcccaggaggaagttttaattcctgttttttactctcttctgattgggggggaacacaggattaatattcatggaaaacattaaggaatccagagaagttttatttttacattaatatacagaatatccacagagaatataaaaggctacagcaaaatcaagtgattcactgggacataatatgtctctcttttcaattatttaaagtcccacagaaacttgactgacattttctatgcatttttgaagagaaatggaaagagatgtggggtggggggctgtaacatagtagctatttcgggagagattagcttgttgtgtaatccagtcacagaaagataatcgcagacaccagagctaaatttctttgactgaattcatgtaaatcagtattttttttttacttctacacatgaataagaagtaatttcattcactgtggttgctgtgtggtgtaaatacacatattcactaatgttaagaaaaattgtgcctattatgtatagtagtgatgcacataatttacacacactcattgattgaaatgtttccctgtggatcaggtgcgttcataatcagatgaaggaaaagcaaaggaggcatttgtttattttccatttcgtgaatcataaaatcagaggtttgggctgactacctttaggttcccttacggtgttttttgggaaccgctttggagtcagctatctgctaagtttggaattgccaccacgaaagtaaacaccgtagtgaggagcgggttgaggaaaagaataaatagttggtggaaggaaccaccgtacttgagggaggggacagtgggaacggcccctgtcacaatcatttatccaaagcatcaacattctcagagcaaagaacttgtgtttctaactccagaggtgcctggattcacagccaaaaatgcttcttcctcgctctccacagcccctcccatgccagacgccggctcggcaccccctcttcgctgtgcatttctgcttcccccgaaagcccgagtagtaaagggaggctccttgcggcccccgcgggctcccagggacccgcaagttgaagcgcgagggttccacgcgggctgcggggacgcgggcctcggtgctgcagactttctcagggcgcctgggtcgcggcaggcgcggagtcccgagcgcagcagctgctccgccggcctcgcctccgacccccgccctgcgccaagcgcggaagcgctcgcgacctaactgccccgggtgccgggcgcctagggaggggccgccaccgcccgctccgccccgggggcctgcgcccagcagcccccgcctccccggaatccagaggccgagccggaggcggcggggccacggtgggagcccgcgaggtggcccgagcgagggccccgcatccccgcagagcccgcccgagggcgcagcctgccacgccaggggaggcggccgggcggcggggaacggcgggggcggagcgcagcctcccgacgccgccgcctcaccgcccccctccgcctcctcggcctccgctcgcagccgccgcctccgcctccgccgggctgaggagccgggagtccgccgcgccggctcggggctgcgggatggggagttagcgccacggcggcggcagtggccgcagcgcaccccgccgccgcccaggagcccgtccagccaggggtgccgggcccgcccagcccgccccggagccaggcccgcgggcggcggcggagctgggcaggtggatgcggctggaagatggcgccctcgggcccgggcagcagcgccaggcggcggtgccggcgggtgctgtactggatcccggtggtgttcatcaccctcctgctcggctggtcctactacgcctacgccatccagctgtgcataggtgagtgcgccccccgccgcggcgcccccagcgcagcgcagcccaccccgactgtcccgggacgctcagccgctcctccgctctcgccccccggatgcgccccgggcgctgccaacctgccgcgtcccgccggctccgccgctaaaagcagcctcggggcagcttcttccacgcgcacgcccctcgccctcccctcccaactctcgggttaaggtggcgcctccgccccgcactcgccgccgagcctcccgccgccttccgctcaccgccgccgcctcggccacaccccctagaggggcggaaggtccccgggaccgctgtggagaggggaggccgaggccggcgaggcgcgccgggggctgaagggctgagctgggcccggccccgagctgcgccagacccgcgcgggggtgctggccttggcggcggagctggatcccttgctggttggcgtcaatgcacttgttaaaaatttgtgacagcgctcaggggcgtttttgctgcctttatgatttgaggattgccagttggacacttttctagtttaaaaggatgtggaggaggtgagctactagaaagtatttttgaggacatgtgcaacacactaaaccataatttaggtgtttgaacagtagggagagaaaaaaagaggtgatcgtctgaggtttttacatccagagagcgaagtggctccagtccgagttcgaggttcctgaattggtgggtaggatacttttaatgctgaagattaaaattttttaaaaagttgattattatgcacaagtagggagtacaatgatgtcgcttaatgtaagctggtttctaccttcaggggttttatgaaaactgatctgggttatcagaaaaagatgttaaaacagaaaatgacctttctg

SEQ ID NO: 11831 - DNA, 6000 bp, Homo sapiens
tattaagccccacatgcattagctgtttatcctgatgctctccctcccctcagcccaccccctgacaggccccagtgtgtgttgttcccctccctatgtccatgtgttctcattgctcagctcccacttataagtgaaaagatgtggtctttggttttctgttcctgcattattttgctgaggataatggcttccagcttcatccatgtccctgcaaaggacatgatcttgttccttttgatggctgcatagtattccatagtgtgtatatactacattttctttatcctgtctattattgatgggcacaggctatttaaaaagggcagcaggaacatggtttcatccaggtctttgggatttccttggcatccttgagttagctctaatttatgtggacagtggattcaaagtggaattaaggtaatattgagtggtttgatttttaaacaacagttgtggtcatctttttaaacagtttctctgagaagtgattacccttttgtaaggatgagcagttcggacccctgtcatcacagcggataaccaccctgaaatccaacagcatttagaggagggttactgaactgtggcaagatttgatgggcattgccaagactcagagatcgaatcttcagtaagctagaaaacccactcatttaaaatactctgttccatgaaaatatcatgccaaatattactctgtttggaattctgacaattcaaggagctcagtgtggaaattttagctgtattcttgaggcatgtatttaacatctctatgtgtttgctttttcagttttagaacaggagtgcaagtttcaaatggaaaaaaaaaaaaaaaaaacaagacaaaacagtaccctccttgcacaaagttacactgaagtcaatctgacataatttgttgattctctgttatttttatctgtaaactatatggcatgtaaagttaatgttttaactttggagtgaaataggagctcaatagtctacaaatccgtgtgtcccttcccactcatcctcttccttgactctcaaggtggagaagctaagctctgttgtccacctgtatctctttaccccaccgccttcccctagagcagctaagagtcccttgtgcctagataatttgagtagcctgtttacctttttccttatctccagtcttgatctttctcatcccttatttatgatacagtcagaatgatgtttctcaaattctatgtctggcttaaagttctcagtgatttcctattgccaccagggtcaagttcaagctccttgcatggcctagggacccttctgcttagctctgcttacctctggcttccccatccctaagctctatgtggattgaactaccctctacttgtttactcttgctgtgtacaccctctgcttagaacacttgtgtccccaccgccccctcccgccctccttctcactgagctttcagatggctaaatttaactcatccaaacatagctgtctccaggaagacctctctaactacctgtatccccgtcacagtcagagttaggagcccttgcagtgccctgcttcccctatgcacaagtatagctgtctcatattgcaatggccatcatctgtgtgtctgtgcaactgcaggtggcacgagggaagaattggggcagcctatttatggttgtttcagggcctgatagggtgcctcaagtatttgggggaacgaataaagtagtggaagtatttataagaaatttacatttttggccgggcgcggtggcttacgcctgtaatcccagcactttgggaagccaagacaggcggatcacttgaggtagggagttcgaaaccagcctggccaacatggtgaaaccctgtctctactaaaaatacaaaaattagctaagtgtggtggtgggcgcctgtagtcacagatacttgggaagctgaggcaggagaatcgcttgaacccgggaggcggaggtggcagtgagccgagatcatgccactgcactccagcctgggtgaaagagggacactccatctcaaaacaaaaattttttttacattttttaacaaaagatagcccactaacattgaagtcttaagtgttgtagagacttctctgattcaggaagcttaaaaaaccttctccagtatggtaaaatattcccggtgcttcccgggatatcctttcctccattacatgaattatcgctctgccgctagcttacttccataattccttggcacaaaaaaaaaaaaaagttttaaatgtttttagtaagtactgtagagcccttggtattcctggggccctgactagctcttacatgctcctcattccaacagtgggcattgggagaaatgatgttaccgataatccagattggttgtatgtatgtctaaaaagaaaagatattctggccgggtgcagtggttcacgcctgtaacctcagcactttgggagaccaaggaaggaagatcacttgaggtcaggagttcgaaaccagcctggccaacatggggaaaacctgtctctaccaaaaatacaaaaaagaaaatagctggatgtggtggcgggtgcctgtaactacttgggaggctgaggcaggaggatcacttgaacccgagaggcggaggttgcagtgagccaagattgcaccactgcactccagcctgccacaaaacaaacaaacgaacaaacaattctaccttatgtcaagctatttttttcaaggagagagtatatacgtctgtgggtaaagggcagaactaatgcaggctaaacactttaagtacggtattggaaagtgaacaaattagagttattctatcacggaaacctccttttggaaagaagaggaattcccaggaaatgtagcagaaatggctgaaggtagcagattggaagagttgacagtgggagtagagtggggtgaagcaggcccgctcagtaccatcttgaccttcgccattagcttctggtttcaaggaacagagaccactctaaatagctgaagtgcacaggaggtgtgtccaaaccatgtcggggaatcttgcacacccagcgttagaagcgcagcaaggcctggggggacagaaaagctccccaggctcctcttgccctgcctccctgctggggcagctgcctttcacaagactgtcctcctctgaatgaacactgtatggcttcttttatttatttagttattttcagatggagtctcgctctgttgcccaggctggagtgcagtggcacgatctcggctcaccgcaacctctgcctcctgagttcaagcaattctcctgccttagcctcccgagtagctgggattacaggcacgtaacaccatgcctggctaatttttgtatttttagtagagatggggtttcaccacgttggtcaggctggtctcaaaactcctgacctcaagtgctcctcaagcctcccaaagtgctgggattacaggcatgagccaccgtgcccagcccaccctgtgtggcttctactgccagcctgtgggtttctgcaccttgtcaagctggtccccagtgtgtgtgacttcagcctgcactagaccatttgaccgacctaatcattttgttcgtaagagcttcaagaacatctaattgagcattcccagcctttgactgtttaaccctgagtcagatgtctctctggtccagtgatccttggcttcggggtatgaagacagtgctgtggggagggcaggaggcagtggcgggatcccaggtaaggtaaaaaattctggaaggggccattcctcatgtttgcaaaggcacatataaggtgacaggtcctagcagcttggggagagggaacaggttgtacccactggcagtcagagtgacatactagccaaagattgctggagacctacgggcatgggcatctgcctggtgcccaagcctgacacccagctctggttgggaacgcagtgtgctgactgggcagggactccggttaccaaggtgctgagggctttgctttcttcatttcaagttttgcttcttctgttccccaagcctaaacacaaaagttggatgcttcatttaatttttttttctgcatctctttgagctaactaggtatgccttattcccactgtgatgttgccttcactaaagtgaaatggagtcacatgtttggaagcagcagctgtctttacagacttcccagaattctctatcagccctttatttgttgaatgtctttgggaaaaatgcttgcctatgtctggattctatatcagaaaatttgaaatactatgtttttagtctaacttcctggcagtactgatttggtataaaatgggagaaaatatcaatggttttattacagtgcttgtaactttgtagtggcctcagttgtgttttttgtttttacctatgtctacacttgcacgaacttctctggagaaaactctggaggaagaaattattcagaagacttgatttggagaaaagataagttttggacccagtaaaagtgaagtgaatatggaagagtgttctgtgtttttccagaaagattcaggcttaagtactgaatgcaaaggtttgtggtttctgtttttgctaatcaaggctgaacagttaccacatgtgatagtcttttatcctacattatacttttgatgaatttgtaaagaaattaatctctcaaaacttagcaaaaagaataaaagtcaataaatccatggtatcatggctatatctttttcctctttactaaattatttaacccacgttataatttgaaaatttatcttggaactttaacattgtagaaacgttgggtttggacattgcaaaataaaaaagatctagggcaaaaacagtatggtaaagatccctacttatctatacgatttaattacttttttttccatcagtcccaaaacagaaagagcagatgtctcaccacgaaactagcaactggaatgaagatagaaacaagtggttataactcagacaaactaatttgtcgagggtttattggaacacctgccccaccggtttgcgacagcaagtttctcctgtaagatttattgtcagggcctgggatactgatatagaagattaagtttgaaatgtcaacctttacttaggggaggaagggaaagattcatttctaagtgactcaatgcaacttcaaacttttgaactaaagtgaaaatccaggatcaacttgtgactatgattagcagatttggaaagatttcctggaatcgttgaaaggaagtttgctccgtcaatgtcatcagggttagggatttactagacctaaaattctatactgtcaagttgatggcctgggctgaagaagttttagaaggaggtaattccaagttgctgaggaaggaatttagctttttggcaagaattaatagggacttatcaaggaataaggtgcgtagaaatggttatacttaagtttggggcacaatgggcgtggggctaagaaagatctcacatgtatcattaggctcatgaaaatcattcagagacttttctgcagcacagcatattgctagttccttccagccctcccttcgctaattctattttcagatctaagctaatatgcacatatttatcttcctcaagagacgccactgtctcagcaattaataaaataattgcttattgaagaaagatatctgtttctggtattgccagaatcacttgtgacctcatagggatgttgatcagagccttatattctaaggccaaggacaggggtgtgagttttgtatgggccacttcccaaaatctgcatcattgttcttatactacatgcgtgtaggtttcgtattaaatatgagtccttggtcacagtagcaataactgacaatggatacaatggtgcagatcatctgctcctggaaaaacaaagtctatgccctccagattaatggaatcacctccaaaacccctgcattgtatctctgcattcgtatttgttgtataagtaggagggatgtt

SEQ ID NO: 11832 - DNA, 6000 bp, Homo sapiens; identical to SEQ ID NO: 3776

SEQ ID NO: 11833 - DNA, 6000 bp, Homo sapiens
ttattttatatatatatatagagagagagagagagaacattgttaaatatgttttagcacaggttttgagtgctaccttatgctttttctcattctactgtactcctcttcatgtattatatatgttttttcagtcatgtagctcttctttctgccatttatattttatattctggcaaagagtttgacaagtcatggcaatgaaagatgtcaatgataatgctgtatttatcacaaagaaacaaaagggaaaattaaactgactgcccaaattcaacttttatgcttacttgatacaactttgaggaaataaccagggaagcagaaaataaaattcatttagagattggtataaattctttgacagtaaagggaattataactctgggctatgaagaatgatgaaaaattatgagaatgataactggaacaaactgatcaaaggcatgtcacgactacaagagaattgaaaagagccgaagaacaagtgccaatttaaaattccacatggatcagcatgcagactgtcatcattcaccatttccagggcactcccctcctcaagaagcaagcaggaaggttatacttctcattcgatcccatcagtggtgaccattcaccacagcgtcaaagtcaagcacaaatacttagcaggatatcttcccattctctcaggcattctttgctccaacaattccaaacactaccagccataaactaatgtgctataatatattgtccttatttattctcataattctttttttccaacttttattttagattcaaggaggtacatatccatctgttacatggatatattccgtgatgctgaggtttagggtacaaataatcctgccacccgggtactcagcatagtatccaatagctaggttttcagccttttcccctcttccctcccttctccagcagtacccagtgtctattgttgtcatctttatgtccatgggtacacagcgtttagctcccatgtataattgagaacatgcagtatttatagattttggatattagacttttgtcagctgtgcagtttgcttatattttcgcccgttatgtaggttgttggtttgctctgctgatagtttctttttgctgtacagaagctctttaatttaattaggtcccacttgtccatttttgttttcattgcaattgcttttgaggacttaagtcataaattgtttccagggccaatgtccagaatgtcatttcctaggttttccatagtttgaggtctgacatttaaatctttaatccatcttgagttaatttttgtatatggtgtaaggtaccggttttctgtttctgcattaattcacttaggttaatggcctctaggtgatccatgtgctgcaaagaacacaatttaattcttttttatagctgcatagtattccaaggtatatatgtaccacattgtatttatccattccaccactgatgggcacctagcttgattccatgtcattgctcttgtggatagtactgtgatgaacataagcatgtgtcttctcggtagaataatttattttcttttggctatatatccagtaaacggattgttcggtcaaatgacagttctgttttaatttctttgagaaatctccaaactgctttccagagtggctgaactaatttacattcctaccaacattgtgtgtttccttttctctgtggcctcaccagcatttgttattttttgactttttagtaatagccattttggctggtgtgagttggtacctcattgttttgatttgcatttctctgataattagttatgttgggcaattttttcacatgtttttttaactgcttgtatttcttcttttgagaagtgtctgttcatttcttttgaccctttttttttttttttttctttttttttgagacggagtcttgctctgtcacccaggctggagtgcagtggcgcagtcttggttcactgcaacctcctcctccgggttcaagtgattctcctgcctcagcctcccaagtagctgggactacaggtgcctaccacacgtggctaatttttgtatttttaatagagatggggtttcactatgttggctagactagtctcgaactcttgacttcaggtgatctgcccaccttggcctcccagagtgctaggattacaggcatgagccactgcacccacccttttgcccatttttaaatgaggttacttatctcatgcttgttcaattgtttaagttctttatagattctggatattagacttttgtcagctgtgtagtttgctcatattttcacccgttatgtaggttgttggtttgctctgctgatagtttctttttgctctacagaagctctttaatttaattaggtcccactcatccatttttgttttcattgcaattgcttttgaggacttaagttataaattgtttcctagggccaatgtccagaatgtcattttctaggttttccataatttgaggtcttacatttaaatctttaatccatcttgagttaatttttgtatatggtgtaaggtaggggtccagttttattcttctgcatatggctagccagctatcccagcaccatttatgaaatagggagtccttttcccaggactcctgccaccaggatgcactccctgccctgtttggtgtagacctctgacttctattgataaatctattgtaacactaaacaccttgtgatattgtgatcatttataggtggtactcactctgtgcaattttatggtaattgaacttatctttgtcagattgtgaacatctcaatgaaagtgattgtgttttttgtttgtttgtttgtttgagacactgtctcgctctgttgcccaggctggagtgtgttgttgcaatctcagctcgctgcagcctctgcctcctgggttcaagcaatcaagcagttctcctacctcagcctcctgagtaactgggattacaggtgaccaccaccacacccagctaattttttttttttagtagagatggggtttcaccatgttgggcaggctggtctcaaattctgatctcaggtagtctgtctgcctcagcctcccaaagtgctgggattacagacatgagccaccactcccggccatgattgtgttttttcaactgcaatctcagtgtctgacacataatagctgtaagtaaaattacgttgaattaatggagaaaaaatatgtaataattaaaagttgaagtatcctttctgttccctggaaaagacaaagcaatggaacttgggttgaaaaggcaagaaatctgtgaatcgcaatcctgatggttaaaatgctcagtaactagactcaaaaattcctttgtggttttagttgatgactgtataatcatttggagacatcaataatcactgtaatccctctagtatgagaatgtgtttcagaatctgtaaaatgatgcatgattttagtggactaggactaggttttgtggtaataactggtcctcagcgtaatttctattccttaggaatttcataattatttctattctcccagaatcttttcaatagaaatgatactgggagtacaagtcagctaagccaagggaaagcattagagtatatgactaagagcccagacaacacatagttcagattccacttctaccacttactggataggtgactttatctgcttaatcttcttaatctatacaatgaggggacaactgattcttaatcttttgaattttgcctttaaaaccccaaattttcacctgcaaaatgattgtaaatgcataatacatgagtatcataaagactaataaaataacaagtacagtagatttaggagagtacctgtattagtccattttcatactatcacgaagaaatatctgagactgggtaaattaaaaagaggtttcatggcctcacagtttcacatggctggggaggcctcactctcatggtagaaggtgaaggaggagcaaagacacatcttacatggaggcaggcaaagagagcctgagcaggggaactgccctttataaaatcattagatcttatgagacttattcactataatgagaacagcatgggaaaagcccgccccttgattcaattatctcccactgggtccctcccacaacacatggggattatgggagctacaattcaagatgagattcaggtagggacacaaccaaaccctatcagtacctaaaacttaataagcagctcagttgatattagttattttattggttataagtatgatttttagacatgcccagtttagccttactaccaccagtgacagatcctaaaattgtatcctttgggtcttgaatccttcttccacactcctcattgccagttatgacacaaatacccccaaggatctaaaaattattgtgcttatattgtcagacattcttatttcaggatagttcaaacttcctgagagtacacttgtgtgaggaatagaacataaaataatggaaaagagaatgctatatagtaattaggttgaattagaaattgctttacataaccacattatgtatgtgggggaaaaataacattcttaataacttttttcctacaactgtatatatataaaaatatatttaaacatatatttatatatcatatccgtaatgtaaataaatgtctagcatgtttttcaagactcattaatgcagttgcctctttccttgtagcttatctggctatagtaatatgttggaaatgtactactttggagtggggagtatggcaaaggagagcaaaacaatagttcagatcaagtaatcttagagccaggaggcagccaggacttccgcctgctgggccattgttgcaggaccacagcttcgaggttgcgcaacacctttagtaaacacttcctgaatcagagacaagaatgaaccagggagtttcattctgtctcactggagaggaggcagggacagacccagcagcacccacctgagcgagaagagcagacaccgtgctcctggaatcacccagcatgttgcaaggtctcctgccagtcagtctcctcctctctgttgcaggtacatatttagctctttttcaggttctattgaatgcattagcgaacttttcatagtctcctaatagttttattgtataaactattttgacttttttctttttcttttttctcaatcaatcttactaaccagttgggctggttttaacctgttgtttgggggctgcgagtgatacaaagacaatgttaaaaagaggcaacaagaggtcttgaaccaatatgtatgcatctcatctgagaatatacagaaataaaagggacaatttcatacagcacaatttaaatcatgaatatgatttttgactgaaaaagtggaattcatcaaaacccagcttgtcatttaaagaatggtaaagatgtggcagatttatttatttattactgtgtacaaggcttaggaaaatacctactattattatgggagccagtttggctctttctgtttgagtgtatatttttgtatttactcattattagtaataatacgtgtgactaactggaaataattaatattttttatttataaggtactgtgatattacttaacaaaatatctctgttaagcttaaattgataatttacttctattttgctgattataccaaacatttaaaaatttgaaaggagaaaaatactacttcctaacaggaaattatgtctagcaagtctctcaatttctggtaaattctctaattagactttggttaaattagattgggtattgtgattcttcagcttctatttccagagcttatttaactcagcacatgaactgcagtgcctcgaattcctcccagtaaacctgttcttgggtcttagaatgtttgctgggacctggggatgggaacagattatcaactagaggtatgggcttagggagggaaaagttttccttgtccatgcaccctcttagtactttgttgcta

SEQ ID NO: 11834 - DNA, 6000 bp, Homo sapiens
aaaagataatgtgttatacacattttatattatatatatgtatttttttctagctcatcaaggtatcattaatgcaagatttatttcattgatctccatagcaaaaagtataatttatgtgcataaacttgtatctttatttgggctctgaatataacaataagtttttgctatgttacttcagtcttagcaattataattttaagataaaaatgttcataattagaaaaaacagaaaaactggatgtactgacattatatgggtcagcaaaattggtaggatccagacaagatatttaaacttttttttgtttaaatatattttaaatagggttgtaatgaacataaaatgtttgaatgcatgcaagccacttagaacaatgcatggctatataattgttagctaatattactattaacacagcttcatccagtagggattcctggtgggtttggacaagctcagattggaaaaaattatctcattagataattccaatatattgatagaccaccgaggtagggaacatgatccctcccccaatgccagtcataagcaaatagggattcctgagcatcaaaggagttcagagcttggccaccactatgttacttctcatctcgaacctctgactcttacattatcatatccttgagacaggcttcttctttgcagcagttgaagccatcatagagatctcccacagtaaaatatttgaaattctttatcaagcacgtcttttcccaccttaatgaccttggagacatctattacatacctgggtgatttgaagtatactagatcacctaacctctttgagtcatctataaaatgggaaccacaatctttgaactgactacttgtatctgttgttattatgaccaaagaaaatcatgtatgcaaaagtcgttacttgtgcaagacattatcataatttttgtccatgttactgctctattttcatttgtagcttgacaacatttaaacatccgccccaaatcaaaaatatgttattatgcaacattctaaaatgttaagttgcaagctttatgggaataaaattctttgtaatcaggatgttggtcgtgatttcttagttttaggatcataaattaaatcctatgtttagtcaatccttaaatattgtcttcataaggctctgtatatattctatttctcattccctccagatgcattgggtaaacaatttcttcactgttattcccacagttttgatttataggctgatattcaactatctaataaacagcatctgtatcttatgcagagtttagttttcaaattttttatggtattcatatattaaatgaatattttaaacatctattatcatcatggtgctgtggtcctgaagggtgccccaggatatataactccatttttaatggattaacaaactgcaacttccatcaagacaccaaattggaagatttatatagtggctcaagctgaaccttagaactcattctagattcctctgtgtcttccaactgggagtggctacatacaatcaatcagcaagtctgataattgtgtaagctaagtatctctcaaatatgtaccttctttaagatcatttgttcccccataacttggcctctgcatgtgttataagttttatatcacatacctattacttttttattataaagttctgggatacatgttcagaacgtgcagttttgttacataggtatacacatgccatggtggtttgctgcatccatcaacccgtcacctacattaggtatatctcctaatgctatccctcccctagccccccaccccccagcaggccccggtatgtgatgttcccctccttgtgtccatgtgttctcattgttcaactcccacttatgagtgagaaaatgtggtgtatggttttctgttcttttgttagtttgctgagaatgatggtttccagcttcatccatgtccctgcaaaggacatgaactcacccttttttatggatgcatagtattccatggtgtatatgtgccacattttctttatccagtctatcactaatgggcatttgggttggttcctttatgttacgttcaagtcatgaggaacatacacttcaacaaacagtatgattttctatatactcatggttttgctcatagtaccagctccactattccttttccaggtattatctgattctctccacctatcaagtgatatggcctttctaaaattgatttcagcacaatacacaaatatcaatcataatacttcatatttgtacagactacctgtttgtggttgtgtctccattattagactttattgtgggaatatgtgaatagcaaggacagtatcagtcagcttagaatccttagaaatgtagtagcaatttattagaaacacaactttaatatgatttcaataaatattcaactgccctagcaatactagttgtataattaataagcaaattagttcccgctaaatagccagaaagcaaaattgtccacagcaataatggtcaccaaaagatagccaaatctcatccagtagagaaactgctgaatcaagtggtagttagacttttagctctttatggaatctccacactgttttccatagtggctgtattagtttccattccagccagcagtgtagaagtgttccctttcactgcatccacaccaacatcatctatgatttttttattttttataatggccattcttatgtgagtaaggtggtatttcattgtgtattgcatgtttatagcagcaaaatttacaattgcaaaaacgtggaaccagcccaaatgcccatcattcaaagagtagataaagaaactggtgtatatatgtatataccacacacacatatatgatgtataccatacatacatgcatatataccatatatatgcaccacatatacaccatgtatttgatggaatactactcattcatgaaaaggaatgaattaatgtcatttgcaacaacctggatgggattggagactattattctaagtgaggtaactcaggaacagaaaactaaacactgtatgttctcacttataagtgggagctaagctatgaggatgtgaagacataagaatgatacaatggactttggggactcagggggaaaggatgggaagccagtgaggaataaaagactactaattgggttcagtgtatactgctcaggtgacgggtacaccaaaatctcacaaatcaccactaaagaacttactcatgtaaccaaataccacctgttccccaaaaacctatagaaataataaaaaagaatatgtttaatgaagaattaaaaaaaaaataactgatgctaaaaggacctgcgagcaaagaaggtggtacacatgaataatttcaaacatctgtagaaaacacacacaaaaataatgagtaacatgggggtcaaaatcatgataaactaaaatacttgacaacaacatgtaatgtgctaaagggtagggcactgataagagttcaccattccaggattcttttattatttgatgatagagacataattagcattatactttgttaaaatattaatggcgggtcataaaggatataagaaggatgcctatctctggaccagaaaaagaaatgcaaaattatagagaaaatgttactattttaaaggaaggtagaacagcaacaaagtgaagaatagacatagagaggggatttttaaagttccaattagatgttaggaaactcccagatgtatcagtgaaaagttaagttcagcagttagaaggtatgggtttttagattgggaaaactatacataatgatttaatttggccctaactttctgaaaagcactgagtcaatgtttatcaataatctcaagttgatttaccctttttagctaaataatagcacttctagacatttatcctgaagtcaccagaaattcaattaaagaaatatacacaaccaaacattacatggacactcaacacacacatatgtagaaaatatgatattctaaaatcactaaaattatgtcttaatattcaatgtcatgagaatgcttatgtcatagtgccatggaaaaaaaaataagtttcttaaaccctttgcccaataaggttagctttccttttctgcataagaagatgaaaataaattgtaaaaacgttaacagaagttatttcttgatgtcggatcattggcagtcaacttttttctcataataaacttgtgatattataatcatgaaaatctaccatatttgtcagagaaacattgttattgtataaggtagaactcagaaagtacacctcgaacatacttcatatgttgtatagttcggttaaggccagcactgtcaaggttatttaaatttcttgtacatttcttatacatgcacatttctttacaattttacatgcatgtgcatatgtgtgtgtgcaaatgcatatgaattttataagaatcttgaggcagttaaaattatcagcatcccctgttgactcattaggagactgaatgttagagagattttcagtatcttggtttgtaggactttacctggtgctttttagattctgtgttcactgtgacagtatctcaaaatatgtacagaatactgatatatgtcctaaatatgtggatttatttctataaggatactgaacaacaatcgtaatggtccagtttggtgagtatgtagatatgcacgcgaccacctcagtctcagttcacacattcccactgcttataggagcaccaggggcaaacagtgtccagatgtgagtcctcaatgagctataaccacagccataaatatctctcaaagatgaggaacattctcatgatgttgacactgcaattttttgacaatttcccaacactcttaagaaacattccccaatctcacacgaaaagtgggggttttaattttcttgttcaacttctaaagagaaattggagaagataaaactggacactggggagaccacaacttcatgctgcgtgggatctcccagctacctgcagtggccaccatgtcttgggtcctgctgcctgtactttggctcattgttcaaactcaaggtacgtaccatcacaccagcattttacataaaagtcaaattatttgatgaatgtttaaagtgccttttgaaaaaaaatggcatatgtttttatggtcgaaagaccattaccatttgcattttggtagattttctacctctctgcaaaagcgaactatatatacataagtatgtgtatctttttgagtgaggatattttaaaccactatatgaaacatggattctaaaatttgtcctatttcctccaattgttatatattttaacaaattttatgtttgcacaatattttccaaaatagaggaaaaaaaagctacatattgttccattcattatgtcttttctctactaaataaaattttattaacatcttcatgaatcatggctgtttaaaaaatctgcactttgggatatttccttgagaaaaattcttaaaagcagaatgacagggtcaaaatgactagttctggaaaaggaaccctttttgtctttgagattgattattgatattattgatagatgaaccattttgatgacacactatacacaccctacaaataattttcaagtcactggttattttactagtgatcacataataagcatgttaaaagccaagctgtaaacctacgtatttccatgtataaacacatttgtgctaaaccctatattgaaacaggtaaagtacatagctgaggagttatccaagctccccacaaaattcccacttgcctaaaagttgccgtgcaaaagctgcacacatacggctggctctagccttcatattcttttacatttcctcattgtgcatcaccaatactatacccaaaagaaggataaaatggagtaattattataccaataattatgcgatatatacacacagcttactgaagtcttcaaattcaattattt

SEQ ID NO: 11835 - DNA, 6000 bp, Homo sapiens
gaactgtaaatggagaaattaatttgaccacaaggaggagaggacaggactacaggttaagaggaaagtatgtctagaggtcctttaatgggagaaagcattgcatattggagtaaagggggaacgccagaaaacttggagctcagagagcagaagagagaaaaaatagtagcagatacaattagatcaataaaagtaattataccaaaaatcgacatttatatagctcttagaaaatcaacacttatctatctattgacatatgggaggcattgcttttcagtgatttacataaatcacttcactgaatcctcacaacaattgctgcaagttagataacgttgctattctcattttgggaaatgaaaaaactgaagcacagagagatcagatatcgtccaaggtttacaggtaggaagtgtaagtgtaagtgctgggaattgaacccagatggtgtggtacttagtgcgtacttttatttactgtactctacaacctcctcatcattagaagctaaaataatcatagtttacgctcttttttttgaagcagaggtttaatcggcaagagaaagaaaaaggaatacagctctctctctctagtgagagagaggggacttccaagaggaaaaggcccatagtttacttttattgagtgtttgctatgtaccagatatctttcgaagtttgcaaatgtattacattacacattcaataaaaatctattgccaatctactgttctaggcaataaagatacggtggtaaacaaagcagacacaatttttatcctcacagagctacattttaaggagaggagtcagcctatgaaaaataagtaaacaaacaagtaaatgtatagcattttagatggtgactaatacaaggcacaaaagggcttagaggtgccagggtgggagtgggcaggtctattttgcatagggtgcttacagaagattcacagaatgatgtattttaatagacacctgaaaggagagaaaaacatcgacgtgtgactgagagggttacattccaggaagaaggaacaccgagcaaagacccttgaagcagaatgtgcttgtcatgctcaatagatgccaaggacactaggcaatatgctcagtgtagggaggggggagagtagtaagatatgaagccagacaacatcaggctagatcatgtagatcctggaggctctcagaactttgcctaatactctgaaaatggaagttattgaaaaatttggacagaaggaatcacataaagtgatgcatgttaataagagcattctaggtgatgggtggataatacattgtgagggaccaagagaaaaacagtaagactaattaagagtttagcttcaataaactaagctagagatgataatgtctaaattttctaagaatcagcaaaatagcagtaaatgtggtgagatacggtcagagccttgatgccttttcaggatagtgacaactggatttgctaaagaatgggatgcaaagtgtgaagaaaagagacgaatcaaggatgactcctgggcaactgaaagaatggagttgcaatatcttaagataggaaagactacggaaacaccaggtttggagggggagagcaagaatctggctttgtacttgtgcttgagaaatccattagtctttcaagtgaagatgttgaaaagagagttgcttctatgagtctgaaattcagaaaagatcaggttagataaataaatttggcagccatcatattatagataatattgaagatcaaaagattgaatgggaaccacctcatgagtatacagagaagaggaaagtctcaagaatgaagccatgggaatctatagcgtttacacactggggagagaaagaggaccaacaaaggagactaagaagatgcagtgaataagcatggaggaaatccatgatgcaccagggactcaattcctttcaaaaaatgaaaataatccactgtgtccaatgctgctaaaggatcaagtgagtgtggactgaaaactgaccactgaattaagcaaggtacagatcatttgaacgtcgccttgttgagcaaagggtaaaaagtctaacaggactaatctcaagaacaaataaggagaaaggaactggaaacaaactgtagactttttatttttttagaaattttactgttagaatccaagaatgggtggtagctgtttgaaaggagaatgatgtaaaagaagaaatatttttcaaaggatagaaaaaatgattatatatatatatatatatatatatatatatagagagagagagagagagagagagagagagatgatagtagagatggggaagaattgctggagtgatgacattgaggggacaggaaggaataaaatcctgcatattaattggggaatagacactagaagcatgaacagtgcatgcataaaaacaggaaagaatgagtctatatgggcacacattgtaaggtagatgtgataatgagagaaagtgagagttcctatgatggtttatttttttgccagtgaaatagaaaagcaagatggtcagatgagagtgatgaagaggagatttcgagatttagggaaagaagaaagggtatataataattaagagaagtggggagtgaattaactagggaataaaagatggcttgtgagtacggattcatttaatcttcacatcatccctatcagatttatattattatgcccattttatagatgagaaaacagaagtacagaaatgtatcataccttaaccaaagccacagagttaataagtgtcaggcaatttaagtcaagtgagtcttttgtctaacaccagtgaaaaactattgaagcatttttttttaacaggcacatgacatggccaggtttacctattaaaaatattacacttgtggtcatgcacagtgactcacacctgtaatcccagcattttgggaggctgaggcaggtggatcacttgaggttaggagtttgagaccagcctggccaacatggtgaaaccctatctttactaaaaatacaaaaattagctcagcatggtggcacacacttgtagtctcagctactcagaaagctgagacaggagaattgcttaaacccaggaggcagaggttgcagtgagccaagattgcaccactgcactccaccctaggtgacagagcgacactgcatctcagaaataaaaaataaataaataatcacacttgttgcaatgtaaccaaagaatgtcttggactataatggaggcaaaaaaaaaaaacttagtggtggactgattataagggatgtcattgatgatactgactttcagaattgcaatgctaaagggatgaggcactgctggccaagacagaggacaaactggggggaaatgtattttaagtcttgtacatattgattttacaaggactttgatccttcccaatgaagacattaagtagaaactttgctgtaaagatctgttgcccaaatggctagaaatataaaatgtgaggcatagcatagcaataattaaaccataactgaagatgagatggctttggaacaagcataatcggaggaaaagagggtgtttaataaatacctcaaggaactcaaaaatttaaatgctacatagaaaaggatatacctacaagttgccactgaaccaggaagaagttaagaaggctattgtggcaagggagctaaatagtatatttcaaggggaaggatgtggtcaacagtgctaaaaattgttaaaagggcaaatgagatgaggaaacaaaatatctcttggatatagaaatggtaaaatcactggagatattggccatttcagtagaataataaaggcagatgctagaactgggatgtggtaggataagtttgaggtaagaaaattgcaagaagtccaggtaatactgtgttagaaatttagctgtaaaggaaatgggagaaaaagtgatagtaagagtatatgagatatagaatagagagaatttttcaaaaaggagagacttttgacttgacttaaaatggtacccccgttttaagccaagggactccgatttctctgcctcctttccaagtttgcttatgttttcccaatttgtaaatatcagtgtcaatttccccacctgcaaagtggggattatattttataatgctgctatacatggctgctaactgggagcaagtgaactgtatgaggacaattctgtttttcaaccacaatggatgaatattaatgtcagatggatttttcctcttatgtttccttgtagaaaaagtcgtccttggagcagagggtctaaatatcaaaaggaagcttccaattgacatagattcgttcagtttgtggaaatattagagacatatagatgcgggtgagaaatagaatcccaaatgaagataaaaggattctattggccatgggataactctactaacataacaagagaacacagacatacagatggaattgtcgaggccctttgcacatctgtccattggtattcttttttgtattgctttgaaagggctctatattatatggacacttactcccaccttttatttatttattacatacatttctgtagtttggatattttaattttaatatgtgatttatgccatataaattttcaatatttctcatttaacaaatgttccttttagtttttatatggcatactctgcatagaaagaatttaaccatcttcaaccaaagcatatataaatatttttcaacatttttttcctaagacattcttgatttttttccacttttgaagttttcagatatctggaatcaaatttatattagacatgacgtaggaatctatgtccagccaaccttcaccaccaccacctcggtagttgtctttaattagaacatgatgttcaacctccaggttttagcctcaagcacctagcaagttgtgtaactccctcaaggaacacttccttgttgtggatcaaaactgcccacctatctgtgaggtgcttcatccctgcagtggaagtgaggaggaagaaaggtgaactccttttctcaagcacttctgctctcctctaccagaatcactcagaatgcttcccgggtgtatattcttgatgattttactcattcctcaggttaaaggtatgtcttgctctttttatcaggactttcttattatgctgtgaggttgtgtctctttagtcacaaactttaaactgtaagtgataaaaacattaaacgttgatgatttttctgagagcttcgactagattacagctaatcatgagactccatgcatctgtgtaatgccatatcactcttgaacattctgacccacagtgaggaggagaaaggagtggacaagtactgcatatctgcagcatggcaggcactgtgctggccattagctgctttgtatgttaaagtgtttaaaatttgaaattaatatctccactttacagataaggaaaatgagactatttacagatcagagaaattaaatatgctactgctggccacacaataaattggtaaaggcttgattcaaatcagagcatattccagaaaccccatgccctctcctttttattgctctttaagtatcacaccttaattaagcagggctcatctcacagatgactatcaaggtgataggacatgaatagaagattatggttggcactgatgcagggctacccaaaattctttaacaggtaaaggtcttatacttaactacgaaaggtaagactttaaatgcaaacatccctggaagaccaaattcagtaatttacattcaaacaggacaacagtgcaggctttgacaggagacaaaatccagaggttggcatgaggataacaaaacgacaactgcaggccagacatggtggctcatgcctgtaatcccagcactttgggaggctgaggcaggtggatcacctgaggtcaggagtttgagactagcctggccaacatggtgaaaccccgtctctactaaaaatacaaaaat

SEQ ID NO: 11836 - DNA, 6000 bp, Homo sapiens; identical to SEQ ID NO: 1287

SEQ ID NO: 11837 - DNA, 6000 bp, Homo sapiens
gatctcggctcactgcaaccttggcctcccaggttcaagcgattctcttgcctcggcctcctgagtagctgggattacaggcacatgccatgacaactggttaatttttgtatttttagtagagacggggtttcaccatgttgatcaggctggtctcaaactcctgacctcaagtgatctgccggcctcagcctcccaaagtgctgggattacaggtgttagccattgtgtggtggtatattttatattttatctggtctacctctgatggacatctgggtacttttctgtttttgtgtaaatggtgctgctgtgagcttttgttgatcatgtacacattgctgctaactatttttaccgtcactggcttatactaggtataatgaattatcttccatcatgtgtaactgaattgatggtcactcatgagtacttatgaatactgttatgctttttttatctggtgacttctttttatgtggtaactttcatggtgtgagggcagggccatgttttatacattttgtgtacataatagaaccttaaatatatttctatagatgctcaactatttgctgattgaatgaatgaataaacaaatgaatggtgtgtgcctccctcttttttgggaacaagctctatttacaagtgaggcccccaactgtgatgtttggaccaggatgacctgctgcttggccaaagctgattgattaaaggggtggacacacgacccaagctgggccaataatgtctctcttacgggagtttaaaatttggagctgaaaggacagtggatgctgctgatgctcggtccttgtgattgtgctccagacagaagacccacaggctcctgctgctgggtaccaaaggttcaatgcgtcctgcttttcctaatttttggatgtggataaatatctacacacatggaggggctgggtgtggtggctgatgcctgtaatcccagcactttgggaggctgaggtgggcagattgcctgacctcaggagttcaagatcagcctgggcaacatggtgaaatcccatctctactaaaaataaattagctgggcatggtggtgtatgcttgtattcccagctgctcagggaggcacgagaactgcttgaacccagaaggcggaggttgcagtgagccaaaatcacgccactgcactccagcctgggtgacagagccagactctgtctccaaaaaaaaagaaaaaaaaaaaaaaactacatacatgactgttaaacaacaaatgcaaaactattttggattcagtttcaaaatacaaagtagagataataagtgctgtaaaatgtcaaaatatggagagatcagtgaagactcacttcattgtgcatactgttgccttggcttccttcttggggacagctgctgtgaatgtgaccatattttccaagccaggatttcagtgttaagggatgggccaggagaggagttatggggatttgggaacgagaatgggatgtaggtgtgaaactgtagaggatcagtggtagagatcctacaaataaagcctttaagtcttggaaactgttgaatgtgaaggtaaagagagaagtcaaagatgatgccaggttttgagtttctgggttaggaaagataaaggtaactattttaaacaaggacatttgaggagtgcaaagtgggaaggggtaaagatgagttcagtttgggatatattaaatttaaggccctggtgagatagccagatgagcacacgagttaggaagatttgcagtcccgtgtcctttgctccatgctctgtggtgttggacaccttatttagcttcttgaagtctcagctccctatctggcagccgatacttccctgtaaggattaaagtgagacagtgaataaaagggtttagcttattgcctggcaattaagtatcagaaagtatatattaatagggtgatgaaggccccgcgtggtggctcacgcctgtatcctagcactttgggaggccaagacaggctgattgcttaagctcaggaatttgagaccagcctggtcaacatggttgaaaccccgtctctacaaaaaaacaaaacaaaacaaaaattaggccgggcgtggtggctcatgcctgtaatcccagcactttgggaggccgaggtgggcggatcacttgaggtcaggagtttgagaccagcctggccaacatggtgaaaccctgtctctactaaaaatacaaaaattagctgggcacagtagtgcgtgcctgtaatcccagttactcgggagggtggggcaggagatcacttgaacccgggaggcagagtttgcagagagtcgagatcatgccactgcactccagcctgggcaagaagagtgagactccgtctcaaaacaaaaacaaaaacaaaaaacaaaaattaggcacagtggaagggatctatggtcccagttattccagaggctgaggcgggaggaacatctgagcccagggacatcggggctgcagtgagccgtgatcgcactactgcactactacactccagtgtgggcgacagagcaagaccctgtttccaaaaaataaataaaaataggatgatgatgatgatgtgagggtgtccagagtgctactgggcagcagggccccaagctctgctgtaaaggaccagcttgcaggtggagatgatgcagggaaattggttgaaattagcaagaagagagtgtgagaaggaaaaaagaaagtagccccagtcatatcattggcagagaacacaaggtaggagaaggaacaggagctagaggagactgagacaggggagcaggagagtgcagactcacaagatcaaagcggaggggggctcagcagcaggtgaatatccctgttcttcctaaggcttcataatctttttgttgttgttgttccctagatggagacttgctctattgcccaggctggagtgcagtggtgcgatctcggctccctgcaacctctgcctcccgggttcaagtgattctcctgcctcagcctcctgagtagctgggattataggcacgcgccaccacgcccagctaatttttgtatttttggtagagacagggtttcaccatgttggccaggctggtcttgaactgctgacctcgtgatccacctgcctgggcctcccaaaatgctgggattataggtatgagtcacggcgcctggccagcttcatcatctttaaaagcaagtaagtcaaagttaagggcagcaatgtgttaagttactccaacgtaaaagactgagtcgaacaggtagcaggtaactgcacgtcctctctcgccagtgtggagatgaaccaaggcctggtagttcttccctgtcttctgtggtgtctcctcccacactgccaagcccctgcctgctgtggccgcgtacctttggaggagagccaagtagaggaactgttaaaaaaaaaaaaaaaattatgatacccaggcaacactcactccattttcatttcctgcaatacttctgatttttaaactttgcctcctcctgtcttgacttcaacaaattggtaacagtaagggttgcatatgtacacatatgatggcggtaagacttggaaagcatttgtttataataatcaagaggaaaggagaagaaaagtgaataggagacgggagagcaagagaaagaggataggaaaaggaggatccgagtcgggactagtttgggggtggagagatgaagagtgtgctctaggaaacaggttgctatgggtttttaaaggtttgttttgcaaacgttatccttagcccaagctgtcccccgtgggcatcagtcttcagcattttctcagcctccttgctggagcactgggcctgggctccagcagaaagggcgagtggataaggtcggcagctgcgagcctgtctctggggtgcagttcttcttaaggcagccgaccacccaagcgcagggccaggagccagctctacccggcttctccaggtcctgtgtgtttggggttccctggcgaggaaaccctggagtagaagccctgtgttctgggtattaaaaacattaaaaaaaatacgttaagacaaatttgatcgtagctcatactgcagttacaggttttaaaagctggtttctaagttaagcaggtgaccaggtagggtgcttgctcccacccccatcccctgttccattatccaaggggtcttatcctgacttctcaagtgtggaaacacacagtcacgtgttccttgggactgtggaaaacgtgcactttggggctcacaggggctggcttttcagcattgacacggtgttcttctttcctgtcttgttttggtgatcatcccacacgactagattaacctgttgtttttgcaaagccccaggattttcctaagcgtccaagccgcccggccttgtctttgttatgaaatagtcaaagggcttcaaaactgcaggcagttgccgcgcacggcgcccgtccttggaggccttttctctgagaatggagttttagattcagggatttatgacttgactttcccggggccggcgcccctgcggaagcggcggtggctcgggagtcagacccggttcccacgccgccgggagcatcctccccgccatctgcggtcgggtcttctcgacagggcccggcggcctttgcaggacgcgagttggggggctccgaaggcggccggcgcgcccccccgcgcctcccacaatccccggcgcccggccccgcgcccctgacccgggtgtcaccgcggagctgcgggaggcctcggcggtcttcggacgcggtcgggaaagtggcgagcgcgcgcccgcgtccgcgcccccgctcgcgaacgccggcttcggccatttccggcgcggcgcccttcggcaagttccgcagtcgcctgtcggaaatggctgccggccggcagggggagcggcggatcaggcgcggcctggaaggcgggcggccggcagccagaacggcttctgggacgccgactttcgcgcaggcggcggcggcggcggcggcgggtccctgagctggaagccggtaggactgctggccgcgcgtgagcccgaggagcgggggccgcgcccggaagggctcatgggagggtgccggggctggccccgagcgctggggacgcggcgggagggaccgggtccgccgtgccccggggaggctgctgctgcccggcggcgggaggcatgcagcctccgagcggagtaggcctgcccggtggctcgggggcccggggagaggccgccaggccctcggccggcagccgggagggctaacgggtccctgggctggggcaccccctccccgcccccacacgccctctctcgtcccagtttgggctgctcgggacccgcctccacctttttttggacgctcggctgcagctgttgggcttcctctgctccctgaagccctccaccctctgtgacccgcggcgtttctctggctgctggcccggagcatcttctgtcggcggaggcgcagctccggactacccccaccccttcccgagcacaccttcccacatctgccccccgcttctacacgcagtcgcctgctgccctccccgctggctctttttgccgggctcgcctcctttcaggagccacagtcagaggagccgcttcctgtccgagggtccaggtgctgcaggaccctggctcccaggcccagctcccctagagccggcctcgcgctgcacgggctggaccggacaggggtgcgcggggcgtgtgtgcgcggcggagctccgagcccagcgacggggacagcacctattccgagcccctcggaggcgagccagggctgcccggctgctgatgggtgctgctttctcttccccacattgagcgagagcttcggctccttttattaataaaatctgtttggctctcagaagacttaaattttgtggattttgcccctcccccgccacccgcaccaccccacccccgcccttccccgcaacctggatttttcttccctttttaa

SEQ ID NO: 11838 - DNA, 6000 bp, Homo sapiens
agagtgagacttggtctcaaaaaaaagaaaggaagaaaaagaaactcaaaataaggcaaccatttgtctcttatctacctatgacctggacaccccctccccactttgagttgtcccgcctttgcagaccgaaccaatgtacaccttatatacagttattgatgtctcatgtctccctaaaatgtataacaccaagctgtgccccaaccactttggacacaggtcatcaagacctgctgaggcgtgtcaagggtgcgtcttcaaccctggcaaaataaactttctaaattgactgagacctgtctcacatattgtgggttcacagaacaaaacaagaaaaggtgttgtggtaggtgacatgtgggatggaattattcacttctccaggaattccacctatccattcaagatggctggggagaaggacgtatatgcctgcttcagtagtttagagaaaggagctggtggctcacagattccgtgtaaacagcgtgtatttccatggcatatgttcaagtgtgccttgtggttttgttaccacatccttaaatggaaacttttttcatgatacaggaaagagatggtagatctttctgcactaacttgaacagaaaaaaattctactctcctacaaaacacccatagactcatttggtgcattaagactcaagaagtgacctgtttgttgttgttgttgttgttgtttaaattgtaattcaactctagaaatagtagagagaagcgaagtgggtaatgcctcaagcttcccatttgctctcattttaaagcatattggaaatatctcttctaaacattcactccacagtcttacatgccactttatgttagtctgatgactgaaaaaaagttaaaaattcaaatcgtacgtagctcacccccacctacttccttttaaaaccttcaaaagatttttattgctcagagagaaaacccaaaactgcttgtgtacgtccctactatataagcatgctgccccaccccaaccttgaccaaccccattggccacctctcttttctccaagggaccaagcaagttccttgctccatttgctgccaaagctcctaactccccaccacacatacatacatgcgcgcacgcaaacacacaaacacacaaaaacacaacacacaaaacacacacaaacacacatgcacaaacacacgcacacacacaaacatgcatacacacgcaaacgtgcacaaacacgcaaacacatgcaggcacacacaaacacgcccacaacacagacacgcacgcacacaaacacacatgcacgcacaaacgcatacacagacacgcacacaaacgcacgcacagacaaacgcacacacacaacacccaaacacgcacaaggacgcacacacacgcacacacaaatacccatgcacacgcaaacacgtacacaaacacatacacacaaacacgcacaaacacatgcatgcacacacacatgcaggcacacacaaacacaaacacgcacacacacaaacacacgcaaacacacacacacaaacaacacaccccgccacctgcgatggcttttccgttctctattaacacatttattcatcactgtgttgtctctccttgggggaaattttccttggcagatcgcaatcaaaagttttcagagaactatttacccatctttcctagtgtaggaaaggataaaaactttctttaccctcctaggttcagaagctgagaactgtgaattaaactaacaaagtacagattaccaggaaaaaaaaaaaggtttattttgcatgcacaaggaggcttcacagaaaagaagtgaaaactcaaaaagtaattaggcctgggagcatgtatcattttaacaaagggtgatgcattgtggaaaagtagacaaaggaaaggttttggacttctaggggcagtagattttaagaaggtaaatatataggggaaaactaatgaaagataagggctattttagtaatgttttcacagactccaataaatgctgtttactggggcataggagttgcatcctctccctggtctgggaaatgtaaatatttataagtagaaaaatttgtttacacattttttgggggccaggcgcagtggctcacacctgtaatttcagcactctgggaggcccaggtgggccgatcacttgaagccaggagttcaagaccagcctggccaacatggtgaaaccctgtctctacctaaaaatacaaaaattagccaggcattgtggctcatgactgtaatcccagctacttgggaggctgaggcaggaaaatcactttaaccaagaggcagaggttgcagtgggctgagatcacaccactgcactccagcctgggcgatagagcaagactgaaagttagctgggcgtagtggcgcgtgcctgtagtctcagctacttgggaggctgaggcaagagaatcgcttgaacccaggaagcggaagttgcagtcagccgagatcataccactgcactccagcctggccacagagcgagactccgtttcaaaagaaaaacaaaacaaaacaaaaagtggaactttatgttatctttacaaagggaacttaagcacggcctttgggtagaaaaggagagagcagagagctcctcctatgcctgttgcttcttatttgctttcagctcaaaacaatccttagccttattttcactcgtgtccgtgtgaagagaccatcaaacaggctttgtgtgagcaacaaggctggttatttcccctgggtgcaggtgggctgagtccgaaaagagagtcagcgaagggagataggggtggggccattttataggatttgggtaggtaaagtaaaattacagtcaaagggggttgttctctggcaggcaggggctggggtcaccaggtgctcagtgaggaagcttttgagccagcatgagccaggagaaggaatttcacaaggtaatgtcatcagttaaggcaggaaccggccatctggatgtgtacgtgcaggtcacaggggatatgatggcttagcttgggctcagaggcctgacatttatttgtttgtttggagacagagtcttgctttgttgcccaggcagtggcacaatcagagctcactgcagcctcgacctcctaggctcaagcaatcctcctacttcagcctcccaagtagctggaactacaggcacacaccaagcctggctaatttttttttcgtttttgtagagatggagtctcactatgttgccagggctggtcttcaactcctgggccaaagcgatcctcctgtcttagcctcccaatgtgctgggatcacatgcctgagtcaccacaccagacttcaaagtggcatattttagagtgacatattctgatcccctttactagcaattatcattattgcaattttacattttttgtgtgtctgtcttcctcaccagtctgcaaacagtacctggttttgcacatctcagcgtctaaccctgtgcctaacacatagtaaatgttctataaataattgtaggatgtgtaaataaaggtgttgaacctgggctttcacttttttttccttgccttgttactaccaaaaagacagccacccaagggactggatttctattaaatccaccctttactgagccctgctgctcctatctctggaggtgggtcctcaccagaaccctagtcctgtataggaaaccaaggagccaagtgcagaccacccaactaaccttaattataggactggggatggagggatggagggagagaggaaaaggcgcagtaaaataatgtgcgcagtggctcacacctgttgtcgtaaccgagcgagttatagagaaacaccacactttgagactaattcaggagtcctttattgccggcgaccgagagacgactacagctcaaaattctctcggccctgaagaaggggctagatttctttttataccttggtctaaatagggaaggggtagtctagctgaagcaatttttacagaagcagaacaggcaaagagttaaaagataaatggttatagaaacagttacaggaaaataaacagttccaggtgcatggggcttaaattatcacaaagagataaacgcaggggctttgggtaccatcaaccgagcgcgttcccaggagctgctggtacagcttgcctcagtatcttatcagtaagcacattcctggatgtgcttggtgtcagtctgcaccagttatgtccttaagggagggggacaaggtgctgcaagcgaagaaaccaaaatggagtctgtcccgctctctcagctaagagcgagtcaatcaggttaaaacaaggtagggtatcaagctgtaatcccagcgctttgggaggccgaggagggcagatccttgagctcaggagaccagcttgggcaacaagatgagagtctcacaccccgccctgtctctacaaaaaacaaaacaaaacaaaacaaaaaaaagccaggcatggtggctcatgtctgtggtcccagttactgcgaggccgacgtgagagaatcacttgagccctggagatcgaggctgcagtagccgtgatcacactccagcctgggcgaaagagaccctgtctcaaaaaacaaacaaaacaatgtgaaattaagccaaaagccatcacacgtgcatccaaaggacggccgctacccgcgaccccttcccaacgcacgcgggaggttgcgggatcagggacaggggcttcagcagggagcccccagaccggccctgacaggaattcaagacctggcgcctgctcattcccccagtcggggcggcggcggcaagcctcggccggcggcgatctgcacacccgcggagaagagaggcagggggtcgaccccacagcccagcccggcgcgtcccccgcgcccccgcgcgagcccgagtcgccggcggaagtgctgcgtcgcgcacttccgggtgttgtctggccgccgtagcgcgtcttgggtctcccggctgccgctgctgccgccgccgcctcgggtcgtggagccaggagcgacgtcaccgccatggcaggcatcaaaggtgggcctgggttgcaggacgcgggagggctggggccggcgggggaagatgggccgggggtcccacgcggcccccgcacttcccctccgggctcgcgcgcgcgcgtggggtccctgcgccggggaagcgacccccgccccggccctgcgcttggcccggaggtgggcgcggcgccctcgggcaacggacggttgcgaccccggcttcgccccgcagcccccactttctgccgatttcggcagcctctctcccacccatcgccccccggacaaaatatgaagtggttggcggtcagtgaggagtcccgtcgcgacttggacggccacacacgttttgcaggagtttgcatccgagagagaggcaggcagagcgtgggattgagaaggctgaggctgctagagatgccagctatggaaaaccagtcatttcccaccgaaaggcacaagtgcggtctgcgggcgctgcacgggtctgcccgaaacctcgaccccacgtccaccccggccgcccgcgcccgaggctttacaggctcccgaaacgggtgcattttcatctgcggtgtctggaccctagagttgatcctgtaggcgaccccaaagtgctcctggctctcttccctctccgcagttgcaccctgaggctttttcaaatttcaaaatttttctttttttccttttttttttttaagaagataaaatactggtacaacttaatgaaaaactactggcttattcatgtattttcttttaaaaaaaggaatgttgcatttgttccacctgttaggtagttttgttgtcagtgtgatgagaagcaaagttttcagctactgcttaactaattacattgatttcttgacctgccgctctgtagaagggcagtcaggcaggaagcaggtaactttgggagcagtggttttctttgtattttttcttctctaaggaaaactt

SEQ ID NO: 11839 - DNA, 6000 bp, Homo sapiens; identical to SEQ ID NO: 1304

SEQ ID NO: 11840 - DNA, 6000 bp, Homo sapiens
ggcgtggagaaattgcacaagattataggctgtggctaaagaactggtagaaagaggagataattaaaggctctaggtccctgaggaaagaggagggatacgattaagaaaccaggtgaaaaaagattggcctagagtaaacatgggttaccttatcctctgagactcacatcgccgtatacaaggtatctcttatatacagcaaaaaagaagtctatcaatgacatagagagatgtgtaaatacatatatgtagataaaatttcatataatcttttaaaaaaaattcctgttactgtaagttcagagttggagggttagagatgtcaaaggaaaggtcatcccaggcaaatcaggccaagccaaaatgcaactgccaggcttgttggaacaaaatctcaaggtcacaggctactcttctcatcacccctcaaatgcagtaggaaccttagccaagccccctttctgaagacttcttctccctggacttctctacaagtaaaataaatgggttggattaaaatcataggcaataacctatctgtccatcaacaggtgagtggataaacaaattgttgtatagctacacaatgaaacactacacagcaataaaaaggaatgaactcttgatagactcaacaacatggatgaatctcaaaataattattctgggttttcaaaaaagccagaccctcccccacaaaaaagggtacatactatacaattccatgcatataaaattctacaaaatgcacactaatctagagtggcaaaagaagatcagtggtcttttgagaatcgaaaagggggtgtaccaaagaggggtaagagggagagattacaaagaggcatggggaaatttggggccatgatgcatgtgttcattatactgattgtggtaatggcttcacaggtatttgcaagtcaaaatgtaaattgtagactttatgaacagtttattacatgtcaattatatctcaataaagctgtaaaaatgtgtaatcacaaaaggacctttaggtgccttctagctgactttcaactcaatttttttcctgatggctctttgatctctttacccaatgccttgaagaaacatcattagccccaagcaaatatgcttttgttcttggaaggcaccaatcccggtttttgcaactgaaaaaaaaagaaaagaggaaaaatttctgagcccccttaataactaaggatacagttcactcctcttcccataagctcaccaaaatcttactggaatcaaatgttctaaaagattatttctattccctgttttagggcctaaagtgaaaaagataaactttaaatcaaacggaaactttttccagcaacttccactcttgtgatactgaactgaactgaagcagaagattttaagagttgcctgaatcctttggacctgcttattggcttaaaaagtctaattgtgaaattgacttaaaaattcctaattgtgaaagaaggggtctcttctttggcatggcactctcactaacaattttcttggtaagaggacccaacaaacagcaatagaaatagaaaactatggattgctaggtgagagtattttttaacctgcttcaatctacaactgcaaaatgaactggcccaatttaattagaaaaatttcagtttctgaccactgatctacattactgaaaggttacatgtgaaataaatgtggggtgtgtgtgtgtgtttgtgtctgaaattgaatcattttctaactcattcactataaaaaagaaatagacgggatcatttgaactctgcctttgcaatttatcatcttcgtgatcttagacaatctcttaatttctctaagcttccactttctcctctaaaatggagttgaactcaaagggctgacctaaagtttacataaaatgagaaaatgtaaggtactggggctgatacatagacagtattcaataaagctttatgaaatctgtattgtaaatatccattgaggtataatttcagaagcctttatctcttcttctgataagccttcatttggttattatttaataccatacaacttaaagtttatcattctctcgccctgtgtcacattaataatctgcaatgataacccacaaacatgcaagaatacattaagggaatttgctatttaaaacagcaacagctaacacttggtgaacacttaaaatgtaccaaatgttgtatatgcttttcacaacagtcctataagtttcataccattattactttaattttatagatgaagaaactgaggcagggatagatcatttttccaatgttacagaataagaggcaggctccaggatttaaacaaggcagcctgactgtgaagtatctgagctaaatcactactctatactgtgaggttttttaaaaaataaaattttagccgggcgcagtggctcacgcctgtaatcccagcactttgggagcccaaggcacgtggatcacttgaggtcaggagttcaataccagcctgaccaacgtggtgaaaccccatctctactaaaaatacaaaaattagccagtcgtggtggcatgcgtctgtagccccagctactcgggaggctgaggcaggagaatcgcttgaagggaggcaaaggttgcagagctgagatcgcgccactgcagtccagcctgggtgacagagcgagacaggaaggaaggaaggaaggaaggaaggaaggaaggaaggaaggaaggaaggaaggagaaaaagaaattgtaaacatttttgttaaacaaatcatcacaaatgtatctgctgggtaacataaaaatcacaggtctcttaagaaagagattttcagaagtactagatcatcatgtactagcacatcacgaagtccatccccctgcctttaggcacgtccacaactaaataactcaggtctggtaaaatgactcctaagaacaaaatcccaaaacttctagccacaattcactccaaagtttaatgtgaggaaatttttgtgtttttattatttttaattgacacataataatatacatatttgtgggaaggggaggggagacgggttgccagaggttggttaaaggaaattcttaaattacaagtaatttaaatacttgatgctgcaggctagcccccatttcatgggttgatgaaccctaatatttccatttttcttactcaattattaaataaactattaaataagcatgcccagctgaggttatatcactgaacagggagagaaaaaactcaagttctgataggattgatcgagagattggccagctgtgtctgtttggggtgggggatgcagggacagagtagggagatgaaaggccttcatttatggagatgggcacagagctcccagacagcaccatgtaaccctcgtatgggtttcaccatgtaatgctgaaacatcccaacacccagagcaaacgcaggaaaggtaaacgggccaatcccaagcaggcatgcctggaaaaaaccacacttcccttttcctgagtcttaaatctgtctaacaccaccagcttgccatcttcccggtgtaaaagtttttcttttactgaaggctataattaagtggactctttctctcctgcaaacaaaatattaataacctcagtggctgaattagaaatgccccaatgtgatgctggtgaatagggcaggtggaggacaacgtgaggcccttagactaggagacacaaactctggattccgggcctggtcccacgttgccttcagtctgtttttactgggcacctaagccccgggggtgcggaaggaaagtcagtctctgctctcccgggaacgtacagtttatctagaaagacgaagtgcactagcccctgtgcactgtggcaggagtttaaaaagcagtgaactcaagatattaaggaaacacaaaggaaactttccttggcttttacccttgaacctcgctgaacttcttagattccgttcattaaaattagaataataattccttgttaatatactttgtggcgttgcaggatcccaagggccaaagctcccagaaaaatataaagaacaactcaaggtagggatttttgattggtgaggtaatgatgctaatctgtacattgaaaagactgtttcatttcagctgtgctataggaaagcaaacagttgcaactcgccagtaccttatcaaggagagaaaaaaaaaaaggccgcgcatggtggctcatgcctgtaatcccagcagtttgggaggccgaggcaggaggattgcttgaagccagagtttgagaccagaaataccaagaccctgtctttactaaaaataaaattgtcaagtgtcgtggcgtgcgcctgtggtcccagctactcagcagggtgaggtgggaggatcgcttaagcccaggagttcgaggctgtagtgagctatgatcgtgccactgcactccagcctgggcaaaagagcgagaccttgtctctaaaaaaaccaaaacgaaccaggttcggcctaatgcagaaggaaatccggagcaatccccaaagtcaacgccttggaaaggttcgccctgggtctcagtactccggggcatgcgcgtcctgccgctcgctctcggggagctcccaccaacaccgccctcatccccagccccaggacggatacccaagaccgaggtccaggaccgcaccgaccaagtcgcgggcgatccctggcggccagctacggccattgaccgctgggagcgcgaggggcggggcgcagagcgagcgcggggcgggggtgtggtcttctcgcgtgaattgatggcgtcatcgaagcgacggcccggaaggaagtcgcgtgctgaggggtgtgacggttttcttgctcgtgggctcggacgagtacggagcgcctgcagggacagcctggtacgcggcccccgccccttcgtgcgcgcgctgggcctagctgccgctcagggtcggggctgacccgtcactttcgggaacctcagtcccagcagcttctctccctcagccggcccgctcctggagagagacagaaacccttttctgtcgcgtcctctccttgcgagccgcagggggaccgagcggaggctattggagccgcagccccagaccagggcgcttgaccctctctcggaacggggcggggaaggggcgcgagtgacctcggggagggaagggcactggcaggaaaggacgcaactgcagatcggtagccggaggccgccacggtaaaataagcgcctcgcagatgtccgcgccccggttacgttagacctgggaggcagaatccacgccctgcgctcacgggcccacgcacgcacagctgaactttgcagtcagtcaccatagttccagatcattcagcgttcaggatcccactcctccgcgtcctggtgcctgaacgcggttggacctaggagcctagaggctcgcagtttgggacattgcctttctctctgaccacgggcttggggatctgtcaggtgcaaagtgccaaagtatatgggggggagtgtggcttcaggcttgttcagagccctgtcctgtttagggccaaaggaataactgggaaggtggatgcgaggccaacgaatcctaccttgaaactctgctcgcctgctggctctgccactccagcatctgaaaggagtaaataatggtttcctttgaaactgcaggcaattaggagtgggagactctgaccagaattacatagccacaactgcctgtcatttggcatcctctgtaatttgggccaaagtactgcagctgcctctcttccctactactggtaggaaaggttcagtgacagcacattcgtgttcacaggaagacaaggctgtgttctgaaccctacccagctggcacgggttctcccttgagcaacggctgtatccggagccagtgcttcctcagtgcggtgggggctctaattttacagttaaagaaaggggaacgttgactgagaacgaggaggaagcgagttgtagatctagccttgtg

SEQ ID NO: 11841 - DNA, 6000 bp, Homo sapiens
tatcaaaggcatgctgctggttgggccctttgctatctctaagaaatgactagcttcaggaagagcagtctcttcacagccagaaaggtttttaagatgtcaaacatcataatgtacaataatttaaaaaactttttgaccatggtggtggctgatgcctataatcccggcactttgggaggccaagatgagaggaccacttgagcccaggtgctccaggccaacctaggcaacatagcgagaccctgtttctaccaaaaaaaaaaaaaaaaaaaaaaaaaaaggccaggtgtggtggagcacacctgtagtcctagttactcgggaggctgaggtaggaggatcgcttgagcccaggaggtcgaggctgcagtgagccctgtttgtctgtttgtgccattacactccagcctgggcaatggaacaagaccccatctccaaaaaaaaaaaaatacgcatttttttataatacaccctcttcacctttactttactctcctctaagaatctctagttggtagagggtctcaacagaatacttgctaagatatggagcatctctaagaacaaatactgacttttgcagagttggattggacaagaagtcatcaagcacatttgcacaacaggcaccatggtaggagtaggagtctgggctcccatcctcctctgtagaggctcttttcctgagactcagctggcttcctgcatgtagttctctaaggaagcactgttcttaaatgaacacttgatctccatacactctttcctgttgttttgagcagcgaaaagcgaggacttcttcataaggctctgcccttatccactgtgctgacacagctgcagttaccctaatattactaatcatactcatagactgtttccattagcaaactgtacaaggaaattctgtgccttcctttaccttaatgataaactgattttcagagtgtggagcctacactttttataataaaacctttattcctgaaatactagggcaatttgcacaagatttatatctattgtaggaattttggggctagatcatctggcccaaaattctgtagataagggataaactgagtgcccacaggcacttagcaagttagagaaagagacagttagaacttcaccttccgggcttaagtccagagtcctctctactataaacatattgcttctgtcaatgaattatgcacaatggtagccatagaccctctttggtgcttaaaaaaagtcatatcaaaaaataacaatgagctgaacacagtggcatgtgcctgttgtcccagatactcgggaggctgaggcaggaggattgcttcagctcaggaggtccaggctgcgataagccatgattgcaccactgcactccagcctgggtaacagagtgagaccctgtctcttaaaacaaaaaataaataaataaaaagacaaggaaaatggctctacctccaaccaagtaccaactactccaatcaaagtaacacttactttatacaaggtttattttctcgtagaaaggtcctaggactggcacactcaattccatctaaggcatggcactggactgaagtgtgttccacgtcgctgtaggcctgaccgccgaactgtggaataacaaccaagaccaaaaccaactcaccagagcaagtgacacaaacatctatctttatattcactaataacagaatgaaagcggcctcaggactacaattattccaacaaggttgaggtacagctgtgctcaagggcaaggaatttagtgacacacttctgagtccatcttaaaggtacactgtcttaaataaactcctgctttcttcttcatgactggcttcttcaataatatagtaaaaaaaacccccaaacacactcagtgtcattaaaggccatttagaagagatgaacacaatgctttacttatctttacttataagcatatgtatatgcttatacatatttatatgtataagcttatacatatttacaggaaaaagagcatataactgagcatttgggagtgggtatttaaaaagtcactgcctattagaggtctcttttatatctattaaaaatgaatagaattaggaaagaactcaggatattatctgactcaggactttatttaggtcataaatgtgtattacctgatatctgtgggacacctgttaagtttaaattccagccaaaaatttcagaactgggcctcttaccattgcttaactgaattctagccaagaaatcacagatattcattttttactggtaccttatatcagtgcttattactattttcattggcgagttcctcaaagggaagggactgggaaataagaatgcttacaggataaactcaatttttaattaaaatgggcaaaagtgatctctatacaatattaactcaaactttaatcaataattatcaacagagtaaaatttcattgtcttaaatatttatctatacatgatttcagtaagagttgcccttttagtcttattactgtcaggtttattcctctgtgtctgatttagtacaaaacatgccttcccatcattctcttaacatctgaccaaatcttgacttgcattatgtggcataataggatggcgagtccatggtggggaggagatacatgaacttcattggttattttgagagattgattaggaactgtacactcagctttagggatattactaataaaccttaatagcgtttttccattccaagaagccactgttaaccaatggcttccgctggaacgctttaatgtcctacaaagacatataccggtagactctatctgtctcctacggacatggtggaacctgtttgcctggagaaaagaaatgtcattggcaagaaaagctctgccccaaatgcatgtgtaacaaagatactgcccaatccatcaccagtgttgcaaagtgcacagacttccttttgctctttcaggaaaggttcatgccttgaaggagagtcaggggtgacattttagtttcaaaatctgtcagtggccaaaggaaccaaagacaggttggtctttgcacctgggtggttttagcacagagattgctccttcataaggaaaccaaatatcttgttcagtcactgaccctggccatactggaaatttccagtaacggtctttctgaggaaattcttcaaaaaactttgtacctcttatacttttatgtaatagcattcagacattcctatttcgttatcgaagggtttgctcttacgacaaaacaaaaactcaccttgagacaaccataaccaagttcctgggatgcagttgcatttccaacatgatccactgggtcttcacattctataaattcatcaggtctgtaattcaccagtaagatcatgatcatcatcatacggtctttgcaaatcgctgtttgcatgcacgtaatcaaaacgggcaaaagacatttcttcatcaagttttctggggttcggtttcaccctgctgacccctttccaagccaattaaactgaagcacagcaggtcaaacggacagccaccaaaatgaaccttttgttggagaagggaggtgtttctggtcctgtttctataaggattctacttctgccatggtttcatctcttcagtaggcaaacaacaagattctgggggcaaaatttaagccaaagtattctcagtcctctttgcatttcccaaatgccttttcttgtttgatcaaaaagagatgttaaaaaatggcgtgattctgcaacggtaagaatattgattgcttttttaaaagatgccttgtaggcagagacaagtcatttactccatttatgccttactcagtactggcaccgaatcgaccgactaatactctccttgggctaaagggcgcagggcaaagaaagcacaaccttacgcccttcttccagaggctatatgatgttactcctacccagttttcctctttggggatctcaaagcctctgtcactgacacacaagagttttctctgcacgggctgtgagaaacctggttcatgatatttgcctccggaacgacctcagagaggcagggtctgaaaaaatgcagcgtccccccaaccctgccttcccttaacacccatatattcctggcacaccctccacgtccacccgcctcgaccactggtagcttacaggtaagagcagaggatgaccggagagtgggggtcgccatattcccagctcgcagcacccccggggccctccggctgggcggcgccagcggatgtgagctcaggctcagcggtcgcattttgcgagtggctccgagacacacaatgcagcagaagtaaattccccagcagcaaagccgcctggccgcacagaagtaagtaactaaccgggcaaccacctagcaccatcttcccgggcacaggagcggagacccggcctcaaccacaaccccaggccagcagcacagacccaagaactgcgtggtcaggcctttccgcgtagccccgcccgcgtagccccgccaaacagccaatggacgcgcagctcgacgctccgcgcacctccgccaaccaactagaaaaggtcgagcagacgggcggggctactccgccctctgcttctgcttctcgattcctcttctgggtctcatgctcctccttcttttgcgccgaatgcgttctccaatcggatccgtcgacccccctaggtgggcgtgcccggcagccgacggggcggggcggatatgactggcgggccgactagtgctggttgccaccgccggtttagaaatcctattctcgcgccggggactggatttttccctacgtcagcgcagctaggcgatgtcgggagcgagctcggaccgagggctcagttgcgtcagtgccgcgcgcgtgctcgtcgggcgcgcgtgctcgtcgggcgcgcgcgcttcccggccagacttggggccccggcagggttggaaaatgatggaagaggcggaggtggaggcgaccgagtgctgagaggaacctgcggaatcggccgagatggggtctggcgcgcgctttccctcggggacccttcgtgtccggtggttgctgttgcttggcctggtgggcccagtcctcggtgcggcgcggccaggtgggtgtccgcgccccgggtcggttgggacggctgcttcctagggacggggcgctcggagtgaacctgtggtgcctgggagtggaggggcccggcctggggatcggacccggggtcggggggcgcggccgctccaggtgtgtgcggaccggggtcgcacccgaggcgcggggtttggcgccccaagcccttcttggcccgggtcctctgcccggcaccgcttcctccgtgtcctgttcgatggagccgttcccagcgtccccccatccctcgccgcctcgcgcgaccccgggtcccccagacgccccgaaacccgctctggggcgggcgctgacctcggcgggccggagccctgcaggctgggcgcgcccgcgggcgttcagtcctccaaacgcctgcagggagggagctggctctcgctcgtggagttaatgtcgcttggaaagagactgagagatgaaacttttgctgcaggttataatttgaaattttgacgttcatggtatccttgggtcaacacagctaaatttaatggtggaataaaggtgggtgggaggacgctcatttctcttgggtcatttttgtagtaagaatattttgtaaacgatgtgctacctttctatagccaaaccattcttaaaaaatctgtgtttttattgggttcgtactgtgttaaatccggacagataatccctgctcttttgaactcacaggattattgtaggaattaaatcatttgtgtgaaatcgtttttgaattgtgaaactgcccttgactatgtaagatacttgtattggagatgcccaaacatagtggaagcagattgtcagcacgctggcgtctttctggaaacaagttgtttattttggattttgtatgatataatt

SEQ ID NO: 11842 - DNA, 6000 bp, Homo sapiens
tgtatttcttcacaggtttgcattgctctttccccctctgttttctcgttggtgatttccatttattgatgtaaatttagagaccatgttaatgaaacctgtgtgactaccaatttataacatttacttttaatgtggctatcacaaattattcatgaataaggaactttgctttatgaatgtcctgaataccaggcacaaattattaatacaacagtatagcaagcagtgtcttatttgagtaattaattgctatacctgtagttgcattataaaagtagacaacttttattaacaacgaaaatttaacatttctatttttctatatttcttttacaacagtaactacatgataacatcaaaagccataagatagagaaaggatattaccaagaaacttaccattaactggcttgattcaacaatgaaaacaaaaatcgccttttttctcctttcattatggcttaaagctttcaattgcacaaacaaaataaattatatgacaggaagtatgcaagcgtgtgtctatttattattctacctgccatgaatctttaagtaggaaaaaaccacttttgctctttttcacccagaaacctgttgtcacgcgcatccgtgtgaagacaccaccaagcaggctttgtgtgagcaataaagctttttaatcacctgggtgcaggcaggctgagtctgaaaaaggcgtcagcaaagggagatggggtggggcagttttataggatttgggtaggtagtggaaaataacagtcaaagggggtttttctcttgcaggcaagggcagaggctacaaggtgctcggtggggagcttctgatattcattgtccaagagaaagaatttcacaaggtcaattgatcagttagggtggggcaggaacaaatcacaatggtggaatgtcatcagttaaggcaggaaccagccattttcacttcttctgtggttcttcagttgcctcaggccatctggatgtatacgtccaggtttgggctcagaggcctgacacctgttacatcctaaactgaaaactttcagattcttcagatgcccacaactgctcccgtctcaagagaggacaccaatagccacacctccaatagttcatgattcccctgccctctctgttccaggcattaggataccgactggaagaattgatagatattcactctcatagcccccagatagtcactagtatcccttctactttaaagaaattgctcaaactgagtttgaggtcatagtaccatcaggtacgtatgcttcgttggccctgtataaactgatctggaagatttctctgtcctttgagaaaactcaaacttgctgctctatcttccctgaagttgggcatttctgggtaagattttcttgcctcggtctcccctcccatccgtctcttgctaagatgggggcacttctacatatcgcagagcattacacatgggttagggatccatcagcccacctggagtccaattaggacctacagagtcttcatcacaaaccaagatgctccttagacaggggtggaggaacctcaccacagaggtccagagtttcctattccaaatatccatcaactgaaaaatgggtaaacaaaatgtggtatatccaaacaatggaatattattcagccctaaaaaggaatgaagcactgacactggtacaacatgattggtccttgaaaccattatgctaagtgaataaagccagtcacaaacatcagatatttacatgtgtatttgaagaagcctcattgtctggggtaagtaccaaggttctcggtctcatggccaaggagatggaggtcgtggacacacacacacagacaaacacacagacacacacacacacacacacacacacacacacacagagggaatttggagcaggagtttaatagacaaaagggaagaacagctctctgtctcagagaggggtcccaagcgggttgccaagttgtcagggtttttataaatgggctagtgaggacggggctcgtgaggaggggatgtcttatcctcctagggccagatggtttgattgagaacaggtgtgttatctgtatggtgcagagtttttgtcagttctcatcccattccctgcccacataggcagaatctcagtctgtgtaactttgttctgcttatctgggagggagagtttctgtgtctgttcccagacatcttcctgcatccgcaggcatccccctgcccccacaagtctgcttttggcttccctatctcagtgtgcctaaagggaaaggaatgtgcttattaaagccctctgttttactggggcccattgtgtaagtgtgaagtctggtgattacccaggagaccttccccttctttctgtgtccaagctgttgatgtgtgatttacagcctgaactttcagcctgcttgttgttagaagagaagtgatttctttgaactgcctgaggttagaaagggaggtatttttgagctgctttttgttaaaaggaaagatttctgccagggactcactttaccctgtctacctaaataatttctttctgcctcctataacatattcatttgtatgaaaagtccagaatagagacatctcttaagatagaaattagtttagtggttgtttagggagtagaggggtgggataaagaacttgttttgggggtgggaggatactttatggctaatgggcacagagtttcttcatgatgtgatgaaactaatttcaaattgactatagtgatgttcacacatatctgagaacatattaaaaatcacttaattgtatgctttaaatgggtaaattgcatggcatatgaattatatctcaataaagctgtttaaaaatacaacctgggataaatttaccagaaaatataacctgggataattctaccagatttctctcatcttcattgccactaacttattttgggtcattgtgctcaatggcctgcttcttgtcaataataatttttgagctatctgttcaggcgtaccagcacttagcagatccaagttttagtcctgatcagtcttatttattttatttgttttttattttttgagatggagttttgctcttgttgcccacgctggagtgcaatggcacgatcttggctcactgcaacctctgcctttggggttcaagcaattctcctgcctcagccttccaagtacctgggattacaggcgcccaccaccacaccagggtaattttatatttttagtagagatggagtttcaccatgttggccaggctggtctcgaactcctgacctcaggtgatccacccatcttggtctcccaaagtgctgggattacaggcatgagccaccactcccggccctgatcagttttatttttgcacacaattttgcacacaatttttgcacacatattttgacacaattcatccctgaaatagggggtactggagtaaaaggcttgagtgtgatagatgggttgggttttggacatgtgccatttaagatatttgtcaaaaagttaagggaggcagttgcatagtcttctacagtggtctcaatttttctctctccccttgccttgctgcccttcctgtctccacagtttcttacttagagcttagagtcactgttaacaaaacagtcagattgcattgtaaaggttttcttttcccttagaacactatattataatcttgtgtagtaagcaaggtacacagttgaagtaaagtgctttctgattgtcttttcaagataaagttccattttcttgaattctctttatttgcaaaaataacactaaatattaaagctttcctttctctttcctccactgattataatatagttttatgagaaaaatacactgttgaagaaatgtgctttttgatggtcttagtgggatcaactccattttcttttctgcaaatttatttcaaataattttgtgtatttatagggtacagcgtgatgttttgatctatctatacattatagaatgcttcagtcaagctagttaatatacccatctcctcatcaatttatcttttctttgtggtgagaacattgaaaataaattttagcaattttgaaatatgcattattattaactgtgatcaccatgtagtgcaagagatcattaaaacttattctttcagtctgactcatattttgtacctttagatcaacattttccctttccccatccctcatcccaccttccctggcctctagtaatcatccttctataagatagactttattagattccacattcaaatgagatcatacagtatttgtctttctgtgcctggcatatttcccttagcataacgttctctggttccatccctgttgttgcaaatgaatttccttcgttaaggctgtatactattccactgtgtatatttaccacattttctttatttactcattcctcattgacacttaggttgattccatatcttggttatcatgaataacggtgaaatcgtaccagcattaaaaagttcaattttcttgatttttccgtatttgcaaagatatttaagtcagcagtagcatgtagaaaattgctagtaataatagctaataataatagctgttatttcccttttcctctttctcctccaccttagtaaataaaacctgccataaaactgtgatatggagaaacaaaattaccaacctcactaaagaaaacctcactaaaaaggaaaatctagcttatttaccccaatgtaactactgagggctttaaacaacttaaacgtctctgcaacaaattttgtgcaaacacctatgcttgcatctggcatttcccctccccgccctgcggaagtggcccagctctcagagctcctcagacctcacccccagggtcctggggcagcacagggtcctccctggcccaggcgcccggtggccgagagcctgcccgcgagctcaacgctgctcaacggtctctgtccttggctgtggctcctgcgctctggctgagccatgttccttctcctcgccctcctcactgagcttggaagactgcaagcccacgaaggtaagtccatgggagcctcccctttcttcttcgactttatagctgggctgggctcttactgggagcagtttcttgtcattctgggaccctccccctctcccttctgggatcccatgctggtgcttctggtgtgtcagggacacctttccacgccaggccagggggaactaaaggccttagcggaggacctgttagcgctctgcatcagcgcccatggtctcagtggcccacacgcagtgcgtcttctggcatcttcccactctgtgaaggagggtggaggtggtggagtactaactgccttcagcgaactcctcagagtcctgaggaagcaagtctctcatcgattctaaaagggaaccagaggggcctgtagaactgcaatgtctaatttttttttctttttttgtgtcttagccattttcaatgtgctgttgattatgtagtgaaatttgtggactagaaagagtgtgagcacatgagagaacttctacttaaaattttaggcgccaccatgcagtccgggataagaacccgtgcttgactgagacgattgttgatgcaaaacaaagacaaaaacaaacacattttcttactgcaggttctgaaggaatatttctgcatgtcacagttccacggaagattaagtcaaatgacagtgaagtttcagagaggaaggtaaatgatgaggaatatttattctatatttaaagctttatggcaatttttatttacccttatattaagtcagatcatactaatttgtattcattgccaaatcataatattttgcctgtgctattttgtctcctaccgtgttttgatcctcttgttcccccatttctgctgcttatttccctgtcttttctcttcatctcttcttaacatactacttgttcacaatttccaagaaatgctcagcaatcaaactggtgggaaaaagaaatc

SEQ ID NO: 11843 - DNA, 6000 bp, Homo sapiens
agaacaaagcccaggagagatcgtagctgaagagaagacgccatctgcagcgtgggaagctgtttgtaagcagggccgaaaatgatccaggatgggtcaaaagttgaacatgagttggtgatacagaatgggaccccgcattgaaaagctagctttgttccaatagagaaaaaaaaacagagttgaaaatggagggacaaaaggatttcactgataatattcagcacaggttaacgctcttatcagagtatctagtttgaaacaccagaaggttctgagagtcatacaaaaagacagaaactttggaatagagatcctaccatcgaagataaaggaagctggttcattcaccttggagaagaaacgatagaggggtgtgtaaaaggatataagatttttatcaccatctctcttctctattaaagatctctcatccctactcccacctgaccctcacccaagcagacttcagatcctacttatttcaggtatgaatacttatcattccctggacagagaggctggaatgcccaattatctctccttctgttaaaacccctccccttccccaaagttttttaacctgttataatctccctcctcccaccctcctggccacccataagaatgtgaatttccacaggacataaataatccacactttttttatcctttcatcaccagcccttatgagtgtcgacaaatatttgttgaatgaattcattttcaaagcatttcatgagaatctattatggacagaggaataaaatagataatatgtaggcttcaaagaagctaaacatagacaagggactcaaaattcaaaaaggaagaatgaattgtcaatactgtagactaatagcttgacttcagctccttaaaatatcagaggattgttgaaaacatagaaaggaataaaataatagtgtagggctagtgagctcatagattatagatcatatctgtattatatagtattatcattgtttggccagggttactagattaatagatatagtagagattatatgaggtaatgcatataaaccgctcaacctagttccttaacactaatagcccaatgaatagtagctgctgctatcatgatgttaatgttagcaaatcatttgactatgtcactaatgatgtaataatttaaaaaaaaaacagagtaccatacagtatttgttatgtgccaaacacattctaagtgttttacatacaatatcacattgacaccctctacaaggtagatgtactagatttaatagtgtcccccaaaatccatgtcagtcgggaaccccagatccttatttgcaaatagggtctttacagatgtaatcaggttaagatggtcagacaggattaggtgggccctaaagccaatgaatagtgctctttataaggagagaaatatttcaagacacagagaagatacagggaagaaggccatgggaagatggaggcagaaattgcagttatgctgtcataagccaaggaattccaaggattgctggtaactgccagaagctatttggttggtacaaaagtaattgctgttttacttttaatggcaaaactagaatctagacacatgagtgtgtttagggatgagggaagacgataacaatacagctcatcgtcctttgattcctctttcacctgggatcgatcctcttcccaaacatgaagagggttttccttgggttatatttgccctcaaatttcctcattcaaaaataatctgtttgctgggtgcagtggctcacgcctgtaatcccagcactttgggaggccgaggcgggtggatcacgaggtcaggagttcaagaccagcctagacaacacggtgaaaccccgtctctacgcaaaaaaatacaaaaattagctgggtgtggtggcacgcacctgtaattccagctactcgggaggctgaggcaggagaatggcttgaacccaggaggcggaggttgtggtgagccgagatcgtgccactgaactccagcctgggcgacagagtgagatccatctcaaaaaataataataatagtctgttttaccacctagtctcagtggccaagggctgcaggaaaatactccaaatatacaatgtatgaaaattgttttcttcgttcactccattagactgaaattttgagggtagagactgttttacctgtttaagggtgttctcaacccctagtaacaaatatgtagaaaaccagctcctaggagatcttactgagttagtaaggaagcatcaacttcggagacaaacactagtagacatttaattcaaaacaggatcagatcatgaaacggaatagaaagtccaaaacaggcagacagagggacagacagacagacacacacacacacacacacaccactgattttctttttctttttttttttttttttttttttgagacagagtctcgctctttagcccaggccggagtgcagtggcactatctccgctcactgcaagctccgcctcccgagttcaccccattctcctgcctcagcctctcgagtagctgggacttataggcgcccgccacggcgcccggctcattttttgtatttttagtagacacggggtttcaccgtgttagccagaatgatctcgatctcctgacctcgtgatccgcccgcctcggcctctcaaagtgctgggattacaggcgtgagccaccgcgcccggcccccactgattttcaacagagatacaaaggcaattcagtgaagaaatgagagtcttttcaacaaatggtacgtaaacaactgaataacaactgcataatcatacggggggagggaagagtttcactctatacctatgggaggcagaaatgccctccccaagaggtccacaccctaatcccctcaaacccctaacgtgttaagagagtaaaaagacaaatcacagactgtgaaaaatgcatgcaaatcacatatctgataaaggatttttctccagaatgtataaagaactcaaaactcaaaaacagcccggccaagttctcacgcaagtataaaggcctcaggaaaacatctttaaacatacaaaaatccaagaattaaagtgccttaaaaatttaaaactgaccttaagcccagccaataaagatgtaaatcaaaacaaaataaaacaaaaaacccctcaacaacaggaaaataaaatacaaacaaaaaaatgggcaaaagttttaaatagacacttcaccagagaagatacatggatggcaaataagtacaggaaaatatgttcaaaataattagtcatggaaaaatgaaaattatagctgcagaagatattactacccaagtcttggcaaagatgtggagcaactggaactctggtgggaatgcaaaatggtgtcaccactttggaaaacagtttgtcagtctgccaaaaagttaaacgtgtttttaccgtacaatctagccattctactcctaggtatgtacccaagagaaatgaaagcattaaggtctacacacctatgcaaagacttgcaaatgaatgtccatagcagctttatttgtaacatcccaaaactggaagcaatccaaatgtccatcaacagatgaatggataaacaaactgtgggatggccatacaatggaatagctatccagcatcaaaaataaatgaattattgataacacaacaacagatggacttcaaaatagtctatgtgaaagaagccaggcaaaaaaagggggtacacactatatgattcaatttatataaaattcaaggaaatgaaactaatgttgagtgacagaaggtggatcagtgcctgggaaatggggtctgggagaggcaggagggagagattacacaggagctggaggaaccttttcagggcaatggagctttactatcttgattgtgacagtggtttatgggtgtattcatatgtccaaagttatcaaatccactgctttaaatgtgtggtttattgtatgccatttatatctcgaaaaagctgtttttaaaatacagtaagagaatttttcatatttaaaaggcaggatatttaaactatattaaatatataaaagacagtggtactaacaggttgtattagcaggagacaagggtaaggtggggtttctttggctgccttgcaaagaaatgctgagtcaagtaagggccagtgggcaacgagggcggaaccacttgtccccttggtcacctgagggatgtggatgggagctgggtggaaatggggggtgagaggaacgccgcccccaaagaagagtcggggcaggggcgcccaacgctggggcccaggcaggttcttcgtcctcacttcctgaccctttctcaagagtctagggaccaaatggatccatccttggagcctgctttctacttctgaacacaatgagcagtttgtgtttgagggtttggggagggggtgttgttttttctttatgttttgttttttgttttgtgtatgagttgggtggcataacccacacgtaagctgcgacgtccaatcaagaacgaaaatgacccctcacaatcagtgatcgggaaccacctgccacaatcactagggaagtgacacagccgggaaactccgcccctcacacccccgcgcgctcgcgccggccgcagccccacagctcgccccggccgcagccccacagctcgccccgcctctctccttccggaaacaatccccgcgcgggcggaaggcggggtcggccctggccccgcccacatcatttcccttcctcggcccagccccacagcgcgcagcttcggcagggtggctttacggccggaggagagggtgggtcccagacctgaggtaggaggccgagctgaggggcggggaagaggctttttgcggcaggacgtaagtgacggcgaaggcggtgcgacagcagctggagggcagaggaggcgggtttgtgtttcccgggccgaaccgggttgtggggggcgcggggcctgggccaggcggcagctaaggcccgcggtgacagcatgggtgaaggggagcggggcagaggaggccttgggctgttttcggcggcgggtgggggcgaggggctggcgggtcagagtcccgggtccaggccggggctctgactcgcggttggtgttcccccgaccccgcagcgcggggtgtcctgtcctcgccatgaggccgcagcaggcgccggtgtccggaaaggtgttcattcagcgagactacagcagtggcacacgctgccagttccagaccaagttccctgcggagctggagaaccgggtacgcaacctggctccccacgcctgctctggcgagggagagagactcaccggggacgggaagggtgtgggcgacaaccgggcctttgagggtcccgcagttctggggaggtccaggcacagaaggggccttggccaaacgtgtaagaagagagccactaagcaagacaggtgtttggagcaggaagaataatataggccgatcgccggggttgacgaccttatggaactttgttgcccggtgccgggaatctggatccagcagtgttcccctgctgcactcccccaaatccccaccccgggttattgtcggcagcgatgaggagccaattcctgaggctccaggtcgtctcagtcaccaggttgtaaactatatcctcctacctctccgcgcaagataaatcatcatcattctcgtgactggtgtttgctgcctctgtgctggccgcactgtttggctgaaagggtttattaggtgcatggccaggcggtgcgttcaggctttcttggaaccttaaagacgtcgggcgttagataggcctggacaggaaaatgtctcagaacaaggccttaaacttgtcacattcactgggagccacctgttttgtcttgcatatcaaaatggtcatcaggatataggtcctttgggcaacattgcaggcaaaaatggaagaatgggatttgcttccccttcagacctagcaaaactttaaaaaaaaaaaa

SEQ ID NO: 11844 - DNA, 6000 bp, Homo sapiens
ttttttgtatttttagtagagacggggtttcaccgtgttagccaggatggtcttggtctcctgacctcgtgatccgcctgcctcggcctcccaaagtgctgggattacaggcatgagtcaccgcgcccggccttttttttttttttttttttttttgagacatggtttcactccagtagtccaggctggaatgcagtgaagcaatctcactcactgcatcctcgacctcctggactcaagtgatcctcccacctcagactcccaagtagctgagactacaggctcctgccaccatggctggctaatttttttttttttttttttagagagagggtttcaccatattgctcaggctggtcttgaactcctgggttcaagcgatctgcctgcctcggcttcccaaagtgttggaattacaggcataagccacgatgcccggcctgactctcaaatttatatcactagctgaagctctcctcccaactccagacttaaaaaaattgagagtagaattaccatacgattgggcaatcccacttcagggtagatacacaaaataattgaaagcaggatcaatcccaaatgtccgtcaacgacaaatagataaagaaaatgtggtatacaaatacaatggggccaggcgcagtggctcatgcctgtaattccggcactttgggaggctgaagtgggtggataacttgaggtcaggagttcgagaccagcctgaccaacatggtgaaactccatctctactaaaaataaaattaaaaaaaaaaattagccaggcatggtggcgcatgcctgtaatcccagctatttgggaggctgaggcaggagaatctcttgaacccaggaggcggaggttgcagtgagccaagatcatgccattgcactcaagcctgggaaacaagagcaaaaactccgtctcaaaataaacatacatacatacaatggaatattagccctaaaaaaaagggaactctgacacatgctacaacatggatgaatctggaggacactgtgctaagtgaaataagccagtcacaaaaagacaaaatccgactatttatatgaggcagactacttgaactcccattagcagaacgtagaatggtagaatggttgttactgggggtagagagaagagaaatgaaatttttttttaatgggcatagaatgtcaattttttttttttttttttttttttagagattgggttcccccatgtttcccaggcttggtctcaaactcctgggctcgagcaatccacttgcctcagcctcccaaataactggaattacaggcattagataccatccccagccttgatggaaatttctgaagattcataataatgaaaatatatttaacaccactgaactgtacacttagaaatgattaagatgggccaggcccagtgggtcatgtcagtaatcccagcactttgggaggccaaggtgggtagatcacctaaggtcaggagttcaagagcagcctggtcaatatggtgaaaacccatctctactaaaaatgcaaaaattatctgggcatgatggcgcgcacctgtagtcccagctacctgggaggctgaggcagaagaatcacttgaactgggaggcagtggttgcagtgaggcgagatctcaccactgcagtccaacctgggccacagagtgagactccgtcccctctcccctccaccaaaaaaattagccagatgtggtggtgcatgcctgtaatcctggctactcgggagactgaggtgagaggatcgcttggacctggaggcggaggttgcagtgagctgagattgtgccactgtactccagcctgggcaagagagtgagactccatctcaaaaaaaaaaaaaaaagaactgattaagatggtataataaattttaggttctacgtattctaccacaattgaaaacattttttaaaaataatatttattttactttctttggctttttattttggtgcttggaaatgagcattgatgttgctggttgtgcagtcgacagttagggattcacctcttaatgaatggcaaactctttgtagatgttaaagttgactttggaaggaagataagttgtacggcacaggcatggtactctcctggggaaaggggttcttcccaggctcacagcactgtgcaccatgtacagagcacacattttggggaaatgccctcatactatgaatgaattcaaagttagtatggggtaggatctaaatcttgtgatctctttcttctaaaggactacccttcatcaggttttaaaaattactcctataatttctgcagtatgagttttttcattctagaatgtgaaaatactgccaacaataatctaaagacagcccatattcacagcgacaagaagttcagtgttggctatagctcggtcatgctatgggcaggaggccttctctaaagataagtctgctttgtgtcaagcatttcaagcatgacttgcttgtttcatctgcccatttacattccttgtacctagaaatgaatgtgataaaagttttggtgcctacaggaactatatttacctagttcatgttggcttcccactcagagggaagtttgattgccttcctgcacttgagaagtttagagaatgtgccagtgaatgtgcacactcacaaggtgtgtgtgtgtatcagtgttaatacccaacaattgagcctactatttgcttgggcaaagaacaccattttctcttgagcctctaatatgtgtgaaatattttaagatttcaatattatgtacaaagaactagtagatggtaagaattgtgagaaaatataaccatgagaacacaaagagagtacagcagatgagtgggctacttccaagactggttctgggggcagaaaaggagaccagacgaaggactccaaagagcagttgagatcctggtggccactttaaatccctatccctagcactgtggagaacacaacacaaaaatgtatgatgtctggtttcttcttcttttttttttttttttctgagatggagtctccctctgtcgcccaggctggagtgtagtggtgcgatctcaactcactgcaacctccgcctcctgggttcaagcaagtctcctgcctcagcctcccgaatagctgggattacaggtgcgcaccaccacgcccggctaatttttgtatttttagtagagacggagagacggggtttcaccatgttggtcaggctggtctcgaatgcctgacctcgtgattcccccgcctcagcctcccaaagtgctgggattacaggggtgagccaccgcgcccggtggtttcttctcttatggaatttaatgtcgttgacgattagacgtggccatgcattactcaatcttgaattgggatccccaaaaaagctgggcgagtaacaagggctcaatgaatggataagtgattgagttaataaatacgtgatcagttccaaatgggtaacatttagttatatttggtggagataagtagtccagtgttttggagctaagtggttattcttttttttttttttttttttgagtttgggtctcgctctgtcacacaggctggagtatagtgccacaatctcagttcactgcaacatctgcctcctgggttcatgcaattctcctgtctcagcctcccgagtagctgggattacaggtgcgtgccatcacccccggctaaattttgtatttttagtagagacggggtttcaccatgttggccaggctggtctcaaactcctggccttaagtgatctgtccgcctctgcctcccaaagtgctgggattacaggcgtgagctacccgcgccccgctccccccaccatttttttttaattttcaaaatttttgtagaagtgggggtctcgttacgttgccccggctagtctcaaactcctggcctcaagcgatcctcctgctttggcctcccaaaacgctgggattactggcgtgaactaccatactctgccctttattcttacagagattttgaggtctaagaatgtggactttaaagatttcattatcagattatgcatttagcacggaatgacaatctgacagccgtgtacagcgtaaaccggcggagagggcttggcactaaaggcaaactgtcttttaagaacaggaaaaagaaaggtaatatatattttaaggaggtcccattttaggggagataataagcttgggttaggcgtccgaagtcagaagatatagtaagaaacacacacgcaaactccagcagccaccagctagacttgagtagagagagcaggtccaagtggaggtggaagttggaaagttgcatctgccaggcagggcgaaagtggcctacacccactcctggagcaccctgcttgacgagcaaggtagacgaggctgagggatactgctggtgatgacggtggtcgtggtgatggtgctggtagctaacagatcttgagcgtaccaggccctgagctgagtcctctaacgggcagaatgtcgctgcatacggacagcagcctcaagaggacaaggtgatttagtgactctagcctcttcccgcggtgccagcctgatttcaccctctccggaacacacaagcgaacctccggggagggagccagtatcgggtcctaacgcagggaagcgctccgctttctgagagggacgcgccagcggagggacagccagggcccggcctctcctgctcctgccccgccccgcccccggcagtgccccctagtccgccagagggcgactccgcgggtcgcccaacccgcgaccggtccacgcggcacccgcctctccctaggcccccgccctgccggcccgcgcgcgcccgacgggagcgtgcggggcggtgggcgcagggtcacgttgggcggcgcagacaaaggcgggcgcgcgcacgtcctgacgcagcttgggcccgcggcggcggcaagggcgggagggagcggtcgccgcgggatttggagctgcctagcctcgcggtcggtgagtaggagggagctggccccttacctcaaagtctccgacctccggggagccgagagcgggacgtgggagccgggcttgggcggccgcgcggggcctgcggtctgggacgccccggcgacgctgcgccggcgtcaggaggcaccatcgccgcgccccggggatccccggcgggtggagcgggtgccccccgtccgggatggaacggtccgcgcccgccccgaaccccggccgcccgcctctccgctcgcctgctctccgagcccggctcctcggagcccctcgcctcccccaagtcccaggtgtgcgcagccctcccgccccgggagtccggggatgtgggtggcgagggctgctgggcgttggagcaccaggaagcgccttcccctgtcattccccttcctgtgttctctggctgccgtaagatgcatgtctttaccctctccttctccaaatgcatgctcccatttttctttaggatttcttaactcctgaaatcccttgcctttccttttttatttcagcaccctctgaggcatccttctcccagtggggcttgtttatttcctcgctttccatgtcacagagggctgaagtttagctgttcagaagttgcagaaaatagcttataggagacatacggtgtagcacgatggaaataagttccatcctctgccaagtattaccatggatcttctcatggataaccttgaggtcatttgaggaattttgtttttggttcattttccttaattttggctgaactttgaggagctctccttagtttcatgtcttgtagattctatctcaatccaagggaaatggtgtgaagagcagttataccataccaaagtctccagacaaaatcctgtaataatgccaatcaaatatacttctctctttgaaagagatgtgcttttcttttcttttttaactttgtattttggagaatttcagacacagggaaatagatggaatagggaaccagcatgt

SEQ ID NO: 11845 - DNA, 6000 bp, Homo sapiens
gagagcatacgtgtgaacagggaggaagtggcaaagacgcagaaatgatgttgcagctctgaaaaaaatgtctttctgggtgggcaaggcctctcttgtctcagaccaaaaatgaaatataaataaataaataaataaatggttcccagtgaatcctgatagctaggattaactttttatggtagaaaaatttctcagcagtgagagctgttaaacattagaatggtttgtgagtggcagctttaggaaatctttccctagagatttttatgcacaaaatagactgacttatcatttgtcaatgatttcctgtggcctctcttaaagtcatgggaaagtattacatgagctctcagattctatgttacttgattcaattcaacaaacacttgagtgtcaacttggttcatgcccccaggcattgctatatactggattcatgcgccctccccgcaaggggcctctcttccagtgatccccatctcaacacatgatgcttccatccatgtcattgcccgaatcagaaacctactctgcctcaccactgacattccattaatccctaatccctatcttctctggaaggtgtccacttctctctaatccctgcctcatggctccaggcactagctctctcctagggattactgcaattgtctaaataacctcccagcctccaggctcagcctgttacagtccatcctgcacacatagtctttctgaaatggaaatctgaaagtgtgccactctcctgcttcacatttcttcaatgggttcctgggcttagaggtaggaagtgtggaatctgagccattctgctcagatcttccaacgtccttgaatcacagctttgctgttcgaccttgggcagttatttaagctgtctttgcagcttcctcatctacgaaaaggggatcacaacggtaattcattttagagtagttggggggattaaatgatttcagatcctcctctcttatgtgaactcttaaatttggagtgtccctggaatctggttctcttatctctccacactccttccctcggtcatctcaacaggtcctactactttaaatatccatatactgaaaacacccaaatttatatctcaagctcagcccactctcctgaaccctggacttatatgtccagctgccttctcaacatctccacttggatagttaatggagctcacagatatattgatatactttggatgtttgtcccctccaaatctcatgttgaaatgtgatccccagttttggaggtgggtctagcaggtgtcatggggttggatccctcgtgaatggcttggtgccctccccatggtaatgagtgagttctcactctgttggtttatgagagagctggttgtttaaaggagcctggcacctcctctctctcactcctgctttcaccatgcaactgcccgctcccctttcaccttctgccatgagtaaaagcttcctgaggcctcaccagaagctgagcagatgctggtgccacgcttgcatagcctacagaaccatgagccaaataaacctctttttttttaatattataaattaccgagtctcaggtattcctttatagcaagcttgtccagcccaaggcccataggctgcatgcggcccaggatagctctgaatgcagcccaacacaaactcataaactctcttaaaacattatcagatttgtgattgctttttttttttttttgagacggagtcttgccttattgcccaggctggagtgcagtggcacaatcttggctcactgcaacttccacctcccaggttcaagcaattcttttgtctcagccttccgagtagctgggattacaggtgttcgccaccacacccggctaatttttgtatttttagtagagacagggtttcaccatgttggccaggctggtctcgaactcctgacctcaggtgatccacctgcctcagcctcccaaagtgctggaattacaggcatgagccaccgtgcttggcctacccatagtctttctagtctcagctgatgaaactatccttctccatgctgaagctcagtggccctcccttctctcttgttctcactccctgcatcccatccatctggaaatccagctggctcctcctggagactacacgcacagtccacctcctcctcaccacctccatggctacagcctggtctgagctccatcacctctcgcctgggtcactgcagcggtctcactagtcttcttgcacagtcttctcaacccagatgactgataaatcagatcctatcacccctttgtccaaaccctccatgggctctctctttcacaaccataatctttaaaagagctttctagcccctgtgtgatcaggccacccaccctgtaaccttgtctcctcctttaccctgcgctcatttcactccagccacactgtcacccttcctgctccagaaactccccaggagcattctggccttacaggctttgcagtgcctgttccctttgctggaatgctctcccccaagatctccctatagttaactcttctgccttcttcaaatctttgcactaatgtctcttctcaatgaggcttgttctcactactctcttaaaaactgtaatttgccctccaatcccataacactcctggtagtttttttttattgcacatgccatcttataacctactatatactttacttatgtatattgattattatctgtcttttccccactagaatataagcctcactaggacagggtttttttttttttttttttttttttttgagacagagtctcactctgtcgcccaggttggagtgcagtcgtgcgatcttagctcactgcaacctctgcctcctgggttcaagcgattctcccgtctcagcctcctgagtagctgggaccacaggtacgtgccatcacgcctggctaattttttaattttagtagagacaggggttcatcatgttggccaggctggtcttgaactcctgacgtcaagtgatccgcccacctcagcctcccaaagtgttgggattacaggcgtaagccaccgcgcccagctccaagagatttttgtcttttgtttactggtgttatgtatccaagcactggaacagtgcctggcgcatggtagggctcactaaatatttatggaatggtacttacaaattataaaacacagtgtatggcacacagtgttttataaatattaacatttccaaggttcacaaccactaggctccctacttacctttccagcctgatctccctgcgctcttcctaccattccagctcagctatacttaacttgctcatctgcagagccttccttatgtacttttttctctgtccatctatccctgcatttgagggatcctttctcattttcaggtttcaaggtagagggtcttccctgactctaggtcagccatctctacagcactcctcccaccccctatgcgttccttattcatcacactgcattgcaatcccttgcttctcatttgtctttcctgctgggccctgtaaccacagggacaatgcctgtgacagcagtcattgcagcatctccagcatccagcacaggtcgatacgtgggggttttcggcaaatgttaattcagtgaatgaatgagaaattctcacggcagcgactgcatttctgcaccttcgacacacattatcacgtgttattgtatcttgtgctgttccttagggcataacaattgctagcattttctaactcaatcctcacaactctaggagggaggtactattcacgttcttatttgagaagtgaggaacttgaagtttagaggagttacagttctttctcacggtcactcaggttgtaagtgttggagcgggttcaagccaagtcctctggcaccagcgtccctaagcccacccagagtcataccattctgccattttgtttctggcttttcttcatagttcaaagtcagccaactacctgcccttagcaagcgtggagagaaccccccgcaccacctcagcaaagggcttgtgtgtggaggagctgccacccacgctccatttcaccaaagtgacaactaatgctagggagggcgaacctctcatcggcgaggtcgccactgtcaccagcgcccactgctgggtccaaggctggcgacgcctcaccgcatctgggcttgacttcctgcgtcactggggcgacccctggtcctgacttccactccacgccttcgtggatcaggacgactgggaccactcaaaagcgtatccaagtcctgaggtctccaaagcggtggagagacccgcccagcccctcactccccggctgggaactgagattgtggagggtgggcgccctgccgcggcccagtggggctgggggcttccagagtcggggtccagggctcggtgtccgagactccaccgccagccgcgccgacctgacccacggccgggtacaacagagaaggcggcgcttcccaaaggcaccgatggagtgcagggtagccgccgccctcaggatttatcaaccgcgaggcgctgtcagcaactcgtgcccggaagccaccccgccccggcacacacatactccagcgccccctccaggcgcactccgcaaacacgcgagcgcggcgaccgccccagccctttgtgactggatgagtggggccgagcagcacgcactgtcttcgacctccaatcaggactcggggtctcggagctgtaccaatcggagatgaccgtggcctcaacagggccaatcgggggactcgagcccgacaacagggcaagccgccaacagcgatcaatcagaggggaggagcggctcccagatacccaatcagcggccttcaggcgcagatcgtgggcggagcggtagccaggccgcgggccggccaatcagcgggcgagcggctgcctcagcgcgcgcggcgggcggggcggggcctgtccgcgcctaggagcagtgggcgctgagagcagcaaggccaggtgaggagtagggacgaccccgagcctggagagggggcaggagtgggggcgcgcgagggtcggggcggggtctcaggatgcagccgggcggcctctcagggctgcggacgcggcggggagaggtgaggggccgggttcagagttcggggagggcgtccttcccggcgccgcggctgcgggcggaggggacactgttgccatggcagcgcacgtgcgctcgctggcgcggcccggcacccctgcgctcttcaccccggaacgcgcgtgccccttcagccaggcccctgcccgcctgcgccccgcggcctccgtcgccgccggctctgggccggggcctgcgcagggaccgcctgcctaggccgctgcctctccctcgcaccccgggctgcctggctgtctctccctcctgctgtctcctccaggcggcgctgggcaccgcaggcctctgcgttttgaccacccgcgccggttcgcggaatggccacatcctggcgactggcaccagagagatgcaaccgtctgagggccttggggtgtctgtcccccagggaaatttttttttttttttggaggtggagggggcggggttctccctctgttgcccgggctgatctcgaactcgtgagctccagcggtctgcccgcggaggcctccctaagtactgggatcacaggcgggagccccaagggatctttttaaatgtcttactgcattaacaagtgcctaaggagtgctcagagaatagctctgattggatgaataaagacccccaagggcagctttccattcctcccaccaattctggtgggcagaaatagaaagcaaaccacatatgtaattgtacatgttctggtaaccactttaaaataataaaacaggttaaattaattttaatatatttgatttaacccaggatatccaaaatgttattacaacatataatcaatattaaattattggtaagatatttgaaattttttttttcatgcaaagcctttcagatttgtc

SEQ ID NO: 11846 - DNA, 6000 bp, Homo sapiens
gaaccagcttaaaggtaggagaaatgagaagaaattagcaagggacccagaattagcaaagaagtagacttcaaaacgggaaaaccccagagtgtgtgatatagtgaaagccaagggaagagcagatttcactgagaagagaaggttctaccatgtcaaatgccactagggggtcaaggaaggtgagactgaaatgttcagtaaggtggcaataggctgccagcgacttggtaagaacagttccagtggagcaattgttggtttatttgaatgtgttcaagagaggatcgaagaacaggaattgaagaaagcaagtttaggcaactttagagagctttgttgcaaaaggtttcagggaagtgcagtggtgactagaaagggaattggaatcaaaagttttgttttgctttgttttttaactagtggatacataggagtgtgtttgtacactgatgtacaggagagagggaacattgataattgaagcaatgagtgtggaattgagctcttgagcagtaagaggggtgggggctggtgaacagcaagggagttggccttgtagagcaggaggctgagtggtacacgtgctggcaggtgggcagagaaggtgctgaacgcttgtgtgggttctgctctggtcgcttcatctttctcagtgaaataggaagcagagtcatcaggggagagtaagaatggggaaggaggtgtttaaagcttgagaaaggaaaatataaaaagacataatttaaaagagcaggaatgcaaatggactgggaagatgaggtgtgactgtggagcagcctttgggtccacttcagggtaaaggtccaggatagaaagaagtgcagtgtgcagggccacgccccttctccagctacagccagttacacagggtcaggcctgatgtaggtggagaacagagtttaaccagggctggtgttttgtcgagtaagagggacaacagagatgaggaagtgtgtgagaggtgcctatcatgattgagcatggaatttacatcgtgtaagaagaaagggggggcatgaaggggttaagggacatgaaaaggaggtagaaaacaggtccaggggtacaggagagagtgagctcatgagttaggaggggttaatcagagtgtgaggtatgtaaagtggagattatgaagctgttgagtaatgctaaggtttaggttataccagctgtctccaacccttttggaagtagggaccggttttgtggaagacaatttttccactggggttgttggggggatggttttgggatgaaactgttccacctcagatcatcaggcatttgttagattcgcacaaggaggacacaacctagatcccttcaatgtgcagttcacaataggggtcgcactcccatgagaatctaacgcctccacggatctgacaggcggcggagctcaggtggtaatttcaccctgcctgccacagctcacctcctgctgtgtggcccagttcctaacaggccactgacctataccagtttatggcccaggaattggggacccctgggttatacaatgagaataaatctctcagattggatggaagacaaaatcattgatggagagatcacatttctgataggccaggaatctgtaagaaacaacaactgattgtgatgcaggtagtccaaggactgtgttttgaggaactctagttttaagtagagatggagagccaaacacaaaagtttagaagccagaagacatgagggggctggaagaaacaggaaagatattaacagaatgttgtgtgtggagtgtgctggacacagcgttaaacagttcacatgcctccttgttattagtattagtatttgtttctggcaacaagaccaaattctagagatcattattgtctctatttaacaaacgatgagcatgagggacaggcaagttaaataacatgcacaaagataagtccaaactctgaacttgcaaccattatgtccacctgccttgacaggtgcaatgattatgatagagcagttaatattaaaatctatatcctaaaatgtgattactagacttatgagattagagactcttgagaacagtattgtatacaaagccctgtaatatacatgatctcatctaatcctcatattaatcctgtgtattaatttgctagggtcatggggccagtaattagcaaagcctggatgtgaagctcatcctctgacctcctgcttgtaaactcctgccactaactacccgtcaccattactttccagatatggttcagacagcaaccttaaagagacttttgaataaatgtattgataaagaaaccgttactagttatttctttttagaacctaacataaaaagtttcataattcctgtgtttccatgggaacattcgttagcacagaatgcagcattcttcctgtcatggaatgttctttctataaattcatgcattcactcaactaatatttattgagcaaatagtctgtgcatgtgctgtgccaggtgcagaggatacagtcgaataagaaacatcctgttttaggggaacctttagtcagccccaggtcttcagcacctcagatactctgcagggccttttcatgcctggtgtaatttaagacactgcatttgacctagaatacactccatcccttaggacccagttacctaagagatcatttctctccctagtggtttggcagagagtaagatcagcagtagcaccctggagatggaatcttagatttggactccggagaaatagaatcagggtgttttccaaaaaaggattcttctactccaagaagacccaattttaaagctggatttaaaaatatacccgcttgcctggcatactaagcatcttagtgggactgtgttgcccctcagccatcacttggctattcctttcgctagaaataccggatttgtacatgccatgtaatcgtgtagagactctatgactcaacaccctcctgccaaaatgtcaggtcaaggccaaccaagggagggtcctgggcaccagtctgtgagaataaaaggcaatgaatccagagcgtggggcaaattccactttatccaggttggtgatgacacagcccttgatacgtagcacacaatgcgtgaggcggctctttccacgtgcagagaaatccgtgcacttctatttcataatgttactcattaagaatggcactgtgtactagttcgaactcacctggcgcctaccagagagaagcgggggtgggtggggggtgtcatggtttgcctcctgatttagaagatccaactggtgctcctagtggcagtgtaactcgtgttgcctcacttacctcccaagtatgtgagtcacagtataatttaagaattacactctctatttcttacatttgcaaaagctaagtgagacaaatcaaagcttaagtttccttattaaaaaaatgaagatcctatattttattgaggttttaaaaatctcttaaaaccacaacatattttgtattctccttgaatcactccgatcacagatttaatttttcgagtcatttctggagttgtgggaccacacagctagtttgcaatccctatagctttaagagaaggtatttctagttttggagtaaggagtaagggaggtggcgcctgctccgggctccgccactccccgcccgcgggccgggggtggggtggcactcggtttcccgcggctgccggccgcgccccgcgccgccgccaggggtgctgcgcttcccacctgccgcaggacgcctcgagggccggtgcggtgcccactgggctgccgctcctcccggctcagagctttccagccgccgagaacgtgcgagggaccccggcgtcgggcaggggcctgggccgcgaagggcgggagcgcctccgcacctgcctgagctcaggcacccccgcccgccggagaagccgggagccctcggaatgccggctgcctccaccgagggcgctggctcggggctcccagcggacccgcccgccctcagctgccggcgcggcaccaggctccgcgctccgagccccgtacgcctttctctcccctgcactctctggcaaggccgggcacgcccactgccgctgctggcctccgagcccgggcgcccgagttacacccattctccccaccatcgtcggccagagccgcgctcccagcccttctccaggtgctggcggctccgaccggaatacaaagaggcctgctcctccctggcccttgctgccgccacacccgtccgtgcccactctccgccgtcctccgcgagggctgcacgcagggacccctcctctcagcgcgctcctccccctcccccagtgtcgctcaaatccacccagcgttccgaaatcccgggagtgggggccttcgactgtcaccctcaggcccccttggccgctcctcccggcccttgggacccgccagggcagtcccccaacccccgcccgccgctcctctcggtcccggcccctcctccgggtccctcctcctccctcgcccctcccgagccagggtgggagcgacggcagctggaagagaagggatgaggtcatcctctccctcggagtcagctggtggaggagaggaagcgggaggagggagcgcgcgcgaggggaggagaggaatgtgcaggtccgaggagcgccgcggcggccgctgctgctcctgctgctggcggcggcggcggctcgggcggcagcagcgaagccgggacggcgaggagcgcgggcggcgggcaggggcgcgcgcggggcgccgcgagcagcttggctccgcgcaggcagccaggcggcgctcctgccggccccaggcgcgccgctagcccggcccagcgcccagcccggcgggcggcgggcggcggcggacggcaggcgagccgacgcaggagcaggaggagggggagccgcaccgcctgggagggaagccggggcgaggcgaggaggtggcgggaggaggagacagcggggaaaggtgtcagataaaggagggctctcctccggtgtggaggcatcatggccgctaaatcagacgggaggctgaaaatgaagaaaagcagcgacgtggcgttcaccccgctgcagaactcggaccactcgggctcggtgcagggattggctccaggcttgccgtcggggtcgggagccgaggacgaggaggcggccgggggcggctgctgcccggacggcggcggctgctcgcgctgctgctgctgctgcgccgggagtggcggctccgcgggctcgggcggctccggcggcgtcgccggcccgggcggcggcggggcgggctcggctgcgctgtgcctgcgcctgggcagggagcagcggcgctactcactgtgggactgcctctggatcctggccgccgtggccgtgtacttcgcggacgtgggcacagacgtctggctcgccgtggactactacctgcgcggccagcgctggtggttcgggctcacgctcttcttcgtggtgctcggctctctgtcggtgcaagtgttcagcttccgctggtttgtgcacgatttcagcaccgaggacagcgccacggccgctgctgcctccagctgcccgcagcctggagccgattgcaagacggtggtcggcggtgggtctgcagccggggaaggcgaggctcgtccttccacgccgcaaaggcaagcatctaacgccagcaagagcaacatcgccgcggccaacagcggcagcaacagcagcggggctacccgggccagtggcaagcacaggtctgcgtcctgctccttctgcatctggctcctgcagtcactcatccacatcttgcagctcgggcaaatctggaggtactgtaatgggtgggggaaaagggaggcttgctgctgctactacatccccactgctttgcttttgcacggaaatctttcagggttgctttggtagtaaccctagtcacactcttccagttttttgggtttcttttgaactggggcttgcatttttaaaat

SEQ ID NO: 11847 - DNA, 6000 bp, Homo sapiens
gagacagagtctcattctgtcacccaggatggagtgcaatgttgagatcagggctcacggcagcctcaacctccccaggctcaggtgatcctcctacctcagcctcctgagtagctgtgactacagatgcacaccaccacacctggctaccttatgtatattttttcttttttctttttttttttttaagacagtgtcttgcaaggccccctgggctggagtgcaatggcgcaatcttggctcactgcaacctccgcctcctgggttcaagtgattctcctgcctcagcctccagagtagctgggattacaggcgcctgccaccacgcctggctaattttttttatttttagtagagacagggtttcactatgttgaccaggctggtctcaaattcttgaactcaagtgatctacctgcctcagcctccccaagtgctgggattacaggtgtgagccacgacaccgagcccttacgtatatttttttctagagatgaggtttcactatgttgcccaggatggtcttgtactcctgggctcaagcaatcctcccgccttggcctcccgaagttctgggattacaggtgtgagccaccgtgcccgtcctgtatatcgcttcctaatacatttctacaaaagttgtcaacttaacacaataataatttactagcttatagtttctgtgcatcaggcatccatgtgcagcttagctgggtgcctccggctcagatctctcaaaaggctgctatcaagaggtcagccagggcttcagtcatctcaagggttgagtgagagaggctatttttccaagctcgcctcacatggccgttagtaggactcagtttctcatagctgatggaaggagagccttagttccttgctgagtgttggtcagaggcttccctcagtttcttgccacaggggcttctccttagggcagctcacatatgacattgtctttcctcagagcacgtgaaggagagctagaaggagcaaacagaatgaaagccacaatctttttgtaacctaacctagaaatgacatcctttcattctcgctgtattctattcactagaagcaagtcgatgctcaaggagaggggattatacaaggggcatgaataccaggagtcaaggatcactgggggtcaccttagaggctgactatcacagagatgtaaacaaagaattaaaaaacaaggtggtaatatatttcctagctctgtcttataagagaagctaaattcaacaatatcctgggcctggcatggtggctcatgcctgtaatcccagcattttgggaggccaaggcagaaggatcagttaagcccaggagtttgaggccagcctaagcaacacagcaagatgccatctccataaaaaataaaataaaataataaattaagtgatatcccagtagcaatgagatcatccagtacctaaatcttggtttctaaataccattccaggactccttgaagaaatggctgattttagggctgggtaaggaaaaatacaagataagcacagagcatcttatagttccagaaaaaaggagataatcaaaaaacaaaaggaccacatgaacctagttaaaataactcccaatggccaaagctgaaacaatttgagtaacagtaaaaatcatagtatacttatgaaacaaagtataaaataaatatacaagagtctatatgtctatataaataaatgatcgaatataaatcaataaatgaggaaagacaaatcttcctcacagaattccaaataaggcttatagattgtccactccagaagttgaagtttaatcccctgttccacttgagtgtgagcagtatttagtgacttgttttcaaagaaacgaatatggaaagtgggaaaatacatctttatagtggagtaactagcaaatattaccatgtgtgagcctcaccagtaataaggtggggtgatagcatgtatcctctgacataatgtgatgagaaggtcatctcatcatgtgatgttttccccaaaccctataaccacagtctaatcatgagaaaaacatcagacaaacacaaatcgagggacgttctacaaaatacctgaccaaacttcaaaactgtcatggtcatatcagggtcatgaaaaacaagaaaagactgaaaaacggtcacagatcagaggagactaaggaggcttgatgactaaatgcagtgtggcatcttagattagatcctgaaacagaaaaataaccttactgaaacccaaatgaggtctggagtttagtaaatagtaatgtaccaatattggctctttagtttttttgttttttccttttatttatttatttatttaaaaaatagagatggggtctcactttattgctcaggctggtcttgaactcttgggctcaaatgatcctcccagcttggcctcccaaagtgttaggattacaggtgtgagccaccacgcctggctggctctttagttttgtaagtgtatcatggtaatgtaagatgttaacattagggaaactgggtgaggagtagacaggaactttacgtactcttaacttttctgtaaatctaaaataattctaaagtagttaattaaaaacaaaaagcaaagcatcctgcttacaattttagaagcgtgatgaccagaagatctcccctagattagcttctggcttagtgcatttcaaactctctttctctctctttttttttttttttttttttttgaggcagagtcttgctgtgtcacccaggctggagtgtagagtgcagtggcgtgatctcggcccactgcaacctccgcctcccgggttcaagcgattctcctgcctcagcctcccgagtagctgggaacaggcacccgccatgaagcccgggtaatttttttttttttttttgtatttttagcagagacagggtttcaccatattcgtcaggctggtctcgaacttctgacttcaaataatccgctcatttcggcctcccaaagtgctggaattataggcgtgagccactgcgtccagcccttttttttttttgagacagagtctcgcttggtcgcccaggctggtgtgcgtggtctccgctgactgcagcctctgcctcccgggttcatgcaatcctcctgcctcagcctcctgagtagctgggattacaagcacgtgccaccacattcagcttttttgtatttttggcggagacggggcttcaccatgttagctaggctagtctcaaactcctgacctcaagtgatccacctgcctcagcctcccaaattgctgggattacaggcatgcaccaccgcgcctggcctcaaactttctttctcctccactagccacatacttctagggccaggtgccaagggacccatccctgtatcatagcactgagtgagttggcagagcatgtcttgctcgaagccaatccagcaccaggaaagacagcagtaacttatcacgaagtggcccaagttcaattcaactctcttttccccacctagatccccaaaatgtccaaggccactccagcgtatctagcatgaaaggaagtatgaaggaagggaagttggaaaggaaaaaaaaaaacaaaaaagacaggtcttaacccatgcctctttgaggggtgctttaagacattttccttttaataaataagtaggaaacaacatataatctcgtaaactcgatgctaaagttcctctatggactttggaaaggctggcgaaagccagcgtgcctgaaacacaagcttcattagcttagcagtaaataccctccggaaagatctcagaggaagaaattagtgccctttgacagaatcgccaccgtccattgctcccaccctttcggctccaaagctcctgctctttcattcagcctcagacaagcactcacttctcaggaagtattccctgagacattatggaggcgcccaggctcccacctcgattccattataatatttgattaagtttgtgtttttgtttagtttgtgttatctcctcgttatcttgtaggctcacttagggcgtggctcaaggcttttaacaacctttctgctgtcatagttgtcccccaacaagccgttgttgagtaaatgagttaatgctctgggtgaaggaggaaagccctcactaggaagagacttgtgccacccggggcaagaacatcagagatccagtgacagcccagcgacctccgggatcaattgcaatgggagggtaagagagacagccaatcagcaacagcctcttcaaaagccatacaaaaatacggacaggtttcctaccctacataggaatctttcatcacgcctacgcacattactacactgcataagttagctagaaatgtaataatcatattttcacgacaattatttgaaatccagagtgtcctagagtattcaaatctttagaaagcacgtgccccaaatgaatcggactgaacagacgctggaaccgaacatggtaaagtaaaatacttatccatgaggcactttgtaatccccgcactcctgctctgcctaaagagaaacatctcggatgtgaggtccgcataggcattagatctgccgggtggacacaggtccctacagcgtggggtgaaatgggctccacatgttaggttaacaaaagcttacgactcgcagcctttttcaaggtaatacacatctgcggctacattcagaatgtgggtgtccctaaacccctaaagcatgaagctgacaaaagcacttcccaggacaggacggtgaaggcacaaagcaaggtccgcacaaaagcacacgcccctctcagagctccgcgcgtgcgcacaccgactgtgactctcagcagccggcttgcggagcggttgccgcgtcctctgccgagcttcttgtgcccgcctccgagcctgaggaaacagctgattgatcagcctggctcaggcttggggcggggattggctgattggcagcaacgccacgggacagccaagctagaagcctgaggagccggagagggtgctggctgccgcgcggccgaggtgagtagggtgggaactcggaaaagcggttggctagcgggtgatgaagtcggctgcaggcctgacggcgatgggatgccctggaaacagtcagaacaggagctgaaggagctcggttcgggaacgcagggaggccggcgggatcctgggccggttgagtgtttgccccgcggccgggaggcagagactgcctcggctgagggcgcgtgggtcgggggctccggaggagctgagggaagtcggctgacttgccctgaaggctgagactcgcccacccgccaatctacccctacacctcctgccccctcccccgaccttcggtccatctttcggacccccggttcccgcgccggccgccaggcggcggtcctggggagaccgcccttcgcggcggctcccttgggtgctgcgcccttaacgggctcaggagccggactgcgcgggtgcaccgccagccggcctccgggaggagcagtgcgctggctgatccgccgggaagtttaaccagcttcctgtggttgctgtgtcgcttttcgcctcctagaacttcccagtgtatcttctgaccatgaccagggtttgcaggaaaccccaaagccggcctttgggcattaacaacagcagcattttattatggaaatcttcaaactgtggagaaattgaacgaaggatataaggaattcactgtactcattacccagtttcagtaattatcaatacgtgggcagtcttgctcccctaatccgggttattttgcgtttttgagacagggtctctgtcacccaggctggagtgcagtggcgggatctctacccactgcagcctccacctcctgggccccagcgatcctcacgcctcagcctccccactagctgggactacaggcaggcgccatcacgcccggctttcccccccccccccctttgtagagatggggtctccttatgttgctcaggctatctttgaact

SEQ ID NO: 11848 - DNA, 6000 bp, Homo sapiens
tctagtagcaaagaaaacagatcttttagaatgcctgtgctggttgtttgcaggtgaaagtgtgagtgaccatacgactgtggtagtggagaacatgtttctggggctccagttttaggtctcttaatggtcctgtcttggtttaacaaaattggaattgataaaagaagggctctcaaaagaaagaaaacagaaaaaagttctggaattaatacaatctattcagaacaaaggaggggtgtctagatactataaaacctaaaacatgagtttgcaccaagctttgagggaaaaaaaaagtcacactgataacatatgacattgacatagcaatttaaaccatttggggctttcatatttactatttcttttgatcctcatatcaactctagggaggtattattactttattaattatttattttatagaaaacttatcttcagaaaggctaagtgatttgctccaggtcatataaccagcaagaggcagtgctaggaagcactagatgttcagatacaaggtccagtgacttctccattcaaaacactgcctctctagcagaaggggattgcttaggttaagtgcttagaatcattatgtggcaaaaataaaacttcagctatacatttgaaaaaactgttatcagttttgaaattgaaaaaaatgttatcagtttctcccttagcaaacagttactctatcagtgatgtctgtaaatagttataatagatgattggatagtatcatctctacatgggctagttgactttgttcttcttggccacagataataatatccctatctcaggaggtcattttgcaaatgcaaattatgctaatgaagggctcaagggaagagtatggatgaatctgtataggtctatgaacgatttattcactagagcaaagtgcctggcacatagtaggcacacaataactgtttgctacatgaatggagaaaaaaatttttaattgatggaaaattagtagaatcaaattccttgttataggtatttcatgtcaatattaagatagctattaactggtctctatttgctgtcactcttataaaatcattagatattttctgaacacctactatgagcacagtgttatctagatgttatgaggaaagcagaagtgataaacataatggctaacatggtatgttttccacgtgctagaacttgttaagtgcttttcatatacgttttttcacttaaatttcactgagcccttataaaatccaatgaggtaggtactacacaaccttcattgggttgtatcaggaatctgaagcttagaactgtcttgtccaaagtcatatggctagtaaatggcaccaggattctaatcgaggtaaccagagtccagagttttaattctattccacttgactacctttttctattatcagccacactgtctgcccacaaagtatgtacaattttgataggaaaggttaaaattgcagtttttaaaggttcttgagcagaggaggaaagtaaaaacactggacaatttggctgtcatttgttgattcaaatgcttattgagtacctatgtactaagcatcacagttaggtctagcagtgttttagtgaaattcatttggcttccatgggctgatcagatgaggaaggaagaccagctaaaactgtagttatccagcagttctggagtcataatagtgaaaattaagagaaaatgtacagaatgctcattcattcagcaactgtttactgttctacctgaactgtgtacaaggctctgtgctaggtgctggggatatagccatgaatatgctttcactgaactgatgttatagtggggtatgaaggtgtggaaagacactaagcttcttgcacaaaaaaatcatttcattatcattgagataaggaccatgaaaagtatggagtgtccctaatacagtctgatgggtcagggaagacttccatgaggaaatggtatttaaactgtgctctaaaggatgaatgagattagctgggtaaagaagggaggaatgagtggaagaaagaggaaagcatgcgtgaaggccctgagacagggaatcacaaacctcatctgagacactagaaggccagcatggctggagtgggagaggtttgagaggagcctgataagactgatggaggccagaatacacaaggccttccagttttaattcctaaaataccactcaggctacaaagggaagattggattgaagagagacagaggtagtcgtacagaagccaattaggaggctattacagtagcctaagcaagagttgtgctggcttggactgagtgacagcaggggacatgaacagatcttcataatggcttggatatgcagtaggaagcaaataaatgtcaggaagggtatttaggcatttcctttgatggctttgtttatcaagatatgaacaactgaaggaggacctggcagttttctggaaaggttatgagttcagtatggaaaacactgagttccaggcagcagtgagtcatgcaaatagatttaaaagttggctacttgagtctgaagatcaagtttggaatttgaacttgagctatatatttggtagttaataataaacagataataaaggcaaagccaaataagtagatgagatcacctaggtagagaatacagtagaagaacatgagagatgaggattatatactgaataactaaaataattaaagatttgataaagaagatgactctatcaaggtgaaagagaaagagcagctcaagaggtaataggaaacctgaagaatgtggtgttggcaaattaaggagggagtcgtcaatggtgtcaaagcactgaagttcaaggaagatgagaacagaaaaataccattggggttagtgatacaaaagccgcttgtgatcttagaactgttttgtgaagcggaacaggtggataccaatctcagaacatctgacaaggggccaattaatattaacttctagccaccttttactttacaccttttactttatacagtagcattatctacacttatttctagctcaactatacggactctctagttcaactatatggagaaataatttacatagtgcaagtaattccactggccattccactccattaatttatgtgagcaacagtgttaagtaatttaagacgagagactataaatctgcttttccctcagttagtctttaagtctctcttagcactagcactttgctatgttgagtgtgattatagtgtttaaagatacagtatgtatttttcatacaatatagcccctcaacacaagccaatttcttcacctggttttcaaacagaatcagccatctgtttcaacgctggaaaaaaggcaggttgtgctgaacttactgagacaatacactgatctccaacatggtgttcttctaagagactttccagggtaattctgataatatgcatcttttgtctgaggtattgactagttcaagatgacacactgtagagagaccgcctatggatttacttggttgagggacttccagccaagacagactgtaccctagagatctggcatttttcctgcttaattctctatcctcctagattctggtggcagcctaaacctttggtaactacctgaccctgccttatttactctgaacttaatcttttacctgcccactttgcaggtctgctgcttctaaaattcttatttactggaaaaacgccaaacagtagacacttccaaggaaaactcaattaactgtacttactaaatcgtttttagtaatcaattatattttaaaaataatttatgtcttgactgcacaattaaattctatgctcaagagaaactacattatctgggttcatccagtaaagactacaaaagttgctaaatgcctaagacttactatgcagtaaaccaaatctcccattcctgcataattccactaaaacagaatgcagctaaacaagagcaaaagtatcttcttagaaatacaggtgtgttactgtgtctgcaaattaaactcaaacaaggtcacacacaattgtaacaaaaaacttccccaaattacttatgtcagctcctcttatgagcccacaggctgcagagaaccaatttggaagccaggagaatcctgccctctgctgctgagttgaggaaatcgcctcaacataattaatcgcttttgagaagggaagttacactctgggcaaaacaccagtgaaagtcaagtgagcaaagtaaacgctttcttggactcttgacatccgaattttctcaacagtttaaacacgcacaccctggcattcaaacatcaagaacagtaaatcgggtttcaaaacagaagtttttttttttttttttttttttttttccatttctccctaaattagagagctatcacctggggtggtcgtattttagctagcttcgagatccgagtgtctgcgtgcagtcccgacggggctgctaggcgcggggctgcccagctagggacaggacgcggcgctctccactgcccgcgcagccgcgatcagtcaaagcccgggctccggggccggctgcgaacgttggggaggttggagagggacgtttacctggggccggtccccactaggtaggtgttggtgccttggagggtcatgggacccgggttacagcccaacacacgcacgactcgattggacagccgctcgacgcgctgcagtacagcagccattcccgcctcagccgcccgccggcgtgtcgcctatctggatactccagcgcggaagaagccaacaggccggggatagcgagtagcgtccacgtgatgcctcgcaacccgggagggaggggattggccagcggctggtccaggtgtcatgtgacaccgcggacgagccggggcggggatccggcagctaggccggggggtggggggggcggtgcggaactagaggtcacgtgacgccgcgcgggctgcgcgggcagtggtgggaaggctggcgcgaggcgtgaggtggcgtgaggcgaagctggaatctgcctctgtcacgggggctggtgcctcacgggtttgtgtcctagacaggcgagtggatccaagtgggcgagagacattttaatctggaagagtcttgtgatttgggagacaggtttggtaaccgttcgttattcagtaataaatgtcaggaaggattgccagatttttaggcagtggctctgtgtgtgtgtgtgtgtgtgtgtgtgtgtgtgtagtagtagtagtagtagcctgttcattttttttttttttttttttgagacgaagtctcggtctgtcgcccaggctggagtgcagtggcgcgatctcggctcactgcaagccccgcctcccgggttcacgccatcctcctgcctcggcctcccgagtagctgggactataggcgtccgccaccacgcccggctaattttttgtatttttagtagagaccgggtttcattgtgttagccaggaaggtcttgatctcctgacctcgtgatccgcccgcctcggcctcccaaagtgctgggattacaggcgtgagctaccacgccgggccagcctgttcatcttttataataaatagtggtaagacatatttacttagtacttcctactatgcctaagtgctttcaacaaacatccgacttaacgcccttaatcctcagaacattattaagaggtggacactatttttgttacaaatgaaaaacggggattgggcagctgcccagatgacagagtctgcgtgtgcggccttgctcctacctgcctcgcactaacacttgtccccctcagtgagattcaaggagcatgcctctgcctgccagtgttacctgcctgcccagagagctaggctggtcttgtggagccgttttgtgcccaagatggaagggactcattttctctgtaacaagtcggtttcttatcagccaagtattaactatccagtgttaactacagcttcccataaaaaaagttgagttataaatt

SEQ ID NO: 11849 - DNA, 6000 bp, Homo sapiens
attatctcattagaataagttaaattggtatcattttctagaaaacaatttagcagtatgtttatattctttgacccagtagctttacttctgggaattagtcctaaggaataataagaaattcacagtattaggtgtaaacacttctcataaaattattataatagggaaaaactagaagcaattatagaggaatgactagatagcagtgacaaatccatggaattctgtacactttgatgaatatttaatgatatatgtacatactcataatccaagtaaaagaaaatacagaattatagatggaatattatactattgtataacgtaatatttttaaaaatgggaaatgcatcaaagttctaattattatctctgcatggcaggataatggtgatttgtgattttattgttattaacatttatcatactaattagtaattgttatttcaccatcagaaacaaacaggccattaatttttcagcctggaggcattagagagaggtcctcagctccacatcccctatggtattggtcccttcggaggcagttcactggtcgtttgggccagcatgtgatttacatgaaggtctgataagccaaggaggagagatcatgaatagtccgccaggatgggtccccacggggaaaaagacccaaacaaatgaatatccaccccttcactgctgtgacctgtgagcaccaggagatgaggtctgcttgctgagggagagtaaaagttaaggcagaaaagtgtatctgaaatgagaaccaggttctagattctaagacgtcgctggggaatgagtgcctctcctatgggctggaggctagagaaaatctgagcttcagcatctgggagagcaggcctgagggatcagtgttgaggactgaagtcaggatctatggccaagagtgcagatttggctagagaaaagagcagggcaaaatgagttatagagtggtggactgtactgtgtgttgatgtagagaggaaaggtgaagaactgggtacctgcctcaaaaatgggccgatgtctcctgggttccgttttgagttacttccaacacagtttttgagcagcatgggcagtggtaatgctaaagagagtgacacatatcaaaggcaaccagaggagcagcagtattggtgtggggagagggatggagttggaggaacagggatggggccagtggagaggcacatgagaagcagaaggaaggaaggtgggcttcctaaagtagaaaggaccatccttctcaagaatgattacaaggcactccaaggaccccttgtttcaaatgcagtaatttcggggagagagatggagggctggaagtttagcaatgtatttactggagactgagctagagaatgtaattgtgttaccattacagtgactcattctttactttgcatttccaggctggcatgtcctggcaaatgcaaatatattgaaatgtatgaagaataatgaggataaaacatgtaagtgtctctgtgcctaacagtaatacaataagcaaggaaatattttgtgatttatattttatgatctgtttagaaagtgttttttaatcctcagatatagctatagaaaattctcctctagtctctaaaattttatcatttccatattgaataattgcttttagaaaaaattttatttgttataaaatagagacccatatatgcacttaatttaggactaaagcaagtttgaataacaatataaaacactagaaataaaatttaatttgtgtaacacattttgaattataaaattataattatgaaataaaagtgacttatttaactgggttagtacataaaaatacagaaattcatccactcatcattattaaacatttattgaccatctgctatatgtcaggcactggtcaaagagccagcatttgagcaggaaccaagcagataatgtcctgcctaatggagcttatattctcatgggggcaagggttagtgatctgaaaatttttcagatattaatgagctcttcagggatttcaaagtagagtgatgtgatagagacttctgggtggctcctccagatcttgaggctgaagaaagccccttggagaaggagtctgctttgtgcacatctgtggcagatatggcagatgggggtgggcattcctggtggaagtggactggctggaatagggaggtgagagtgggcagagaggcaggcagaggctgggaaccaggcagggagaggaggcaggacttgttctgactgctgtgggcaggcaatggaggggttaaaacagaggtattatgctatccaatttctatttttaaaaaattactctagcccctgtttggaaagtggagtctagggtagcaagaggggaaacagagaacatgttgggaggctattgaaacaggtacttgagaggtgctgatgccttggatgagggctgtggaactggagatggggaagtaaaggctgtaagttagaaatgcctgtgggtgtgctcctggaagctagagagaagacacaagggaaggagctagcctcggggtaccaccaatggtgaggtatccagcagggggagagggccatcaaaggaaactgataaaaaatagaaattacaatggagtctctccaagatgagagataagaatgtctcagaaagcaagggatgagacatcagttcagccacatttaggccaccactgggcacatgaattaactcgaaactagtagttaagagtacatagcttcacaacttggcccaacttgtgaagtttgggcttcaccagttatcatattgatgtcaaccatccaaagatcataaaaggatggttacaaggaggagttaagatgttcaaacaagtgattttacttgataacaatttagtgcaattatgtataacaagtaattttctatgatgaagtataatcttaggcacaagtgatgtagtggggagtagaattgtttcatagaggattagaatgagaagaagtatgagaggttatggtctaacacctctttcatttgtaaagataaggaaactgagacccagagcattgaagagaatttgttcaacatcatatagtagctaattaaatattcaaagctaggaccttggtccatgtttcttagatcaagtatgtccttaccactcacacacacatgcactctcatcagtgcatgtagcacataggacaatatagcagtagttgatgattatttgctttcaaaactgacttaagagtaatcctgaaaaacaaactctcttgaagcattttcaagctttatgtgattcataaaatttcagtcaacacttctttttcaagaagttccgttagaagtgagttacatttaaccatagaagaagaaaaaaatgtattctttctgaatcaaaaaattagcgtaatagatatctgcactagagtttataattttcattagagacaagagttttttctacaatgaatattattagaattttctgttgcccttttatttgtgcttgaacataagctagagtagacatagataatatccgatttggaatttacatcagaatctggtatcaggcaaaaacaccaaggaagaaatatttaatattgtatattataatgtcaattaggatcaacttagtataattttatctgtagttcttgaaatatttgtaaaatatttcagactacagagcactatgtttatgtgtgcacttatgtaaaccatttttcattaaagtccccagtcgaataaagcattatcatctagacatcttcagtgctgccacactgcgcagacccaggacgtcgttacgttgaagtccagcattcaggggctgctgttcacgtggaatattttcacagctctccctggagttgtacaaactgtggctctggctgtcttctttcttcttatgtaaaagatcctgaaaacctaaaatagatttttgttgtaccttctaaagtgtaatcacttaataatatttcaaaaaaatttggtgacttttctgaccacagggttgggataaaacaacaggaaaaaaaaatcttcaaatcaatgaatagaaaaggattagagcaggtaattgttggagagaaaagataatgactcttaaagctctccaaatcacatctcttgaagagtagatgttgtactgaaatataatcccctcagcatgaagggtttagcattcgagtgttcttgcttaaatcagtgggatttcttcctccaactgatgtgcttaaaaaccgaactctaaactaagttaaggaaaaagtttaaaacagaatctagactttaagcaatggaattaggataacatgaagattttcctcatattttttcttatttatgctcaccaagtagtattttttaaagcctaggtatgcaatttgtttgcctcttcctgaaatttctaagacaaattatgcctaacaaaaggttagggatatgatctcttatgtatgcaataaaaataacactcataataatagcaaccaaaaaaatagatagcactttctataggcaaggcactgtcctaaatacttaaaaaatttagtaacgtattaatcctcacaactgactctatgatgtaaggtttattattagtctcattttaaaatgtggttacggaattcagacatcattaaattaaaaactgaatcattctaaaggaaaatgaaggcaaataactattataatgagtaaattcagaagacaagtggtttacgtaacatacaggattttggtaattaaaaacatataaaagcaagacaggcagcttatctcactgaaggggtaacagaaagacctcaggtgaaatccaatgagatcagatttgtcagaaaaaatgattttgtctccaatcagtaatgacctttcagcctgccctagggttgagggaacaccttcaaaacattgactttatcactgacctgatgaaaataatgggctcagtccatgaatcaagacatgtatgttgagattgctctaaatttatgaatcttggattgtagggagtagggagcactgaagaaaaggaaaaagaaaatctatgtgctatccattttgaaactgagacccatcttttaatcctcagaatgttattagtattttcttatagatttctgacaattatgcatatggatgatgttaaaatatcatttttaaagttgatcagtattacaagatagatacctgtattaattttgccaatacctttcacaaaaagtcttttgtaataaaaattatctaaacaagtctcttaaatgtagatagggtcaccgtattttcagatgctcccctgggaacagagttgactcactgctttcaagcttgcaactcttgggtatttgtgaccccagcacactaaagttcggtatccgaatctgccaacatctcccttgttattttaatcacctatgatgtttgtatcttgcaatatggacttccaatgatctgtattttctatgatgagaaagactcccttgccatgaggactgcccatgatctttttaggaacaggaaggcagagaggatgtgtgtagcaaccggctttgctgtttactgcatggcacactgagctctttacaatggactatggaagggataccttctatttcatagcaccttttaagtgtattgttctgccaattgcaactttttgccttatattggtgatacatgagaataaaaaagatcaggcattggctcactccagtttggcttaaaatcctaggtagcccacttgctgcccaaccttaagaaacccattttttttttctggatcctcactttcttcgttttcaaatgggaacaataggatttgtgacaaggactaaataactattaatcaattaattaatatttttgcctgaaacatgttaaaaaaatccttaaacgcaaactgttatttaaaatagaaaaagtaatgccagctcgctcactcttgagttcaagtgaaatagtatatagaaacctaaaaactccataaaaacttcagatac

SEQ ID NO: 11850 - DNA, 6000 bp, Homo sapiens
aattacccctgaaacttacaggcttaaagccacaataaacatctctaacactgcacagtgtctgtaggtctggaaatgaggagtggcctagctgagtggttttggctttagctctctcaggaggtagttggtgctgctgtcatctgaaggctggactgtggcatgaggaacccccacttccaagatggctcacttacatgactgacagtgtggtacaagctctttggcaggaggtctctgcttctcaccatatggatctctctttagcactgcttgcttctcccagagtaagtgatccaagagagcaaggttatacaatgtgttgtgtgacctacatgatatttgcacactgtcattgcacaatactttattggttacacagtcagccttatttgatgttggaggggattcacaaggacatgtacaccaggaggtaaggctcactgggagctatttggaggccagtcaccatagtgttctcccattaagaggtacgtaatattgttttgtctctttgtgatggtagcaaccattgatgctcaatgcctaagtccaccaattcattcgatgttgaaaaatggttatattctattattcccttttcacttattaactgaaatacttctaaaaatagagctaaaagcacaagaaggcaagagaaatttgcccgtctctgctatttggtaaccgagcagttcagtttgtatagaaaagtcagtataaatgcttgattctgtccttttatttgccagttttaaaaatagatttggtttcctagcatcatctattgataagtagacttaaaaaatacgttatgaggcggggcgcggtggttcacgcctgtaatcccacccctttgggaggctgaggggaggattgcttaaggccagaagttcgcgactggccctggcaacacagtgaaaccctgtctctaagaaaaaactaaaaaaattagctgggtataggggtatatgcctgtagtcccagctacttggaggctcaggagggaggattgcttgagcttaggagtttaaggttgcagtgagctgtgatcatgccactgccctccagcctgggtgaaagaggtagatcctgtctcacaaaacgataaatacatataatgttatgagcttatggatttaaatatattaaagtatttcaacttattgcagttactatcttattaatgttcacatagttatggagataggctaaataatggcaaaaaatgttcaccttctaatcactggaagctgtgaatattaccttacatggcaaaaggaattttgcagatgtgattaaattgaggattttaactcggattgtgctgaattacccagctgggtccattgtaatcactggggtccctataagaaggaggcatgaaatcagagcagaaggtgatgaaatgggctgggtgcagtggctcaggcatgtaatcccagcactttgggaggaggaggcaggtggatcacatggtcaggagttcaagaccagcctaaccaataaggtgaaaccccgtctatactaaaaatacaaaaagtagctgggcgtggtggtgcgtgcctgtagtcccagctactcaggaggctgaggcaggagaatcacttgaacccgggaggcagagattgcagtgagctgagatcgcatcactgcactccaagcttggcgacacagggagactccacctcaaaaaaaaaaaaagaagaaggtgatgggatgatggaagcagagattgcagagactgaagcgatgcattttgaagatggagaaatacaaggattgtagctctaaaagctgaaaaaagcagggagacagattcttccccttagtctccagaaggaaccacctctgttgacaccttgactttagtacagtgaaactgatttcagacttcagaccgccagaactgtaagagaatatatttacagttttttgtttgttttttgagatggagtcctgctgtgtcttccagactggagtgtggtggtgcaatctctcggttcactacaacctctgcctcctgggttcaagcaattctcctgcgtcagcctcccgagtagctgggattatagatgcccaccaccatgcttggctcatttcttgtatttttagtagagatggggtttcaccatgttggccaggttggtcttgaactcctgacctcaggtgatctgcccgctttggcctcccaaagtgctgggattacaggcatgagccactgtgcccagcctatgttgttttaagccacaaaatcttttggcaatttgttacagccattataggaaactagaaacacctatctttgctcagtggaaccgtcttcaaattggttatctaatataacaaagtgttttaggctcattttgtacattttctaccccagactccaaggagtcctggttgcttatagtgggaaatggtattttgagaccactaagggtgttcatgggtggttgtcttttttttttccatcttttaaatttattttaaaattgtgttttttaaagaatttaccatcttacccagttttaagcatagagttcagtggtgttaactatattcaccttgttgtgcaacagatctctagaactctttcatcttgtcagcttgagactctatgcccattgaacaactccccatttccccctcctcccttggacttttgcctttttgaaaatggcagggccaagagccacggctcaaacctgtggtcccagctgagcccaggaatttgaggctgcagtgtgttataatcacacctaagaatagccattgcaccccagcatgggcaacacagtgagactttatctctaaaaaaatggaaaaaatcacacttctgttgtaaaatatttttaccaacgtatgattattttcttcttaagtgtgcagatttttaggccaaaactccatgccatttttggctgctaaccctaagctatatcctgtaaaggatttcaagtagcaagatatctaaaggaatagctgtctttctaaaatggagtgagagttttgaaatgaaatacatgtcataacaaaaggatgacatttcattattaggactcaaaatgttctcttgagctctagcttgttgtaggtgaatacattattaagactggtggagtccctgcccacagcacagaattacagctagtgtcccctgtttggggtcttatctggccctgttctgtcctgtaactaaacctgctgctgaaaagaaatagtttccatgagactgtttacttcagatctataggtgcagctctctgggccatgataatttgatttgttgttgttattgttgttttttgagatggagtctcgctctgtctcccaggctggagtgcagtgacataatcttggctcactgcaaactccacctcctcggttcaagcaattctcttgcctcagcctcctgagtagctgggactacaggcacttgccaccatgcctagctaatttttgtatttttagtagagacagggtttcactatgtcggtcaagctggtttcaaactcctgacctcaggtgatccgcccaccttgacctcccaaagtgctgggatttacagaggtgagccactgcgcctggcctgtttgtttgtttttgagaccgagtctcactctgttgcccaggctggagtgtagtggcccaatcttggctcactgcaacctctgcctcctgggttcaagcgattctcctgcctcagcctcccgagtagctgggattacaggtgtgtgccaccatgcctggctaatttttatatttttagtagagacggaatttcaccatgttggccaggctggtcttgaactcctgacctcaagtgatccacccaccttggtatcccaaaatgctgggatgacaggcatgagccaccgtgcccagctgagaatttgttttataaagcaggaggccccatcctctgggggccgtggaccagtaccagtccatggcctgttaggaatctggttgtggcttgttaggaagtgggctgcacagctggaggttaacagcaggtgagcgagcattaccacctgagctccagctcctgtcagaccagcagcagcattagattcccatgggagcaggaaccttgttatgaagtatacaagcgagggatctaggttgcgtgctccctataagaatctaatgcctgatgttctgaggtggaacagtttcaccctgaaaccatccctccccatcccctcagtccgtggaaaaattgtcttccatgaaactgatccctgaggccaaaaatgttggggactgctgttatacagagctgtaggagagaagaataatgcagagggaaaaggagtgcctgtctgttgagactttcagggggacctagggactggttttgttacagttgactgggaattgtcttgtttattttattttatttttcatttaaaaaatttttttgaaatggagtcttgctctgttgcccaggctggagagcagtggtgccatcttggctcactgcaacctctgcctcccagataaagtgaagctcctgcctcagcctcctgaatagctgggattacaggcatgcactaccacacctggctaatttttgtatttttagtagagatgtgtttcatcatgtcagccaggctggtcttgaactcctgacctcaagtgatccacctgcctcagcctcccaaaatactgagattacaggcatgagccaccgtgcctggccaaagtgtcttgttttatttttaagtctttgatcactctcatttacagtaagtgtttgaagagtacattctaaatcatttttctctcttcctttacaggaagtgctcaaatgttgagcacacacacacaaaaaaagaggaaacagttggataggaactcagaaatcatgtgactgatgactaagttaaatcttttctgcttactgaaaaggaagagtctgatgattagttactgatcctctttgcatttgtaaagctttggagatattgaatcatgttaccatttctgtttttttccaccctgttttcttccatatttactgaagctcagaagcagtattgggtctgcaactcatccgatgcaagtatttcatacacctactgtggtaagtaaaaccgcaaaacaaataattgtagcatcaactattttgagggtaagttttcacgagaaccgtacactgttgtggctggaacacacgaaacatcagtgtgttccagctgctgtggcggacgctgccagcaggaaaagcaatagctggcagctgccccatgagaatgttctcgaccactcacagagcttgtgagtctctaaactgtgttgtgcttgacctccaagtgcttctgttccctgcgtcatctttctctaccctgagcccagtttttggttctgcccatttttaataaaaccatctgcttctgagctttcacctcagccttgacacttactagttcttcttcttgagatggtagagcagtcccagctgcttcctggagttgatttctgctctaagctgtgactcttgagtgctcttggaatcatccccctcactggatgaaagcctggttctgtcactagctgtgtgaccttaagcaaagtactccagcctttttagcactgaagtgaaagtgattttatagtctacttgataagggtgttgtgaggtgaagttttttagcatagggtcacatagagacaataatactcttaatttttttttggagtcagccataccctaatactattcactggctgtgtcactgtcccctgccccagctgctcattagcaagtgtcctgggatctgaaggcacagtgtcaggcctgacagctgttttggttcggtactttccaccgtgctgcttaccatgggttggctgcccttttccacccactagcaatagctgggaggtttaaagtggtgcttcccaaaataccagttctttgagattcttttgggaaaataggatctatgacctaatcatctgggagagatttacagatgtactttgggttct

SEQ ID NO: 11851 - DNA, 6000 bp, Homo sapiens
attttttctattttttagtagagacggggtttcaccatgttagccaggatggtctcgatctcctgacctcgtgatccacccgcctcggcctcccaaagtgctgggattacaggcgtgagccaccgcacccggccgagttcaagtctaatgttactgtcaaagtaaatatttgatgaaattgatttttaaaaatactacctacatccgttaattcaattccatttgataacacagcaggatgtgggtgggggaagttcagagggtcagaaaattagttaataaatgactaatgagaaaatctcccaggaaggcagtatactaaaatgcttttgcttttctcttccctaaatcctcctcctcctcttttcagcttgatttagaaaaataaggttcttaggcaactgttattgtatgtataatgcaatgctcacagtaggggttctgtttaaaaaataaaataaattgaggcttgtgggataaacagagtgagtcacacttctcccagatttctcttccaggcacttcagtgttgtctccactgtttggtttgtaaactaagatgctgagtgaaatctcaaggggaaccaacttcccagcttcaatggtgtccaactaatgttctccctggactcaagctgtaaatcaactcatggagagaaggaaaaagttagttacagtaattgctgccaagatagcgagtagttttcaacattatcaatttaatgtaaagattcagctcattaaatttatatcaagcctttcttatgattagaacaagtttatttccagaaaagttcaattataaaactatcaataggatttactaatttcaataagtcattttgcttcagggtgaattatactaattattaatacatacaagtcccatttggacataaagaaaaccctaggtagagaaaaaataataataattaactaatcattgtttatttttaaataactaatttaagaagaaaacaatgaagtgtgtttgttccacacttcagaaataactctaacacactggcaaattcctgagcaatacagagctcactgctaataaagaacaccaactctccctccttggaatgactttccttttgaataaaccatattagacagttctattaaaggacacatgatcctttttatttttcattaatctataagaatttaaacatggcaaaataatcaaaatgttaaaaagtcaactattttttcatgtgtgattattttagatgcatctctaaatatcttcagctataactactttatatcctaaatttctaaacatctaaaaaaattcaatggattttatctctcacatttcttttgtaatcacctgaggtcagatcaaaacaattaatttgaccttaacaatgtttctcttatctcactaacttttaataattactttaggattctttcccaggcacttgattatgaatagcagaaaatcatatgactgtgttagatggcatcagctaatcctccaaagcaactgcttctctctggtttggaaagaaatcaacacctcaggcctcctcacagagataatacacactaggctataacccacaataattaaaatttctgttagcaagtctgtgatttccacagctccagcttactgctggctgttaaagataacaaaaattaacaagggccatctactattgtgagctctactcatttaggttctttgggaatagggcaggatataaataaataaacactggtaaacagcctaatacctgctcccaacacaagctaagcaaaggaggttagaagtgtcaatatggtctcactggattcatccattttgaatcattttcaacactgtattatttattatttcacaaattgtttttaactgtctaccacgtgaatcatgaaaccaaccactaggaagggtataaagatatacactattcattctctacctttcaaaggtttaaatgtattggaaacactaaatatagtcatagtacttaaaattactatatatccatgatggcttagacagttcatacatgataacccttcagtctacccaaatccccacacgacagatactggttgtccttagtttatactgtgcaaatgtagtacctattctttgagtgtccacccattcccatcaaaaccatttccttcaggaaaagctgatctcacctccagacctctagggccaactctatctatatggttagacgaaacagcaaatgcacttttattattagtgccagtttgggttattttttcaaatttttgcaacaaagtgtgatccacaatacacaagatcatattcactcccccaaattaatattttcttaaagagatgggtgttatattttccttcactttctatttttcagacattaaggagaagcttggctggcatcacaaaagcctgaaacatcatcaaataaatatttgttgaataaattagctgaacaaatgaataagtgaataacatattgaatatgaaataatttttctgttcatatttcacccttactttcccatgtgaatatgcatgataccatattgtaatgataaaagaaaacaaaaaacaatttgataatggcacagccctttgaatttatttgtgttttcttagctgattgacaattttgcctactatctttttattctatggtaaatcatattgacctactctcttccctgtttgacattatttaaaaatcattcataactgaagttaggtggctaacacctagaaaatcggaaatagaaaagagtcacatatgtgacccttagggcagtagaatgagtgttttgttttcctcatagtcatcaaaagtgcaatcgatttcattcagcagccaactgcagttgttaaagaaactaatgccatgacttagggcccttgttctccaaggaagctgaagaatgtgtagagatgacacacagcctgaggggaaagggtgtggtggggagaagagaaatactttgaaaatattagtcacacagacatgctgaagatccttcacctcatgagtgataactactccagtgagaggtgattaactgttacatttaaagtgggaaatgcctatatatagagagaaaatggttatttatttccagaccctgccaacttccatattgctctcttgctgtgtcatagtcacagacctgttcaaagataggaaatataatttctaatcttcctgttcaagaaataattttattgatctccacttcatcttttattttccccatgattcagcaggtcaaaactgttccagttccagtagcatcctatcagtcagcaaaatgtccatgaggttaaaatgtcttacaagttaataggaggtgaagaaattcatttcagcaccaaggagagtgccctgctattttcaattggttttatgtatttgaaactgtgtattgttcctgaggatagaaaaaaaagttgaaatgtgattggacagaaagctgctaaaaacctattttaataagaagaaaaaaatacattcatttttctgaaattaaaaacttgccagggtttcatacctgttcatgattgcaacaatgtgctcttcttttggctttcaaacgtcggaattagcaattctttgcctatttttctaatattaaaaccagtttctgcatggaattagactggctcaataaagttacagaagagttaaattagcagtaattaaaaacttcatgcagcaactcctaaactttttctcaccattttcagagctgtgcacatggtaaatgctcaatacatatttaagtcaagtgaaagagaacaaatgaatgactggcatccattaagtgagaaggaggaactaataaatgccttgtttgtaatgaaagtcattttttgcaactagtctcaaagatcctcacatacgacattgctcaatccgaaacttgaacacagccttcctgggcctacataaacgtagtctctctggatctcagaaaaataatgacccagaccacacctttcatctcttctaagttttccatgtaaagcattctccttagagccctggaaaggttactaaaattttgacccacttaatcctacaccttcagggcaacatggcattcacctgtggtttccttaatgcccaaaccagccagccaacctgttttctgccgtgttaacaaatggacaggacacaggcaccagaggttaaactttcttcctcttcccccatgtccccaggtggaccattattaccatccctattcccaagcaaccaggtagccccttcctctgtgccaagggaagaaaacaccatgcttccctctcctgagagaccttcaagagtttagagacgcctaagtccagctgtgctaaaagataaaggacaataatgcaagtctgctctgagctgccaccatagccagacatagggtagccctgaaagactagaaccaaggacagagccaaaggtgaaagaaaatatgaaaaagtgaaaacacagtatttaaacagaattttccaacagcctgcatatagtgaggacttctcaagcttctgaatccttttccattgaattgtgcaatggcacatgtatgagcaaagtcaagcctcctggctcccaggtaggcacagcccagttcttagctcctaggaagcttcagggcttaaagctccactctacttggactgtactatcaggcccccaaaatggggggagccgacagggaaggactgatttccatttcaaactgcattctggtactttgtactccagcaccattggccgatcaatatttaatgcttggagattctgactctgcgggagtcatgtcaggggaccttgggagccaatctgcttgagcttctgagtgataattattcatgggctcctgcctcttgctctttctctagcacggtcccactctgcagactcagtgccttattcagtcttctctctcgctctctccgctgctgtagccggaccctttgccttcgccactgctcagcgtctgcacatccctacaatggctaaaacagcaatgggtaaggcactgcgcctcgttctccgtcggctctacctggagcccacctctcacctcctctcttgagctctagaagcattcagagatattttataaagaaaaagatgttaatggtaacacaggaccaggaaggacagggcagttctgggggaggtgggagggcagagaagaggtctatggaaatctaaagcgaagaatttcttttaaaaggtagaagcgggtaagttgccctcctatgggtagagaatttattctgtttccatatttaaaattaggactcaatcgtgaggggaggaagctaccttaactgtttgccttaaatgggcttaagggacattttggaaagtgctttataacgaccttttttttttttatttcttctctagtttaagaagaaaataggaaaggggtaaagggaaggtgggagaaaggaaaaagaaaattgcaaagtcaaagcggtcccatcccgctgtttgaaagatgggtggagacggggggaggggatggagagaactgggcacattttacggtattgtctcgtcgaagaaaccgctagtcctggggtgcggtgcagggaggtaagacggcgggggacagggtgggggtaggacctccgctcctttgttttagggcaagggaggggaaggagagaggaagtcgcggagggcgtggagggcgcgggtgggcagctgcaggggcggggaagcgcgcggcagggaggggtggagggacagcggcttcgaaggcgctggggtggggtttctttgtgtgcggaccagcggtcccggggggaggcacctgcagcgctgggcgcacaatgcggacagccccacccagtgcggaaccgcgcagccccgcccccccgcccggtgctgcatcttcattcgaaagggggtcgggtggggagcgcagcgtgacacccaggagcccaaccctgcggggacagcggcgccacgccccgcgctccccgctcccgactcc

SEQ ID NO: 11852 - DNA, 6000 bp, Homo sapiens
gtttagtcaaacttacctagaagaaccaacttctgcagagtctcagaatgatccacatagtctcgaagtgtgaatgaagctggtggcaatggagggtctgcaataatctgaatagcctcttcctctgaaattggctgcattggagacaatggaggcaattcatccagttctttgaaagagagaaacaaattagtgctctaatatgcacacttaaaactatttctgcaaagaccagctcttcccttgtttgcttctttcagtggttaaatcttgggatcattttagaattaaacatccaagtccctaatttttcaccttttaagaggtaaggttacaactatttagacagactaactactgttcctctgagattagaaatttgttggtaaatttcaaagcacacaatgcctttccttcacttaatcagtaggtgagaatgctaaaaatcacctaactttcaagtgaattttgaaacagagattgagtttaccatagcctgttaacttggctaaaagtacacatatgccaacagtctgaattgcatggattaaagtaatcatatcccgaaagtctttgttttgacccaatgccctcccttccaagttaccctcaaatacatctttaaaagggcttctatgattgtttctacaacctgcagtcctctctacaggagatgtgactctctagtacagccctgattctgaagttgtttttgtttttttaaaatcaaacgcagcatggaagacacttagaactacacattaccttaagctaaggaatcaggtctgtgatcttttgttctgttttgtgcttctcatcattaactatcctttctcatcatttatagccagcatctcctccctgccctctccccagctctctttccttcatattctacttaaccttatatcatttcattaccagcgaaatattcctagaataggacccataggaaggagaggattgactaaaaagcgaccatgagggaactctgtggagttaatataattgttttatttgttgattgcagtagttcttacacactaaatgcatatgtcaaaattcatagaactatatatcccacaagatgaattttacttgatataattataccctaataaaactaattaccactagaagaattttgttttaagaatctaaacaataaaatatttaaaaagcaaatgttttatatgtgtagctataaaataatcttacacgttagcccacaaactttttttcttaccagtaaaataaaggcatgatagaagttcatcaatagaactggtattattctttttctttcttggcacaaaatattacctgaaatgggctagcagaaggtaaacaggtagcttgttcaaatggccaaagtagggaaagggagacttttctgaaagttcagaattaccttctagaaacagctcagaatcaaagctggatatattttgtgtcttctgtgactgttcattcatggaaggaagcagactgctttgggcagaattattctcctgactacttgagctagtagactgggaactattccataaggaggaagtcctgtaagtcttaaatccccactggagaaagcaattgtcagaggatatctgaggctgagcagaaaagccatgtaacagtgttcttgctggtctagtaaaacgttttgtgagttgtgcagcattaatgaggctcctcaacttaactgagttaaaccatctgggtatctgttgggctgacaaagccatttttcttagtctacaaaggaaagatataaccgtcaaaagaagagaaatttaatttacttaaatgtttaaaacggtattcaaacaacaaaaagataaactggaaattatttttttctaattgaaaggtgtttaaatatatatttagtctaaaatagtgagatgtttcttatgtacaggaaaagccaacaacaaggcaatctcagttacaaaccaacagacaggaacttctgagtggaaaaataaagatatactttacaatttaaaaacaaaatgcaatgacactggtgtaagaaaaatgcttaaaacaaaaatctgcaaatgttcaagtgacagcagacctcactaatctgttaatttaatcatttaaagagaataagctgatgcaaataagtgttcttgaaatttggtgtgaagggtgtttccgcagcacattgctgatcaaagtaacactgaattattcaaatgcattttatgtatataaatttgtcccaaaatgaaaaaacagaaatctactgtgtcctaaacaaatcatcaaaatattatcattgatatacagaacagtgaaagcagtttcttgcttcattctcagggctgaacactgttgattacttcacagataaagctgttcttccaaagggaattgaacaaaaccagttttgtcaagttttgtttcactgtaggaaaggagaaaaaagccttcaaaaagaaaaggtcaaaactagtaacaaaaccaagtgacagaaataaataagcaaccagcaattaatacctgtatattttgactgaaaaagtagttttcaaaaatatttttatcaggaaaggctagtgctatgttaaactccaggaatatgaagggattttatatttagccagctaattagaaaggtaaatttgatgcatataatcttacgttaaataacattatccatataaaacacaggatggagtcaggatataagaaatgctcaataaatgttagccattattattggttacacaaccaaatacaaaaattctgctgaattaattgctgcctacaactttatactttgtttttctgcatactggaattcagcttgttttatgctctaaattagaccaaatacttgagggtctaatcttttcttggagatctgtagttttgggaagtttgctgaaagagattttacaaaagtgaaagtttcctttcattctgcaattatttattattattattattattattttttttgagacggagtttcgcccttgttgcccaggctggagtacaacggcaccatcttggctcactgcaacctctgcctcccaggttcaagtgattctcctgcctcagcctcccgagtagctgggattacccacgcccgctactatgcccggctaattttttgtgtttttagtagagacggggtttcaccatcttggccaggctggcctcgaactccttacctcaggtgatccacccagcttcccaaagtgctgggattacaggcgtgagccactgcgctcggcccattctgcgatgattttagaaaagaagtaagtattcacaataccctgctgggataggtggtttctgttagattttggtgggaaatgggactccaaatgtgccaagttttccctcaaacctacaacattcattctctgcacggtagtcataagggcactaaattgaaagtcagaagacctcggttgtgctaccttgacaaggctgtttctggcagcagtctaacaaaagcagcagtctagcccatgatgtggggggtgggggtggggtcaataactattcttcaaataatgcttttttaaaaggctaggggtacaataagatgattcttaaggcccctatcagctctaacattttttgacgtctaagcacttcatcctacttcaaactcctgaaatcccaaattcatcctgaagcctttccacactcaataccacttaaacatcaggaagactcactttcaaatttcaccccgtcattaaaagatctttgtgcatacaactaatgtttatccttgcatttttatttacaagtgcactatcttctccacatcctttcattgctgcctacacatcttaacaattgattaactgttcatgcacgagagcagagctgggtctcatccctggatccatccttccggggactattctccactttcccagagccttgtactgctctaatgtttgcggaatggaaataaatcaatggcaagtacagttaactcacttgcttacacagtatgcaaaagcgggtaggggatgtgcagatgtgtataaaagccctgtaaggtggtaacctgaagtcttctaacaaggtcctttcatcaggaaaattacagaaaacccttaaagaaactgaagtctcttaacaattcatatatactgttctcaatgagtgcctagtgcttcgctagaaaaaggcactgaaatagagttcaagatttctacctacgaaatgctataaatgaaatcaggagagaaagggaggttatgggggcagcttcctaataaagggtctctcaatacttcccaggccattttagcccacttcagttccccaaacttgcgcaggaaggcagagccccctcctgaggcttctcacactgcgctaattagccagcatggttgagttttcactacatcagccagggaaaaacacaaaacaaaaccaatcaccctctactgggccgcgaaaacctaaaggcccttgaggccctggggcgcggtctggacgcgggtgcgccggaacctgaaccctcgccaggagcgcgatcctcgtgctggggcagctcctgctttacctgtggcgaggcctgcttcccgtagcgggtgaccccgggaccgaccaactcgctgggccgcacgtcccgtcccgccgcgccgcacgccggctcctcagcccgccctacacagcgcagccgcgctcccgggcccacgtgggccgcgcccggagtgggcgagaccatgtgccgggttacgcggggagacagcgggctacgtgctctgaaaagagccagccaggggccccggctacccttctccggctcgctattcctctgaagtcctgtggacttggagtctgaaaattcctcgagtggtagagatgcctcagctaggatgacagcgtggggacggccggcggcgtcccctgccccaggccgcggtggcggcgccgcgaccccgccctctcgcgcctgtccttccctctgctcccagcctttgctgggcgccagacccggctttgccgtccggctattagcctactgtggctagtcacccccggggtcccggccttctcgggctggggccgccgccaccgcggcaggacggggaggcgggccatggcgtcctgcgtggggagccggaccctaagcaaggatgatgtgaactacaaaatgcatttccggatgatcaacgagcagcaagtggaggacatcaccattgacttcttctaccggccgcataccatcaccctgctcagcttcaccatcgtcagcctcatgtacttcgcctttaccaggtggggcggcccagccgagcggggggcgcgtccaagggctagggaagaggcgggagggagggtggcggggaggggggcccggcatggctctgggtgaggaagtgggctggctgctccacgcacacgcactggcagcccgccgcccacgcggcccctccgcccgcccggtgtctcacagtacgctagcctgctcccctacccctcagtgccccttctccatacagcgcctccggttacacggggaacgcacgcgagtcacctagcacgatcgccccctcacccaccgcactcagcatcgctccacacaacatcacgacgcgggcccctcctctgcactgctccagccttcgtccctacccagcacaccgcatgaatcatgtcgtatgcaccactttcagcacacaccgctacacatacaaagcaccccaatccacagcgcctgcaggcaccatacacaggcccaggacacaacctagatcccttcctgtggaactccggtattcggcactatccgtaacgcacaaaaaatgcacatgtgtgctgcatacacggtctttcctgtgcagcacttcccgtatgcattgcacacaagtcatccagcataacacttcccccagcctcaaacactaccatctgtaccacggcacaaactgccactctaaacacacacctcacagcggacctttcctttccagcacagcccaatacccatcatctgtgtacatg

SEQ ID NO: 11853 - DNA, 6000 bp, Homo sapiens
aatcagattgatttaatcattccccaatgtacacattattaattaattaattatttaatagacagggtcttgctctgtcaccctggctggagtgcagtggttcgatcatagctcactgtaaccttgaactcctaggctcaagtgaccctcttacctcagccacccgagtagctgggactacaggtgtgtgtgccactgctgcacctggctacatatttttaaagagcatgctgtacaccataaatatatacaatttttatttgtcaatttaaaaaatagtaccattttacataaaattaatcaaggttagactttcctgttcaactggatatatacaaatgcaatgcaaaataacttgaagatacctctgtggtaccttcctggattcatacatccaaatctataacattcaaatatggctctttggatatgtattttagtccataaataatgttttctttaaactttatctgattttagaatgaaattcatcatgtactttagtcacagattcatgacttgagaacaactcttagtttaaaaatgtattaactctaacaaggttcaagaaaattcatgtgcctacccagtgagtacctgagttgcagcaggtgatccatacatatttgttgactgaatgtcaaattttgccagcctttaaagaaccataccacactgttagaaaaactgacatgaagggccaagtgtgatggctcacacctgtaatctcagacccttcggaggccaagggggaggatcacttgagtctaggagttcgatgccagcctgggcaatatagtgagccctcgtctctaaaaaaagaaaaaaagaaaaaaaagaaaaagaaaaacagaagtaactgttttatctcctgtcttattttatgtattatacacttccttgattttcctgtgtcctcctatccaaaactgtaacaattttgttcaacattagcaccatatcattttatgaaactcaaatcagccaacttctctgggaaggggttgatggaggtgaataaagagaacagtggaaagtttgaggctgaaaatagactttttttttttttttttggagacagagtctcgctctgttgcccaggctggagtacggtggcatgatctcggctcactgcaacttctacctcccgggttcaagcaattctcctgcctcagcctcccaagtagctgcgactacaggtgcccgccatcacacctggctaatttttgttgtgttgttcttagtaaagacggggtttcaccgtgttgcccaggctggtcttgaacttctgagctcaggcaatctgcctgcctcggcctcccaaagtgctaggattacaggtgtgagccaccgcgccaggcctgaaaatagatttttttggattgcctgtagattttggtcatggcctcagctcacttgccagtattagcgatggctcattaatggttggctggatggatatcctattcctctcagcttctatcatctttcaagtgaatttcataagagccaatcctaccaaattgatttctagcctggactcctggtaacagtccagggggtgccaagtggaagaacaaccgagaacaacagaatggcatcttttttttccgctatcccctactctgacaactcacctcaggacagaacacctgtttatccacggttgtaatgtggtatcatttgttaccgtagtgacagagtccgatgtgtcagtttaggttaaaaactgtctttagtagctttcatttctattttttcacttgtctggttctctttattttttatttgtttttacatgtttgcatcttaatctctatgttgtttatttttaatattttctcctgagactcttgaagtgtggtaattattcttttagcaatcaatgaagctatttgggaagtgattggttaagctgtgcccctcaaagcatagccctcaaaacctgaggacttgaagtatatttgcaaagaacctttggttctagtcacaagctatacttagtgaattagatatactacacaaaattctgccaaattttagtccccatcagttttttaaacatttccaattagcaaaacacacaaacaggcctacatcgtttgcgaatttagacaaatcctgactaataccagcggacctcccctgacttctgtccccatccccactcagcatgggtgacctctttgtagccagctcttgtgtaagtgctttttatactgtcagattatccttcttgccacagctgttaataaatctgaacacaagatcttgaatatttgttttcatctccttaatattgtgtcactcaaaatggtaccaattcccttattatatatactctcaatggagtatttatcatctttaaagaaacaagtcactgagcatctcatcaacaccaagagccttggggtgtgccttcagggcagcaaacagataatatcccttcaacacgtgtatccacttattcattttttatcactgtctgcccaagctgaatcagagagcattcaccacgcttcttgttacatgggtgccccagtaaacagcaataactgtgagaaccagcaaatcagtggagtgcacttcctgttttactggaattccaatttatttgatgaatacttaactgttggggacaatggaggtgtggccttgcctgaaggctggcgagtagacgaggcctcttatgaggacagagctggtattttatggctctttgcatgtattttgcattgctgcttttcctttggaggcctttttaagaagtctccccatctcatgaacctcttcaacccacagactccatcttaaaaataagggcactaggctggtggctcacgtgtctaatcccaggactttgggaggctgaggcaggcagatcacttgagcccaagagtttgagaccagcctgggcaacaatggaaaaccctgtctctataaaaaacacaaaaattagctggtgtggtggcctgtgcctgtagtcccagctacttggtaagctgaggtgggaggactgcttgagcctgagaggtagaggctacagtgcaggccactgcactccagcctgggcaagaatgagaccctgtctcaaaaaaaaaaaaaaaaaaaaaaaaggctgtggttcattctttcaaaagctaagtggagcccacattggcacagatgccagctacagtgtctgtggaatcagaagcatcatctgatgttacaacttctggcctattgctctttttcttctttctcctttgcctactcttctatttctccatattacctttttgttggccaatgccttagacttgctcatgagcatttgtaggtttggtagctggcacacaaaaccaaaggaataagtgtctccaagtttgagttgtaattctccagttaaatttctttctttgagatttattacagtaataggttactaagacatttaattctcactgagggtatgactgtattttattctaatactgagttgaaaaattaccatggcctcatatctatatatctacattggtgtattttaaaggctcacaactcttatacggtataaattgagctttagagcaaaatttattcaagataatatttatcatgtgtctttatgtaccaggaatgagaatacaatggtgaacagacagaaaagtctctggtttcctgtagtgggcattccaggagcagaatggcgtcataattcatttactctataagtcagagagaaaaatgatggcacgaactgcaagggatttgtgtgtaaaatttgtgacagtaagaaaaagaaactggaagggaatacgcatttgccatgttctataatatgccacagacattgtaacaaaatatttcatgtcagctacttccatttaggaaatacatgttcattattttcttcaaactaagaattactttatccctcttttctttgaagttatcttaaatctgttattattcagggtctctatccaacttctcatcaaattaccctatttgtagcttccaaacgttaacacctatctgctaaaatggagcctataaaaagccttagtggcataaactgtgtgtgagggagaaatggtatttaagcccttaatgaagttaggagctttcaaactgttgcactttgggtttacaggatccttcctccatgtcccttttttgggggtgcggaaggatttgggagaatgggaaacactctcactatatatttattacattaattatcttctcttttaaaatgcaattttcatgaactggcgatttatgaacacttcacattgcttgaaagcatcttacactttttttttccctcaactcacaaagcagtttctttctactggtcgaattctcaaggcagaaaagctacatacgtctctcgtttcttcactaattgttctctagaaaagggaaagtgaagaagggaaagagaaaagacaacggggaagaaaagagcatagaggagagaggaaaagtggggagagaaaggaagaaaaggactgagaaaacgcaggagccctggcttgccggtgagcagagccggcgcagccacagcgcggagccgcggcgcccactggtcctcggagctgccaatcggcgtgtaatcctgtaggaatttctcccgggtttatctgggagtcacactgccgcctcctctccccagtcgcccaggggagcccggagaagcaggctcaggagggagggagccagaggaaaagaagaggaggagaaggaggaggacccggggagggaggcgcggcgcgggaggaggaggggcgcagccgcggagccagtggccccgcttggacgcgctgctctccagatacccccggagctccagccgcgcggatcgcgcgctcccgccgctctgcccctaaacttctgccgtagctccctttcaagccagcgaatttattccttaaaaccagaaactgaacctcggcacgggaaaggagtccgcggaggagcaaaaccacagcagagcaagaagagcttcagagagcagccttcccggagcaccaactccgtgtcgggagtgcagaaaccaacaagtgagagggcgccgcgttcccggggcgcagctgcgggcggcgggagcaggcgcaggaggaggaagcgagcgcccccgagccccgagcccgagtccccgagcctgagccgcaatcgctgcggtactctgctccggattcgtgtgcgcgggctgcgccgagcgctgggcaggaggcttcgttttgccctggttgcaagcagcggctgggagcagccggtccctggggaatatgcggcgcgcgtggatcctgctcaccttgggcttggtggcctgcgtgtcggcggagtcggtgagtgggccaggcggaggatgcgcgcgccgtttagggtgtttgaagctacgagaggagcccgcagggaataggggagcgccacctggggaacccccagtccccaagtatacaccggagatccgctgggacaaatgcgctcgtccggtcaccctttccccctcttcccttcctcagaaaagcgctgctcgctggcgttaccccgcggtccgcgggaatgggggcaccgagaattgcggtttggtctagccgcagaggcccctgaagtcactcccaacttcttcgccctcggcgggtcttgctgcgtggtctgggaaggacggaggggaaagggtggcaggaggggggagcctgggtcgggcccgcgagggaacggctccactccgcgcgctcctcgagaccagggatgacctggaaacttcggggtcccttcctccgcacaccatcccccccgcgccagctttcctgtttgactgcatgcaagttctggggagatgggggccagatttaagagacccgcgagtgtccagagagaaaagtttgcaaaagttcttttgtttgatgctccctgcggctagggcgaggtaaccgacactacgtggaatcgcagtaggcgatccctcaaggggatactgggggaggcacggaacgcgtccgaaaa

SEQ ID NO: 11854 - DNA, 6000 bp, Homo sapiens
gggacaacaggagtgtaccaccatgcccagctaatttttctacttcttatagagacggggttttgccatgttgcccaggctggtcttgaactcctctgctcaagcaatctgcctgcctcagcctcccaaagtgctgggattacaggcttgagccaccacactcagctgtcatttaatttttgtcacttaaatttaattacaaagtattttaggcatacaaaaagtagagataaggagtacccgtgtattcataactcttaacctagtttaagagataaaacattatatatttgtagctcccttgtatagttttcacttatcccatttctctcccactcttcctagaaataatcactatctcaaatttggtgttcattattcccatgcacggttttatattcttaccacatatgcattctactgaatgagtataccataactttcacttttgttatcactttcacagcctccatgcttcccccagcccccaccctgatgttcccttgaggtacaattgataaaatctaatttttagttccatacagattcttagcttatcttctgatctcctaaaggaaacatcttggcccttgcagcaacacatttacaaactagcttaggattctgagcatacttctgcaggcagcttagttatttactaattcttcctttattctgagaataaccctttccggactgtgtcttaaaattcttggcacactcatctatagttccctgctttaccataaaatcattctcctaggtgtgtaactctgtgacctggtcgtttacaatggcaagaatctacattgtgaagagacccaagccatcatgtttctttcaccagccatcacataagctgtttctgcaaccaggaagagggctctcaccagaacccaaccaggctgccacgtagcttggactaccagctccagaactgtgaggaaaaaaaccttctgttgtttaaatcacccagtatgtggtattttgtgatggcagccccagcaaactaatatgcacactaatcccaataactgactgcacagtatactgaaaaagaggagtgatcaagtgtcaagtgcagtgggaggtctgagttcctgtttgggctctgtcactcagactctagggcataacacttgaccctttgaagctcacttttcctcatctataaaatgaagggcattaagtagcacttcatgtccccgaacattttcaaactgaaagtatttaattcacaaattgtgagctatggctcaggcaattatagcacagcaccactactccatctcaggaggtaatcatggatattcacaaagatttagttacaaacatattcatgacagaactgcatttaatggcaaaaaaaaatcctgtcaataatctaactatacaataaagtatgttaaatcagagacagacaatatctcgccattataagtgatactttaagtgaatattgtgcaaactcattaaaaaatgtttttgtggccaggcgctgtggctcacgcctgtaatcccagcactctgggaggcccaggcaggcggatcacctgaggtcagaagttcaagaccagcctggccatggtgaaatcccgtctctactaaaaatacaaaaaattagccgggcgtggtggtgggcacctgtaatcccagttactcgggaggctgaggcaggagaatcgctcaaacctgggaggcagaggttgcagtgagccaagatcatgccattgcgctccagcctaggcaaaaacagtgaaactccatttcaaaaaaaaaaaaaagtttttgttaatgaacatcaaggatatagtgttgagaaaccttgttctttaaaatcatagtttggcaaaaactttgaaatctcatcattgaaaatggaacatctcactcttgtaggatctgagtcctatgagtcattttatttttaaattttttggggtacatagtagaagtatatattatagggtacatgagacattttgatacaggcatacaattcataatagacacataaaggtaaatggagtatccatcgcttcagcatttatcctttgtgttacaacccaattatatttttatttttaaatgtacaataaattgttgactatagacactgttgtgctatcagatgctagatcttcactctaactatacatgactttttaaaatctttttttgaactgctttattcaagtatgacagacacgaattaaacaatactttatataatttgataaattttgaaatatatgcccataaaaccattaccacaatcaaaataatgcacatatccatcacacccatgggtttcctggtaccctttagtaatccctccctctctcccatttctccttcctcccaccaccctccacccccatccccaaggaatcactgatttgctttgtcactatagattagtttgcattttcaagttttatgtaaatggaatcatacaccatgtactcttttttatctggcttctttcactcagcataatccatgttgttacatgtattcatagttcattcctttttatttctgggtcgtattccactgtatgggtcactcccagaaaaagcagtccttatttccaacccggtgcagagctgcaggtaaacggtttcatacacaacagcttaactttgtcatttacaagaaattagaattcccactttaggccagacttgattttaacttctttacatatggcaccacttcaatttaaaggtttttttgttttgttttgagacagaatctccttctgtcacccaggctggagtgcagtagcacgatctcagctcactgcagcctccaccttctgggttcaagttattttcatgcctcagccacctgagtagctgggattacaggcgtgagccacagcaccagccattattgtaatagtttaatttgaaaattcacaggtgggccgggagcggtggctcacgcctgtaatcccagcactttgggaggcccatgcgcgcggatcacgaagtcagggcgactgcagcctcggcaacacagcgagactccatctcaaaaaataaaaaataaaaaattcacagatgtttatctagaatggtcagaatagtcagtggaacttcttaggaaaatcatgacccttcacatctctagaaccaaaacacgtgcagaaatcttatttcacaaatataaatggaatttggaaactttgagttaaagcagatcccaataacatttgctaagtttttggcctcctaatttaatttagtctttaatcataagtcttggcaagtgtagtatgcttttattatttattatttacaaaactcccttccacacatgaatcacaatatgcattacgacactgttgcaaaataggtcaaaatacatttttggtatttggtggttattaatattacccctgctgtattccttgagaaagcctgtatttagttcacttaagacagttgcttacacgctaatgatcatttaccgataaaatacagagtttccttatagcaaaatataatcttaaaaccctaaggcagccttcaagcatttcccttataattaaaacctgaaggcctggcgtggtggctcacgcctgtaatcccagcactttgggaggctgaggtgggcggatcacgaggtcaggagatcaagaccatcctggctaacacggtgaaaccccgtctctactaaaaatacaaaaaattagccgggcgtggtggtgggtgcctatagtcccagctgctcgggaggctgaggcaggagaatggcttgaacccaggaggcggaccttgcagtgagcggagatagtgccactgcactccagcccgggcgacagagcgagactcttgtctcaaaaaaaaaaaatttgaaaaggcagttcgtttccttctatagctgcatcccagagatggtcaacatagcatataaaaatggaatttttgcaaaccccttttgcagtgttgtagaaaagcttaaaataaaacgtaacgagaaagctccctccataagtaaatacaatctaatgtgcttccccttatgtgttattaaagctacaaattagtaggaaaagaatagtgccgcccacgggctttccaacttttgaattctggggactaacaacagagagcaagagtgaatgagccaaacgacgcaaacgtgccctcgccaggctggcaactggtaggcacgcagtgtattagttgccctggagagaaacaccctggagagaaatacccaatttgtgaactaaacctaggtcccggaagaacagtgttcggcgtcagactccgttgagctcattctggaaggatccaactggcgccaccagggagaaaaagcgattccacctcaataacactccagaaaaaggcatgaagagccctatacctgccagggcgactttgacctagacccggtgacccggttcctagcgctgcagccctacccgccccccgcccgcccccgccttgcacggagcccctcctctgtactcattcgttgcgccacgtctcctaactctgcgccaccagccaccccgcgaaggcgtccaccaattaacccctcccagcttctggtctacagtaacgggtccccaacgccgcgtcttaaccaggcccgaaccgaccaccgccaaccttccctgacacgcctttgccccacccgaccccgcccgcccccacgtgacgcccacgccccgcccactggcgcccacgtgacccacggtcgtccccgcgcgcggcgtggatcgcggcccaagccgccattgttccgccgagggaggacagcggggcctggcgctggcgccgagacgccgcttagcggccgccactggagacactccctcccgcctcccgggtctcctggcggcggcggagtgaggctgacagcggggaacctgggagacccctccgccctccccgcggtggcagcggccgatccccggctccggcgcgagggacggccgcgatgcgctcggcctgaggttacccggcccggcccttcctcgcttccctcgactattccactgcgtctccgcgccccggcgtcatcctgcgagtccctctgacgggagggaagatggctgcacggagctggcaggacgagctggcccagcaggccgaggagggctcggcccggctgcgggaaatgctctcggtcggcctaggctttctgcgcaccgagctgggcctcgacctggggctggagccgaaacggtaccccggctgggtgatcctggtgggcactggcgcgctcgggctgctgctgctgtttctgctgggctacggctgggccgcggcttgcgccggcgcccgcaaaaagcggaggagcccgccccgcaagcgggaggaggcggcggccgtgccggccgcggcccccgacgacctggccttgctgaagaatctccggagcgaggaacagaagaagaagaaccggaagaaactgtccgagaagcccaaagtgagtatgggatgagcggcagtagagaacgggcgaagggcgggcgtggagaccctcgagcttgggggaggccgcgccccagccgggaaggaaaagagtgcttagtcgaaagccgagaggcagcactcccaagtggaggaggaggtgataggtggtcatgttatttggggaatggggggaactcaggaagtataggacgagtggggaagcccagtttcgaggaaggaagttaggaggtctgggggtccgttcagataggcgcccagaggtcaagccatctttgggaaccgtcaccgctagaataagcacagcatccttccttgaggcctgcagagtaggctgcatgtggagcgtaatgggaccttaaggtggtgttaggaagttgtataaagactgcgctcggaagacagatgtctatctcaagtcacattgagacagtaggcagtggaagaagtgcggtgacctagaaattctggggcttacacaggattaaaggtgtccaggtctagacgcgcttccattttagttgggactgttaaagggaaa

SEQ ID NO: 11855 - DNA, 6000 bp, Homo sapiens
ttgcctcctgagaaaacacttcatgaggaattgcatttgtaacgtgcagcaaaacttctaaaatcctttgttctccaattttcctctcaatctctcccctccccccactccaacttcactggggcctagacctggcttccctcattccagggtctcgctctcctgcctccctcatctccaggcctgcctccatccccagcaacgcccctgcgcccttgctactgtaaagccacccagacaggctggctagctcccttgtcctccgtccccatttccaccatcaacatcaaaacggctcaagaggggatcctcttccaaggaggaggagaaactgtgacagatcctaatctcaaattgtttccaaggtaaagaattctgggaggagcaggcacaggaaaccgtctgggagtctggcatggagggaggcgacgacaaaggcactcagccctcacagtgctcccaccgcaggcaggccctgccctaagacctggggcagtgggtgggtgtctgccaaaccgagtgagacgcagaccccatccctgatactgaccgccgggtgcagactcatggacacacagctctcgatccgcacccccaaagtcaggctgctcaggggctcaaccttggctccaccctggaatcatttaggagcttaagaaatgccgatttgccctcaccagagactctgatctaattggcctggtgtgaggcccaaggcatctaggaggattggctaaattaaaatctccccaggtgattcgaatatgcagctaggactgagatctactaagctgatcagttgctcaggagagcaccccagagcctgggggctccagaccacagctccaagcacagtgactccctccccatccagttcccttcttgatgcatcaggaggaaggagttggggccaagactctggcaggcacagaataacttaacatagcagctggggcctcattcattcgtcatccaatcctgtattcaataactatttaatatacgtgtcgtgaaggcacaagagaaactgaccaaaggctccagtttagactggggagtcaggcctctctgaggaggtgatatttaaatcacctgagtggcaagaaggggcctgccccgtgaaccgccatgccaagcagggagtgtggtagtgcagaggccctgcacagggagcaaagcgggcatgcggctggagcacagctggtggagaagagagcagtgagccgaagtttgggaggtgggcagagtgtatcatagggggtcttggagctgtggttaggagatggttttcattctcagtgcaatgggaagtccctggaaggctttcaggagggaatgacatgacctcgtttgtgtttttaaaagacattctggctgctgtggggaggatggctggtggggagcaggatggacacaggtgaactgtccagtccttcagggcggaaagcacctctgtgctgaaacaccagggggaaggtcaaggacccaactgttcctcacagtggggaatgtaggtcaggcagctccctcagccaagctgccagtgcagccccctcgcctgtcagggggagaaaagctgagtctgagatgtgtgggctcagctgagagatcatcattggcagtgaaggcagagataacagtcggccaggtgcaaggatctgggccactgactaaggtctcttcatcccccttcccagggtgcctctccctgcacacctgtaccccctcaccatcttcccagcaggccagccaggccagcccagaggcaggcctcaacctgcgcctggagcagtggctgtattttaagatcagggctcagacctctaaataaaccataaacaaagccagcttccccggtatggaaggagggagatggctccatttcttttcagcacgatgactgggaaataaacaagtggctctgcctgtcacatacacttaacctctgcaaaggcatctgtcagacccacagagcttctgtctcagcctttccaataaataactgatgtgccccacattgggcttctccctgcaggctccaagttcactctgccattcaaggaaaggtgagcaggggggcttgtccctgaccccaaactcacagaaagagctatcaaagggcaggcttagacacagggccctagtgtagctggaagcatgttggcacagctctctcagctggggaaggggacaagggggagggagagagggaggaaggtaggaggtcgggttgttggcaagagcaggggcagagctgagaggggcaaggagtggcctctgttagagagatgggagggtgagagccccaggggcccaggcagagcctggtctgcaggtggggtggccgtgggtgtggaagaaacaaagaaaaacagaaggcagagggctctctctccatgggtgaaatctcccacgaccacagaggatgaaggagaaagaacaacagacaggaacagaaggaggcgggcagatacatgaagcaggggagggaggaaagccctggaggaatcaaactcaagtatgtgtagaaggaaggaccctccaaatgcagcagaaaaaggtgatttatgcactgagctaaaccagaatagccaggagccaaggccaagggaatgggagcggctgggaatggcgacatgtggcagaagccacagaagggggctgtgagctctggaggggccggaaggcaggcagctcgtagtgaaaggataggggtgagagctagggagagccacagggcccatgaaggctgtcccgtaggtgctgctgctcaggcccctgcagcagagacaccttgcagccaccatcaccccgccgaaggtgtggaaggggggattggaaaagggtgaaagaggcactgacacagggattataaatgcactgaagcacacaccccctcagcaagggtggcactctctccacagcacccccatggggatgaaggagatccaggggctcccagactgcagccaggtgtgtgggagccacagacctccaatgatggacccagcagacctagatagaggctgctgtccacacacagaccctgaaagaaagggagatgaagacaaggataaccaagatcagatttttctccgtctctccctctcagacacacacacacacacacacacacaaacacactgggaaataaagggtggcttgtgtgtgtttgagggtagggcagaatggaggactggattcctcttttagggacctgaagaaaagtttcccaaagcctggggaaaggtcatacacaagaaagaggaagtgtgtgtggccctcactaccctactatccctctcccatgtggctgcctctgtggaatccaccacatttgcagaggcctgcaggggcatgggtgtgaagccctctcagcaggaaacacacctgcattcacacccacacacatgtccagaagccagtgggtcacagggatgggtcagacttggatgcaggagcccccattcgaagccagattaacggtcctctacaggtcctccaaggaggccccaagccctccagagctacacagagcaccttttcagctgggacggcattgccaggattgcgtaaagaaagaatgtacttcccactgtggcagtggtggttgcaccatgaatccagagccaccctgcaagggcattcccaggacttctgaccgagacatgtagacgctagctccctgctaagctcacacaaccacggtgctccagtctttgcaagtggacaccacagagaaacaccaaagggagggggctccccagggactgggtccatttctcagctcagcccagtaggcagggccttaaggacaatcccagcagaccaagagctcagatctgggccacgagtcttcttaggaatagggacacagatcctgagcacatctaccagtccccactccagcttgaaccccccagtccccactgtcggcaagcacaccgctctcaacatattccacacacatgagcccgtcacagtcccaagagtactacactgtacacagcacatgtacacacagcacacggttccccatgccacacactgcgctgacacacgtcccaggtcccccctgtgccgacgcatcttcccatccgacagaggacccattttaatgaacgcggtacacacagacactgaaaagtcctgctgtcctcagcctacatacacacacagcgccctgcagtcccgcacagccagcacaccacaccggcctggacacaaactgtgcccacacagagctcccgaccagaactcagcgactcccgcccccgccgtgcggcctgcgctcccgccccccgcgtactaagccgatctccaccttggacttcccggccccctcttttcccctccagctcctgttccccaacaaccccacccccgggcttcgggaaacttttcttcaggtccctaaaaggggacacctggagttcctccggtcccgccctgtccccggacacgcgcaagccgccctttatttcccagcccagctcccgccagacccagcggggaaaggtcaccgtaggcagccccctgcctgcgccctgggggtggtgataataacagctgtcaccgggggatggtcggggggaagggagaggtgtcggccccgcgccgagccgggggcgcaaggtggtcgcggtgacgcgccggggaagcgcagagaagcagcggcggcggcggctgcgccttccgagcccgggcggcggccgaggcacgcggagctgtccgttcagcaccaccgcgccgcgccccgcgcagggcgggcgccccgtcacacccgctctgctcccgccccggctcacggggcgaatgcggcgcgggttcctgcctctctgggtgggtgaggggcgcgcggatccggagagggggctccgggagcggcgggaccacgcagccacctgtgagccttcggcagctgcgggcggcggcggcgtacccggcccgagacgggaggagacgctcggcggcccccgcccgccggcccgccgggcgcacacactcgcacccgcgcacgcaccgccagcaggcagcggccaccgccgcgatgctcgcccgcgggttggggaagtttcccgccggcctcggccgcgggcacccgtgctcccaggtaagcgcttccagaacgcgcagggcgagcccgggcagccccgctgggtgaggcgcagcgcacgcggccccggggcatagcgccaggccggcagggagacctgggccggggacgcgggggctgcaggcgtgggatctggacccaggggaggccgggccgcccccctcattcccgcggcccgggtttccagactccagcgcatcccccccaccccaccaaagctacgcgccccccgtgtcggcccggccctgcccgtgcgtatctcagctccggtcccgcctgtctgcggcgagcgggcgggggcgtctcccgggcctgcccatggacaaggtcagcatgcagccccctgggcgctcagagccgcggggacgcgaccccgcacgcgcaaagcgcccaccgagacccctggggtggagctgtgctaatagaaacatacccacccccagcctttcctgggaggggatcagacccctcaaactcttgccccagcccagcccttcagcacccaagacccaccaggaggcctgggcccgccagtaatgggtagggagagggggccccgccagggcgcacggcgctctcgccgacgctgttccctccgcttccaggtgtagcgcccccgcgcggcgcgggcggccggcgcctccagcatgaccggccagagcctgtgggacgtgtcggaggctaacgtcgaggacggggagatccgcatcaatgtgggcggcttcaagaggaggctgcgctcgcacacgctgctgcgcttccccgagacgcgcctgggccgcttgctgctctgccactcgcgcgaggccattctggagctctgcgatgactacgacgacgtccagcgggagttctacttcgaccgcaaccctgagctcttcccc

SEQ ID NO: 11856 - DNA, 6000 bp, Homo sapiens
tgagtaatgaacatttttcatcatcgtcacccagcttgtggcttgtattttgacatgtgcttgtattttgacatgttctttgatgaacaagcttttttaattttaatgtataaacttactaagcttttcattgaaagtttgtcctttttatgtctttgtgccttaccttatttaagaattccttcctctctgaggcataacaatttttgtcctataatttctctaaaaattaaaaaaaatattgaatttttaatccattttgagtttatttttgtgttcgttgtgaacagaggtagatttactctaccatcacttgtataagctcttttcaaggctctgggagaagcccaagtaatgttcacatgggttgtgtttttacaaaattttcaaaagttaatttattttggaatttccttaggaatccccaaattataagtttttggcttcataaaacttggacttctttcctacatctgaggtaggaatctaatttttctccatataggtagtaattgttctagtatcaattactgaaatatgcactctttgccattgattgtcatatataaagatgccatgtttgaaggggtttctttctgggctctttattcagttatattggcatgtttgcctatccctctgatttgttttgatgtagtagagatttctaggactctatctgtcttccaaaagggtcttaaactaggtcattccattgatgatttattttagtgaaaattacagttttctgattttgcttgaaaggcttaggtcagtggaaaaaaatacattgttatctgtaactggtaactcctctcttaaaccttgactgattttctcacatagttctaaatgattttttacagtgtcccacagcactttttacataatctacttaatcatataatattttaataggtcatttatatctgtgattccaatgaaactgagctccttcaatgtgggcatgcctaagtgactggtatgctgtaaaacacatagtgggcattcaaagaatgtctcagctaatgagtaaattcagaatattaaactaacatacataaataacttgagccaatgatgattagtttcttgccaactggacttatgatctatactgtgcccaattttcatagtgagataatatctacgtgacttggatatttgtttacacttaactctgagggtatattaagaatctttacatgctgtaactctttaggaagccagtcagaagcgcactgtacagctgcttaatgtgtatgactttaaatccagaaaactgttgttctattgattgtagtaattaatggtttttcttttttccttctcaaaagggagaaataaagtcagaagactttggttgattacaattttaacatttctgaaacaaagttgaattaagatcagcttatgtctattatatgaattggttaaaataatacttcctgctgtgacagataaccctccaaatctcagtaagtttaacagtagtttatttctaaatcatggaaaatcctaatggatgttacttatcagcagttgtttctctaggcaatgactcataaactcaatctcctagtttttgtccttaacatctccttggaccttggagtcctctgcacacttttatcctgcttggtgacggagaaagactaaggctgtcatgtgggaggcttttatgagccaggcctgtgcctacatcacttctatccacattcaggtggtcagaactcagttacttgacaacacctggctgttagacagcctgaataataatctagccctgtgtacacaaggaaaaggtaagcagatttcctgaataattgttaaagtaaatcactgtcataacctattaggtaccacataatatgcaaggcattagggatacaggtccctgtagttgaagatcccatatatatatcacacataatagaaaactaaacaaaaaaagaagcctttctctacctttttcaatcttttaatcttgcagctagaaaatctaggcagggagatggaaataaataagaaaataaaaaacagaaatgaagaaacagaatggttaataaccttctaaagtggaaaacactgtgcttaggtgggttcattggtgagtaatatcaaacatttaaggaagaaattataccaattctgtataatctattccagaagatagaagcaaaggaatacttcctaacttattcatgagcccagccttactataataccaaaatcagataaagacattataagaaaaccaaaccaatatttctcatgaacatagatgcaaaaatcttcaacaaaatactagcagattaaatccaacaatgtataagaggaagtataagccatgaccaagtgggacttatcccaagtatgcaaggctggttaaatattcaacaatcaattattgtaatcaatcacattaacaggctaaagaagaaaaatcacatgttcatatcaatagatgcagaaaaagcatttgacaaaatctaacacttatgttacgataactctcagcgagctttagcttgctaaagaacatctacaaaaaccctacagctaacaacatacttaatggtgaggaacttgaaggttttctgttaagaccaagaaccaggcctgcctctacagaaccaacctgcctcaaagtcttgagaacacttaaacaatatttgtggggggaagaaaaatcttacaatacaaagacataatagatttggaaaaggcttaacatttgacaatttaaaaaatgagcaatgaaactattagtgaaaaggaattaaatttatcttcactgcttatggtaaagggcacagtggaacacagattgaaaactacaaattttttgatacttaaaccaaaacacagtgcccagataattttcccaagccaggaatttgtctattttttgttggttccaggagaaaaatggcatacgtttagcattccatatgtttagcattccatatgttatttgttcaaacatcttagtcacatttctactcctatatttggccaatttatcttaatatagtgtttttatttaatagatcaccacagaagaaaactaggccctttttctctagaaaaacgacaagacctggagctactgttgtagactgctgagaggttctatacaattagcggaaccattttctttacgttaaaacctctaagtcatggctttgacctgtgtttcagatgaagcagataacagaaaaacaaattaattcatttgtataatttggcaagttttgataatactcaaatatttgagttattatggcatttttgtgaaggaacagctgctctgaattggcaattagctgctgcttcttttggtgaaacttatttccttattttcaatcacaaaataaacctaaacaccttggcatcctcaggcctcttttctgttgcagttactgaagctctttcaagaaatggtaattttgaattccaggaaagagctttaggcatgggtgggtatttaataaccttttaagaaatctagtttctgattttttgttttgtttttcgacagagtctcattctgtcgcccaggctggagtgcagtggtgtgatcacggctcactgcagcttccacctctggggctcaagtgatcctcccacctcagcctcctgagtagcagggactactggcaccatgcccagcttatttttgtattactattatctttgtagagacgggttttttccatgttggccagactggtctcaaacttctgcgctcaagcaatttggaggccttggcctaccaaagtgctgggattacaggcatgcatcaccgcgcctggccaggagtctagtttcaaaatgcagttgtaggtgttttcttcagcgataaccaaaaataagacaatctgggcaaaacttggggagcatgtcctatgcgattccttgaagcccagtgtatattttccgagttaatgtttgagtttcttgactttgttagcttgtaagctattatacggaaaggtaatattttatactcattacagcctaataaaaccaacaccgacccttacaactctgaattcattacttatcagttattttcactttgtctctagaactctcaattctgtcttcattttggttattcccgcagcttccctaaatcccacgtcagactgcaatcctatggttccccgcaatattctctttgaccatcccttcccccgcccctcatcagcaaactagggagtactttaccattgctttgtgaaagtaccagaatgcgagaacttgtctacacgtttggccaaaacgcatcctccaacggtgtatgtcctaatcccttcaattttcttcccacatccaccctccttccagcaaataaaccttggaactaagttgaaatctgtcacttatttcgctcctcctaccagcggcctattgcttctgccctccccagtgaacccaaccaagttcctcttcccagtcctcccatttctcaagaaaaacaaccacctctattttttcagggctttacgtgctaggtgtggtttcttcctctgcatcgaaccagcgacctgggtgcctccccacccaagacggacctccacatcgggaaccgccgccggcgcagcggccccagcagccgcagccaccttctccccggagcgccacttccggatctcgagtgtttcccctttacggttccccccacccccttagacacctcctagagctttgtcctaactagcagggtcggagctgggaccctggctagcagaacgcaagagttctccttcacgaagacgcgcagagtagcttctccagcctgagaaatccggtccggctgcgtagagtggcagccgtggagggacagtttgttttgagcaccaagtgggacacacccggaagtggcgcggtacaggagcagcactgccggcgggggcgggtgccagggacttggaggtggaggggacgcggcggtactctggcgtgtgagccgagggtggagtgcagagggagcgggagcgggacgggaggtcttctagctttggttctatggtggcagatccggctgggttccgggaagcgagggcctcgcggggtggctgggttggtgaagggctactgcggccgaaggggagcccgcctcacttcattcttccactctgagggacccgctctcttctggtcactacgtcttcctccctcacttcgcttggcgaagggtgttgtacttgtgaggaagtcgcagctggagctgggagtccgctggagtttttctctgtttctaagaggaggcgaacggccgctttggtggggacttactgctttcggcctgagataacgaacgctctttccttcactctaccgccgacttctaacgtttctgtctactcctttcagcttccgacttcgactccttaccttaaaagatgctggagtcatatgtaactccaattttaatgagctatgtgaatcgctacatcaagaacttaaagccgtcggatctacagctttcactatggggtggagacgtggtactcagcaagctcgagttaaagttggatgtgctggaacaggtaagctatttagctgtcattaactggaaacagttttcagcttgtttagacggtaatctattgtttcctaagctttgactttatgctgtaaaaacgtaacttttctactgatgtattttgagctaccctgaaacaagggggctttattttacactattttctttttctttctttctttttttttttttttttttttttttgagatggagtctcgctttgtcgcccaagctggagtgcagctgcgtgatctcggctcactgcaacctccgcctccgggactcaggcagttctcctgccgtagcctccctaatagctgggattacaggcgcgcaccaccacgcctggctaatttttgtatttttagtagagacggggtttcaccatgttggccaggctggtctcgaactcctgagcttaggtgatccgcccgcctcagtct

SEQ ID NO: 11857 - DNA, 6000 bp, Homo sapiens
atattcctctttttataagtcccttgtcatttgtctttctcttttctctttctttccttctcttccctatgcctctctcccatctcttcattctccaatttctgttgcttttcagtggaaactagctcaagttatttctttggtctttgcctccatttaaccatactctcagtttttcttccaccctagtggaagatattagtttatcaaggtattttcttaaacaaggacacttagtttcctaagggaaatgccagtaacaactttcaagatatcttgactattataccagagtgaaaaagagttctgaatcctgttgccctatttgcttcaaatactttctccactttgtttaactaatggatactaggcttaatacctgggtgatgaaataatctgtacaacaaacctccttgacacaagtttacctatgtaacaaacctgcgcacgtacccctgaacttaaaataaaagttaaaaaatatttaaaaaattaaaaaaagaaaacagtaatcaaaaaacaaaataattggttgctggtatgattccatcctgcacagctgttctctggagcgtggttgtttacctctgcctggcttctctcctacctaagtgcttgccgccacccatggaagatttgacggacatggacatcagcctcctgaggccccagaactatctttttggttgtgactagaggccaacaaagattatcactttaaggtggataatgatgaaaatgagcacaagttatctttaagaatggtcagtttaggggctggtagaaaggatggattttatattgttgaagcagaagtaatgaactatgaaggcagtccaattaaagtaatactagcaactttaaaaaggtatgtacagtcaatggtttatcttgggggctttgaaataacattgcctgtggccttacactcagtgtgtttcagggcctgggcatatgagtacacagcacttaacaggtatgaaggaagatacaaagcaggacatgaagaggagggagatgtgagacttttcagtatatctggaaagtgatctgcccctggaagtgggtacatttctacaagaaaaaaataaaacttcttgctgatgaaaatcatgatgatgatgaagaggaagaacattttgatgaagggaaaactgaagaaaaagctctagtgatgaaatttatacaggatactccatccaaaaaatgcacaaagatcaaaccaaaataaaaaagactcagaactatcaagattaagaccaaaaggtcaagaatccttcaaaaacagggggaaaaaacctcttaaaacaccaaaaggacctagttttgtagaatatattaaaagcaaaaatgcaagcaagtatagaaaaagttggttctcttcccaaagctaagtgcatcaattatgtgaagaattacttctggatgaccaactaggaggctattcaccatctctggcagtggaagaagtctctttaagaacacagtttaggccaagcgtggtggctcatgcctgtaaccctagcactttgggaggccaaggtgggcagatcacttgaggtcaggagttcaaaaccagcctggccaacatggtgaaaccttgtctctccaaaaataaataaataaataaataaaaatacaaaaaatttgccaggcgtggtggtggatgcctgtattcccagctacttgggaggctgagacaggagaatcgcttgaacctgggaggcagaggttgcagtgagcagagatcacgccattgcattccagcatgggcaacagagtgagactctgtctcaaaaaaaaaaaaaaatagtttaaacagcttgttaaaattttctttcttctttttttttttaaatcttttaacccaatagttcttttagagaaaaaaattacctgtcatttcgttaatagttcttttagagaaaaaaattatctgtcatttcatttctgtaacagttgatatctaactgtcctttttacaattcagagtgagaagttccctagcacgttggataaatattgtccaggttccattgccaaaaatgtgttgtccaaaatgcccctgtagtttttaaagatgaaactccatcgtttgcttgtttttttttttgagacagagtcttgctctgtcactcaggctggagggcagtggcactatcttggctcactgcagcctctggctcccaggctcaagcaattctcctgcctcagcctcccaagcagctgggattacaggcatgcaccaccacacccagctaatttttgtatttttagtagagatggcattttgccatgttggtcaggaaggtgtcaaactcctggcctcaagtgatctgcccacctcagcctcccaaagtgctgggattacaggtgtgagccaccacgcctggctctttgcttggttttcagtatatatgtatgtatggaatattatgataggacatagtagtagctgtggtcagacaaatggaaatggtgggaagacaaaaatatgtaactgaaataagctcaatattttaataaaggaaaaaataaattttttccccggaaaaagttgtaagaaaaaaataaatcttctcccatgcatcttaggagtgctttaaacttagatgtttggagatgagtagtctttagataggtggaaatggaggaaaaggtgtgacatgcccatggctacctagtatgcttctatgcatagtacagtttttaaaaagtgagttgcttctctgtaaaaacatattactttactattagaaaccactggagagcaatcatgccctgcttatattaaacatctttgctagatttttatttgattttttgagatggggtcttgctctgttgcccaggctggagtgtatggtgcaattttagctcactgcagcctcgaactcctgggctcaaggggtcctcccacctcagcctcccgagtagctgggactataggcatgcaccaccatgcccagctatgtttcctaaatttttaagtgagatacattaaacctcataaaaattagagctaacatttattgaacactctgttgtactgcctcccaagtataacatggtaattaaaacactggaggccaggcacgatggctcacccctgtaatcccagcactttgggagggccaagtgggcagatcacttgacctcaggacttggagaccagcttggccaacatgaggaaaacccgtctctactaaaaatacaaaaattagttgggtgtgatggtgcacgcctgtagtcccagctacttaggagggcaaggcacaagaatcgcttgaacccgggaggtggagtttgcagtgagctgagatcgcaccactgctctccaacctgggcgacagggcgagactccatctcaaaaaaaaccccaaaactaaaaaaaaaaccccaaatgttggaaagttgcgcgaggtataattcagtttagaaattaagaatccaagacaaaaagtctgcctcaggaccacacacaagcacgaagaaaccaagatagttcaagcatggaccttaaaactgcactgtctaaggctgttgtcactggtctcatgtggctatttaaattttaattaaagtgaaataaattttaaaattcagttactaagtcacactaaccatatttcaagtgctcaatggctccatgtagctagtgggtactgtacagacagcacaggataacatttgcatcatggcagaaagttttagtggacctaaccaaaaaaaaaatgcctttaggctcatttcgtgatggcagataaaagcctctggaattctgataagtttctgaagccatgttatagaactggttattgtaattgcatgaacttcatccaaaactggtgaaagcgtcaggttggggatagtctggtggttgttactttctgtccaacctaatactgaggctctgagaaattctgtggtgaatttctgtagggggacacagcagaaaaggcatagtataggtcagaaaacctgggtcctataatacatagtaataatgacgaccatttactggttgtttcctatgtaccaggcactgtgctaaccacaggcttcatttaatcctcacaatacctgtgtaaggtattattaccaccactttgcatgtgaacaggctgaaattcagaggagtaaggtcacacaactagtaagtaggagagcctggattcaacacctggtatctattcccttgcgctgaacaactccgtgccctcactttcttcatctgtagatctaaaaggattaaattagaacatctcaaaatttctactacttctaaaactctgtgttctaaattaggacattactatctatctccccaagctaatgaaataagcagggttcctgggaggagcttgttacctatttttctccaaaggagatgctttcccctgtctatgcctctgtcctaaaacctttggtttcccactatctaatgtggtttcaactatctatgaggcgctttcgtggcaaggagtgattctctccagtaggcaatcctaagaacgagcgcagtgcttggcgcacagtaaatgctccatggaccatttatgaaattaagtctaagtggacttcaggaaaatgtgaatctgctaaaatgaactactagccagtatactaggtagaaaacccagctgacgaagaaaaccccaagtggagaagcccttgtagggggttggagacaatttctgacccgcagaaacctgcagtggcgctgacgtttacaagtggtggacaaaacgccacttgcaacactggaagaagcggaaaaccccacccactctggaacaacagcgatcagccccgaatatagggtccccttgccgccccgtagcctcctagtcccgcccctctcccaaggcccggcagtggcagcggctgcggctgcgcagtggcgcgggcgtaggcggagcagcgcgcgccgcggtcagctgactgctgggctggcacgtgacttgttctgtgttcgcttgggtagaggaagccgtgaggccggagcttaggtcgggaagggatggatcgctgagccgatagcgtccgctaggctgtctgcctcggtacctgttactgctgctacttcctcgtttgacaccttcctgggtcagtgagcgatggctctccccggatggggagtcctggtcaggccgaagcatgagctccggtcgctgcctgggagggacgcgggtgggtgcgggggcagagaccgtggcgttggagctggagctggctgggtggctgtgtctggtttctcggcgccaattcaccgtcttgggcctaggttccgtctctaaggaagagaaggagggaaaaagagaaagagctctcgtgggtagttaatgacaggcagaaaggagagatacagcggtctgggatctttcttcttgggtaggaatgcacgccgcctgattgattgaggggaatgaagtgataggtccaggtgaggctatggagtggtgtgtgtgaggtcacagctagcgcaagtgccttcactgggtgtgtgttggggggggcgcgggtgtcgggggtcgggggtggtgggatgacagtttaaaggcctaggagcccctaactgcaggcaaggaaccctcacagagtacacaaggtccctctaggaatgagaaagaacaggaatccagagaactcaactattttttagtagaatgggggagggtaggcaaacaaaacagaacaaaacaaaacaaacccctagaaaagaacttggtgagagtcacataaggcatattgaatcacttgagaaacaggagtaagggggaagctagtattcttttcagaggaaaattctggtatgttagggaaaaatcacatgcttcagtgcgagcccagtacttagcgccgctctgggaatggaacgggtgggatgtgaacagtctatccttaggagttagcactaacgttggagagaaaagtctacacacaggacacgttaaaatacgatgcagtttatgtatacttaccaaaaagagaatgcga

SEQ ID NO: 11858 - DNA, 6000 bp, Homo sapiens
ttctactcctaggtgtttccctcaaaagaatggaagcatatgcccatacaaagacttatattcaaatgttcatggcaagtttacttttaatagatccaaagtggaaataacccaaatgccatcaacagatttacgaataaaacaattgtagtatattcagacaaaagaatactactcagcaataaaaaggaataaattactgacatatccaacaacatggataaacctcaaaataataccagtgcgttaaaaaaaatttacaaaaaagatgcactgtatgattccatttataaaattctaaaaaatgcaaactatagtgacagaaagcagatgagtggtggctggagatggggtggagtggggaggggcaagaggaagagatcaccaggaacttcaggggatgatagatatgttcactagcttgattgtgatgatgttttcacgggtacacacatgcgtaaaagcttaaacttatcaaattatacactaaccttgtacagtttgtggtatgccaatcatactttaataaaatggtatttaaaagtggcttgaccatgaaaaagcatggagaaaacttaaatgcatattactaagagaaaaaagccaatctgaaaagactatatactgtgtgattccaattatatggcattcttgaaaaggcaaaactgtggatacagtaaaaagatctgtggttgccaggggttagtgaagagggagggatgaatagacagagtatagaggatttttaggacagtgagaatactctttatgactccataataatgggtacatgtccttatgcatttgtccaaagccatagaatgtacaataccaagagagaagcctaatgtaaatgatggatgtagggtgattagtgccaatgtaggttcattgattataacaaatgcaccgccacagtgggggatgttgatattgggggaggctgtacgtgtgtgatgatgaaggtatgtgggaaatcgctctactttctgctcaacttttctgtgaaccgaaaacttctctaaaaaatagtctatttttaaaagtggcttgaacaattaggatatttattgtctcccaaatcaggggtctggtgggtagagaggatcaaaggttggttcagtggctaaaagtgctattaaggacacagatgcttcccatcttctggctctgtccaccttcatattataaaaagtgttgcagttgttgaagtcacacatgcgggcaaaacagcgtccagtaaaaatgaacagtttccttcctattcatcttgttttaagagagaggaacgctctcctatgagctccccatagacttccccttgggtcccattggtcagtgttgagtctcatatccatgatctgactgcaaggaagggagagggctgcagggcgagcacccactggggccacacaggcacttgcagagttctgtgcctttactcatgctccttccctctggcttctcttggctctcccttgacccaccttctttcgctgagagcattcaggaatcctccttgcatctccctcaggcctttctatgtaactttatcttccctctgtgtagacttttttatgtgtgtatctgtcttaacagccagacatgagcttctgcaatctctcctctttcatcaggggagcccagggaccttgtacagggcttggtgcacagccgtgcttgaaaagtggtcttggatggcagaaaaaagcagatggagcttttcccatcctggggagaacacaaaggccaaggcggggaagcagcttcagtacagaagtgagtgcaaaacactaaaagatttcattatagaaatagcagaaatggtcaagatctatcattgtgaaggatataactgatggtctcagaagaacacacctgggaacatcactctgaaatgaaaaggagagtgctttagggcagagaaagcacagctggactcatagaatagaattctcacattcttcattcaacatgtgaaacttattacctctagtaggttattcaggaaagactgtaacaattattttaaaaatagagatgtggtctcactgtgtttcccaggctggtctcaaactcctgggctgaagggatcctcttaccttggcctcacaaagtgctgggattacaggtgtgagttactacacctggccatagcaatttttaaggggttaaaagctactaaagggacaaagcgacaagtcttgtctatgtcaggccatgctgcttcacaaaacaccctctctctatgctggttttctagaggagttcctgggctgggtgagtcatgggtctgaagtgagcctagtgttatctgtgcttctgtgactcatcaaacctaaaaccacctctgcaggacagagattccttgatggcaagagaaagaacagaagatgctcctgaccttagggtcatacagtaatttcagcagtgactactccttgctgggcccctgaggcagaatcccagagatgtcctggaagttcaggccctgacttcatttggtcaatggcgttggcgttaaaatcaggatgattcctgtttctcaggccctcttaaccaaccattgctgttctgaggctattcttctgagaagtgcaggtggatactcaaagagtccagctcactaactacagactttcaaagtaattaaacaacatttgagctgatcaggttaaaattcccagctgagcatagcttttccattctctgagttctctaggagtgcaggaaagaaatcttgcagcaccagctgaatctcatctgcctatatcacagcccctccaccttaagttgcaccaatttgtaggggtctctgagttttaaacccaattggcctctccctttctttctttctttttctctttctccctttctctctctctctttctctctctctctttctttctctttctttctttctctttctttccttctttctttctttctttctttttctttctttctttcttctttctttctttcttctttctttctttcttctttctttttctttctttctttcgtgtatcaagtttactacctacctcctggccaaaccgggccacatggttaagcccagattcaaattgggtgggaactacaaagttacaaggcaaaggtcatgcatacagagaggtcattaattgggatctaccactgcagggtggtaaaagagaatgaaaactgatatggtggggaataccttagcatctactaagggagtaatcaggaagatatgagatatcctgtgaaggcttcccgaaggaaggagaggaagggaagaccatttcagttggaagaaggatacattatgggaataagtcattttactggagatatgaacacttatgtaaccaattcccaattgatagacatgtgggttgttctacatattctctattacaatcaatgctgatctgtgtatctagctatccagctggcatagagaggcatatggtggatttgtacacacacgtacacatacacatacacactgcacacacataccatgcaaatataagataaattcttggaatgactaattctagtagcttataaatttgtataggtattgtcaaatcagcctttttctttcactcccaagttgggaattgctggggactctcaaaaccatgtcactgactccatttttggttgtgggagctgggagcccctccatttcctcttcccagttctttcttctgcagctgcccccaggtttgttctccatgatccagcaacttctgtctccatcccccgttctcagaaggctccatctcctccttccccaagaaagttgcaactgccctcagctttcctccctccctcctcagggagtaccaacatctctctcttatctttattcttctttgtgaggctgatatgctaaatttcatctagttttccccaaactcaaaccactacctctctactgctgccttctccctctccatttccatccctagcactactacaaaggaaccccatccagtccagccggttggcttgctcctcccctcctcccactccagttcacgctccagcccactgaagagtggtgcccacccctaggcccctgcctaaatggctcttccagaaacaccagtgacttcccactcaccaaagtctggggccgtttcctcaagatcctgcccactccctgacccttccctcccttggggccaccatggctgcttctggatgactcaatcagacacccacattgcagtcccatccttcctgttcaaatgaaaacatctcatttcaacagctctcttcatcttcaggactaagtcagccccttacacaaaggactcatgagggacatgcagtctgtgtgcccagcctgagcccaagggtctattctgatcctttttttttttttaagataaaggtttttgcaggtataataggggtctccaacaaaaagtaaagaataattttgtagaaagattttgagactttcctaactctccgaaactacacaagctggtccttttgacttggaagctaaatttctaagatggaaagtcacatgtatgagtgggaggcatgaaaccaattattcgacctgtctggggtcatgagtgcagaggcggctcctacgaaccatctgcctcttcaagtgtggatgagaggtgggtatggcggatgcttgtcatttcccaatggctcgagtggatgtggggagtatgggagtgagggcaaaagagaaaagagggagagaggccgtccaagctttcacaactcactctcttgtgtttgaaaatatctgatttcattattttctataattaatttctagaacatctattctgaggaaaatgctagaaagaaatatgctattcatttgtatcagcattactctttgttgatattaaatggctcagtcactttatgggggaaataaagaggttgattcatggtgatgtgaccctctcgacacttctggttccctttttcctgctatatatcaagacctacagcccttgggaagtgcatttctgcattcgaagaagaatctgagagaaacctgtaagtaaactttcagaataatcttatttctaaaattgcttttaaaaaagtactagtaaattggaataaacaattgtgaccagagcatactttaaggccccctataccccgacagtctccctatgtatggaagtatcagaaagtcttttcatgttggtatctgaatatcctctgctcagggaaaactgcagcatgaatatcttcttatgggtgtagcctgggtatacgcgagccacccttcactttatgaatcccctcagctaatcctcctggtggttatggggagccctaggctggctcagtcctgcctggccaacgatgcagctcccggcacctggcacacgcagcaatgggctgaattgttccgtaaatgctattctgtttacctagtagcgttcattaatctttcctttcttgtgtgaaggctgctttcacagaggaaggcatttgctggctttcccaaggcaagaacaatgaaaacaaagtcatgaggagttctctctacctcaaatgaaggccgcagctcctgctcaagctattttggcagtctgagagaacagtacattctgaaccacattgtaagtttgcaagagcttatacaaaaaagaaagggagaaaaaaggaaaaggaaaagaaaccctccattcttcttttgttccactcccaggtgctgggctttgatgttctgtctcagaagtgactgcagaacgccagctccaagaaccagctccgctgctcactgcacctttcatttcagagagcatggggctagtggggaccttagaactcagctagcccataggagctgaggtccaggaggtgacatgacctatccaaggccacgcaacctggcttgggtagaggcaggttggaccacaggtctccgtttggcgctcttttcctgttctgctctgtcctttgatcaaattccttttaaaatgagattcacatcaagccagtgag

SEQ ID NO: 11859 - DNA, 6000 bp, Homo sapiens; identical to SEQ ID NO: 1320

SEQ ID NO: 11860 - DNA, 6000 bp, Homo sapiens
ttttttgtctaaggttgactttgccccagtactgaggcaatactcttcagaatattctatccagtgctccattaattaggagattttccactctgaatggtggaaatgtgaactattcctggtcctgcatgaattcctgggattattccactgctcctttggaatgtttctgccctggccttgggtaagttagtcaccttcatgtgctaatcagcactcaattgaagatttaataaaggggacctttgctggcctcccagtgtttatctgtatgcagctcttttctccccagtactctgtgaactctagcttggttggcctcctcaaattcccagcttcaccacctcatctcatggagactgctagcttccaccagtgtctcccctccctgtgctctgaaaactctccccaagctggggaaatcgcagggctcacctcattttttcccatctccagtggatcactgttctgtgttacctgaagtacaatgtctgaaactattgtttcatatatttcctctgggatttcagctgttttgtgcaaggaaggttaatctagtcctggttattgtattttggactggaattacttgttgctgtttttgatgataagggaagcatgcatattcaaagagaaaggctgtgtataaagcaaaaattgaacattgaggagacagaaaagaaaattaagaatgaatttcctaagaaaaatacaaaggggaaatgataaaaagctgagatggggctcaactttgcctaggaaaagaaacacttcttatgaaacatgaagtagcataggaacaacgatgaagcatagaaatttagatgcagtgttcacttcgtcagctgattttacttgagtttctattatataatgtgaataaaactcagctgtttcctccagtggggaagaaggggatggaggaggggaagagtgaagtgtgattcccagcacggtgcctccccactccactgccaaaaaagaaatctttccaaatcctgtaactcctgagcttttcatattcttgatagaattgtgggtttatagattgtctaaggagatcacagtcgggccactttaaaacttctggtggtctgattcacagctcatgttggtatctgatatctaccatctcctggtgcctccactgaactttttgatttaataccctgttacacaacactagcaagcaataggagacaagtaaaaacacaatttcaattcaatgatatacgttctctgtgtggattatgcacagcaggttatagaaacacactgggtgacagggggccctacataatcttgaatgggcagagaaaggctgccagaaatatctgtccctgtgacccaaaatatacagaaaataggttgaggatatgggagtggtaagaagaaaggatatcctgcaaaagagaggagaatgtgtaaaggttggaggcaggaggtattgaagatgtaggtggatcaacaaggctggtgaggtgggagggctcatcagaagccacttgccagaaataccttgaatgcactccagggcatctgtaattgatcctgagaaaagtaaggaattggaggcgttttaagtagaggggtgactgataaattttctgttgagagatcattcagatagcagtgcagagaatataagagagggaaattcactgtcagaagcatattccttctgagaagagcattcactgtgagagggatagtgagtcagaacagtggaatggaaagtgcatatattctagaaaataaaatggtagaactgccagaacctggtgactgattaaatatgtgtcatgagaaggaggtaccaagggaaacacccaggtgtttgtcttggataactggattgatggcagtgtgaaacaagtattactggctagatgtcctaaaacttcttgtaagctaaaagaaactatggaagggtggaacagtctagatttgttttcattcgctgaacataagcctacttgtgacaggcacaaggacaggtaaaacaaaagaagctatgggataagaactgagagaaatattgccaggcatgggggtggcagtgggggaggcggggggaggtaaaaggaaaatgaccttttaggggattagatcacatgaattagtagtggaaccaagagtcttcattatgaccttctttcagcaaccctgggcagtgtgatgaatgattcagagagggcagatgtagattgtgggttgaactctagctgaagaataaggaacggtgagagtaagtttagagtcaagtacaagatgggaagaaatgtgggatcaatacgagcatcacgaaaatgccttcccataagcacaggctggaaggggaagctagaaaagctagaatggggccaatgagagaatgcaagggatggtaaggctggaggccaaagaattggggatgaaagagagaaaccaataggagacagtcatcagaatgtcagtgtccaagagaatggaagcataaaaattcccaataataaggtgagaatttattgactgtagcaagtcgttttgagtcaagatcattaaaaatataacaacatgaatgttgacattccataaaaatggagtccaaaggaagtctatgagcagggttaaagttatgctggaagtcaggaaccaccggaacaggttgggaaaagagcagaaagttgaaactgttaagagctcatggttagtgtcctggaggaagaggcagaggagtggggtggagtggagctaagtgcgttttcttcctttgattttagaggtgttgccttcactagaaggaaactggtattatcaagaacaaacaggtgttggtagcgatcataagagaaaaaagtgttctagaaaagagttctctttcagccaggcacagtggctcacacctgtaatcccagcactttgggaggctgaggtgggtggatcaccaggtcaggagttcgagaccagcctggccaacatagtgaaaccctgtctctactaaaaatactaaaattagcccggtgtggtggcaggtgcctgtattcccagctactcaggaggctgaggcaggagaattgcttgatcccaggaggcagagattgcagtgagccaagaccacactattgcacttcagcctaggagacagagtaagactctgtctcgaaaaaaaaaaaaagtgttctttttcaagcagataatatgttacaataacagagcgctcattgacaacctttttcatgccactggtcactgtggaagcaggaaggagaggcaaagcaaagatggctgaggatatgcagtacagcaaggagggtgcagtaagagacccagttgaaagtgttctcctaggtggcaatgctaaaataagctcacttgaggctcttctgaatcattagcccttctagaaactccaaggacgtattaaattcactcactaaaatattttgggcatagcgtagttgctgatcatctccatgattacttctttgaagtctttcctttgaacattttttaagtgcttactgagaattcttaggcagaaaataaaacagaaagatcatcccgtgccagagtctgaatacagacagggctcatcgatcaaacaaatccatgcagaaaacttaaaatttcctattaaataaacaccacacattaaatatcagaaagtggtgactaagaggtggggagaggagggatatacagaaggtttcacccacaccctgttttgtggtttttacccggatgccacaaccacacctatgagtttcacttattaaaataatagagaagtagagtaactagaatctgctgagcagagcatagtgctaaatacagttcctcagagactgaacctgacaggcaaggtcaggattcaacttggagaatgtctgatgagattagccaatgtttttttccaacgtggtctacctgtgtgtgctgatgcatgtagatttggtagatttgctcatctttagtagacgagaaaattaagctcatctcctctgttgaacttacaaaatgttgacgttaaaaccaacgataaaatggagataaatggggataaactagagcaggaaattcgaaccatacatagacttaaaaaaaaaatccccttaagccattaaaaggcaataagcaattagttttataccagtgaaatcaataattaaaagttctacttaaaaaaatataacccatgcaacatcgtgtgtccactgagcagtgataggcgcctgtgtaaggaaaagagctctcatcatatcagctagcatttaaggagcttactgtgcgctcaactcttttcatgttatatgatctaatgtgagcatctatgccggtggatttcacatccccgtttcacggacgaggacacctccggtgacctgcagggaccccgcgccagtggctgctgcagctgactcatccgactcccacgcgcgacgctgccctagtggcgtttaaaaaaatcccactcgagtcccatttaaaacataagcaccccactttttaagtgtgactggtgacctcgattttaccttctgagtcacagcaccaagacctgtgtatctgtcaaactgagcacagtgggcgagggcgcgctgtgagagctggggagaagacaggtggagagcacaggtgcaaactaaggggagggctagaaggtaaaaatagcgatcaggggtatgggggtgcgcatggagacgcccgcggagcgctggcgctggccagcggagcaggaggtgaggtcggcggagctgggaggaccgcgcctggcggctgcaatagccgcacctgtgcacgtgatcgcgagcggctcgggcgccagggcggagcggcgctcacctgggcccacgtgacggggcggggctcgaggagccccacggccacgcctcctcccgcgcggcgcgcccggagcccgcggagctgagcggcggcggcggcggcggcaggagcccgggaggcggaggcgggaggcggcggcggcgcgcggagacgcagcagcggcagcggcagcatgtcggccggcggagcgtcagtcccgccgcccccgaaccccgccgtgtccttcccgccgccccggggtcaccctgcccgccggccccgacatcctgcggacctactcgggcgccttcgtctgcctggagattgtaagtggggccgccggagcgagggtcgcgcggggagcgaggacaggcggcggcatccttgtcccccgggctgtcttcctctgcgtccgcccccggcctccttcccttcgacgtggctttgtcctgcgctccctcccggggtcctctcggtgccccgcgccgccgcccgggccctccctcctagcacctgttacgcgggcacctgctcccccgcgggcgacggaaattgcctggggagggcgagtaggcggcccggcagggccgaacattggggacgtggaggaaagaaaggtgttggggctcagaggcgcctttagaaacccagggcatggccaggggccgcgcttggccggagcgagctcctggctctcggcctcgcctgttgctaacctgccattttgttgggtggtgcaaaggtgtagccgatgactgggtgacctggtggctgccacgctgtggaaagtgggggcgggaggcaacaggaagaggaagagggctgaggacttgaacatgctttttccccactcacccttgccatcattagtggcctttggattggaaagaggagctgggcaggaggcagggcaaggagaaaggtgagttatgtgccatgccctgggcagtttctaatccagtgggtgtgacaatggtgggggaaagatggaaacgtggctctcgagttcttctctgcctgcctttgcaccttctcacttcctggcctccttacgcaactccaaacctttttagcacactttgttgggcccaagtaaaggtggggttacctgcctgtcgtgcagcctttttaggtagcacttgaactttttaaatggaattttatggagttggaaactttcgaagctccttgtggaca

SEQ ID NO: 11861 - DNA, 6000 bp, Homo sapiens
aggctggagtgcagtggtgtgatctcggcttactgcaacctctgcctccctggttcaagcgattctcctgcctcagcctcccaccacgccaggctaattttttgtatttttagtagagatggggtttcaccacgttggccaggcttgtctcaaactcctgaccttaggtgatccacccacctcggcctcccaaagtgctgggattacaggcgtgagccaccgtgcctggcctgggactggtggcttcataaaaagaggaagaaaggcctgagtgggcatgctcagcccccctgatccctgcagtccccaccagcaacaagattctccccagatgtggtccctccaccttgaaattctcagcctcctccctaactgccagaaatgaattccttttctttataaattacccagtttcaggcattctgttataaaccacagaatacagactaggacactacccttcctaccagtatccctatcttccacttgaagaaaatacatattagtagaagtggggagtgaaggggttaaatccaagtgcatgtttcctactgcctcctcccactacagaagctagggtgcagatacatgatccaataagcttgaccaattggatggtgatgtaatttggatctcccctgcaaatctcatgttgagatgtaattcccagttagaggtagggcctggtggtgtttgggtcatggggactgatccctgatggcttggtgttgtcctcaccatagtgagttctcatgagatctgattgtttaaaagtgtgtgacacctatccccaccccctcgctcctgtttttgccatgtgaagtgcctgatcctacttcaccttccaccatgagcaaaagcttcctgaggcctccccagaagcagatgcaggcactaggtttcctgtacagcctgtagaaccgtgagccaattaaacttcttttcttataaattactcagcctcaggtacttatagcaatgcaagaatggcctaatataggtggtctctcctgggacttgaaatcttgaggaataatgaaaataaccccttaataaattccctttttgcttaagataacccagaagaatcagtttctgttgtaggaaacaaagacttcattaatgcaaatgtcaagagaaaattcaaactagtttttacacatcctacctgtaaaagttttgaaagctactaaaaggctttctgagctgttaaatctgaaggatttataacagattgttattttcaaacacgagtattctatgtatacagtttgtgtgtgtgtgtattcacacacacacacacacacactcatgaaccacactgtgcagactcaatataaatgtacacctgagttgtgcaacattcaaatcaatgcagaaatcaagcaaagattagattcagtgaattgtagctatttcttggaaacattaccttttttttgagacagggtctcactctgtcacccaggctagagtacagtggcgtgatcttggctcactgcaacctctgctacccaggctcaaggcaggctcaagtgatcctcccacctcagcctcctgagcagctggtaccacaggcctatgccaccatgcccagctatttttttttcccccaagacagagtctcactctgtcacccaggctgcagtgcagtggcgccatcctggctcactgcaacctccgcctctcgggtttaagcaattctcctgcctcagcctcccaagtagttgggattacaggtgcccaccatcacacccggctaatttttgtatatttaatagacatgggggttttaccatgtcggccaggctgatctcgaactcctgaccttgtgatccgcccgcctcggcctctcaaagtgctggaattacaggtgtgagccaccgcgcccagcccacatccagctatttttacaatttttttgtaaagatatagttttgccttgttggacaggctcgtcttgaacttctggctcaagcaatccaccctccttggcctcccaaagtgccgggatttcaggcataagccaccacacccagctggaaacatcttttatcttaaaaattcctaagcatcctataaattacctcattactataaatttaattttaacgtagtattttaacacagttgccaggacctcattcaaaccttcattttatagatggagaaagagagctcacacaggggtgtccaagggagataatacagtcatgggttcttagtttccgcttctggttgggtcagtaaatacctcctcatctctcttttccgcttatcactagaaacagaaactaaaaaccatggcttcaggctgttaacagcctaaaacaaaacagaacaacaacagtaacaaaataaggtgggttggacaagtttggcagagagcctgcttggagaagctgtgtgaaaaaaaaaaaagactgccaccgctcctgaaagttctcggcccaagatggaatttagtcaaagaaactcttacactaataaaatttgtacatcaaattaagatcagggacagttaaaacattaataaagactgaagcatttgttcatttaaaaaattttatttaatatttacatttatttttaaaataaaaattagaggaaagcccatgaactcattttccatgaacataatataatagtactcacctatctcctctacccaacttgtgttttagatgagtccttttggatctttttccccataatggcctctctccttttgctttacagtgcaatcagggcagaataacagatatgttgagtagctaatttatatttctgaagatctccatagaactcttaagttctaagtcttcatagtctttgcaccttgccaagtttgctttcctttgggaattctgtcataaccacaaggttattccccagacatgcagtttggggaaattaacccggcagtagtaaacagactggattagaaaaggtggcagtcgtaataaggatattccaataaccggggaaagctacagaaggatcttgagttaggatgatgacagttacaatagaaaggagaccagtacaagagacggtgaaaacagaatggatacaatttagttgaagaattggctgtgggtgaaaagaagaaatcaaagatgcctgaagttgtgagtttcaggtagccctgagtttataatcctagttctgactcgtactatctttggatatactagctgctgactactaactgaacaaggtagtaaccttgtcatcttgtaacttacctaagtctgtttcctcctctataaaacaaactatcaaaataaagccgatgaaaagattgaagtaaaacataaaacccttagcacagtgcctagtatccattaagcagtagataaatgatggcggtcattattagggagtagggtaaagaacagaaggttaaaaacatgagtagcagtaaggacttttgggtggggattcggtctttctactacacattacacatacctctaagcagagaaaggggttggaggggagtttgataatgtgactaataatcctcctccccctgggggggatcttgataaaggatagccacccacatggaggcctaatataaactggattgcagaatgcacttgagctgggagcccaagcgggccaggcttcttgattcctattttatcccctttaacctaggatagctaggtctatagtgcagactcagacctaacttacactttcatttgcagctgaagtttcggaacaaagacaaagatagccagatcatattaattacacggataggcaagaaagcatgagccctgaggaggaaggaagggactgtccaggtgtacttacctcaaagatgagaaatatcaaagacaggaaaccctaggttcttgcccttcagtcgctatctccttgccattagtaaaatgcggccgatgaatgtcctcacttctgtccatctgggcaggaggtgggaagggtgacgtgcaaatggatgggaggaacccttttttcggcagcacccaccacacccagcctagtgccacgcaccgcaagcgctccataaacgcacacagcgtcgcctctaccaggatcccgggcggccttcgcgggatttctcctggcgtcggctttcagactcccgagggtgggataaatcgagagggtggcatcctttggcttttcttctcccaggcagctctgaaccatgtttatgcaacgtttaatgggctctaataaaacggctaataattttgatccgcggaagcaccgactcgctcgctaagccgaatctgcgagggtgaagctgcaactccaacgccggaaagcgcggctaccgaaaagcgcatgcgccacggggtggcacgaagctagagtaagctgaggaggtgggcggaaaccatggcaaccatgggtgatgacgacatggggagcgtctctagcgctggattatgacgctggattatgacgcaggcagtgggcgcggactctgcggttcgcttgactgacggcgcagcctccgggcctagccacagcagcaacggcagaggccagcgggcgaggtcaagatggtggctccgcgggcgggggaggcagtggagggaggaggagtcagaccttagccagccggaaacaccgaaacccagagacctcctggggagccgccgccgccgccctctcggccatcgctgcctccgccgcctgctccacctcgagggacgcgagcgggcggcggggctggccgtgagagagacaggagaggaaggagggcaggggcggagttgcccgccttagcccccgcccccggccgcggccccgggccctgccccgcgcggccctgcccggcccaccgagccctggtgtggcagcggctcatggcggccgtggggcccccgcagcagcaggtgcggatggcccatcagcaggtctgggcggcgctcgaagtggcgctccgggtgccctgcctttacatcatcgacgccatcttcaactcctacccggattccagccaaagccggttctgcatcgtgctccagatcttcctccggctctttggtaagggaacagggtaccgtacgtcccgggacggctatgcgggccgagacgttccccggggagcgggcaggcgcgcagaggccatgggtcgagtatgtgtctttgggaactacagtttcatccctcaaagggtcgtctttacgggttgggagggggaaggagatgatacttgtctgagttgacagcggagcagtccccctagcgaggattcagtgttgtacctgagtgaggtggggagaaagtaaggatgtgtgagcatgcagctctttgcccgtttgccttgggaaatgagtactggcttaccgcgtcctatgcgacagccttcgaaaaacaactctgctatcccagtctcgtcgtgtgtgaccttggacttctgccaaggcgtgggcctcagtttccctttattaccaaatgccgagtacttgtatgttgtcacttctgctgcacccgagggtccacaggatcgtgaagtgtctgcagtaaatgacatccaagcgaaggagacagggttttgaatgtcagaccttgaaaccattaccaaaaattctcatgaaagcggcgatgcttaaatcgagtcctaaaattttccatgaataaacgagaaggtattgaaagtgactgtaaaaagtgatgagacatttgccaaagagacttctgaaaatcattgtctttgtttcgtatggatggagtgttaaaagtatcttatatttcatttcttcctttccatcttcacttacatcatcagagggagatgcatttatgcgtaaaataattttttaagtaattgtaacttggcaaattttgttgatgaggtaattctggtgatcggtcttaagtaggctagtgcttttgaagtgttgctgagggcagactgatggtgaggtctttaccaagcctttctgaattacaagccatctgttgctttattccttcaaaagaggagtggcaataaaggccgaattttgt

SEQ ID NO: 11862 - DNA, 6000 bp, Homo sapiens
aaaaaaaaagaaatgcgctagagcaagggattggtaaactaaggcccacaagccactgcctacttttgtttgcctctaagctaagaatgactttacatttttaaatagttgaagaaaatcaaaagaatattttgtgacacatcaaaattataagaacttcaagtttcagtgaccgtaagttttactggaacatagccacacctatttacatactgtctatcacctgcttttgaatgacaaggtgtgagataggaaaaaatgcaaactgctttctcctacagtattctcatactcacaatactctgaattttttgtttgtttgttttaagtagagatggggtctcactttgttgcccaggctggtcttgaactcccgggctcaagcagtcctcccaccttggcctcccaaagtgcttggattacaggcgtgaggattcacttctgacgtcaggtatgtgtggggtttcctctcccaacaaccaattctctgacaccagctgggtgacctataatttaactcaattctcacactatctacctggatataacatcagaccgcagaggtcaagggctcagtcccacaagactctccccatttcagataccaattacaagcagtaggttcccaggttacccacaacttgtctaacttggctacaataagaggttcccacaacccccttctcaggtttgatcatttgctagagcagctcacggaactcaggaaagcactttacttattacccattcattgtaaaaagatgccattcaaaaacggccaggtggaagagacacatagagacatgtatgggtttttatagaggcttcaccatgtaggtatgattgattaaatcactggccattagtgaacaactcaaccttcagtttctctccccttccccagaagtgggagtgggtgggagggactgaaacttccaactctctaatcacatgatgggttttcctaggcaaacccccatcctgaggctatccaggagcccccagccatcagtcatcttagcagcatacaaaaagacacttagcacttaggagattccaagggtttcaggagttgtgcacaaagaaatgggagcagagaacacacacgtatttactattacatcacagtacacaaaagggcagagttgaatagctgcaatagagatcacgtggccctcaaagtctaaaatatttactatatggccctttaaggaaaaagtttgcaaacctctgcacttgattcaaaaatttaaggaacaaccaaatgtgtggctctaaatgggataccattttggacatgaccaccaagggacatttttggaacaacaggaaaaatttgagtatgattttggtactagttaagatgaacatttcctgaaatggaaaggtggagactgtgattgaaaaaagcagagcacaaaagagtagcctcagtatgatcttattttgtttggtatgcctacagaagatctggaaagatagacatggtggtgttatgtgtgatttggaggaactgtattaatctgcttttgcattgctataaaggaatacctgagactgggtgatttataaagaaaagaggtgtatttggctcatggttctgcaggttgtacaagatgcatgacaccaacatctgcttttgggaggatctcagtaagcttccaatcctggtggaaagggaaggggagccagtgtgaactcattaccacagggaggccatcaagcctttcatgagggatccacccccatgagatggatgttgggaagtgacccaaacacctcccactggaccacctcaacattggagagcaaattttaacatgagatttggaggggacaaatatctaaactatatcaggaatggaatatgatgtttttattttcactgttgtttgtattttgcattttcttcttgcacagatatttctcattttttggtgtactatgtagtctaagatcaatgcagtagagattctggcatataatagttacaggtagaagtatttttgagagtggaagagtttgtaaataacacccagggaatagaattccacttgtggagacagaaaagagagtataagctgggctaaagaaattctcatgctggccagtggctccacgtgtaatcccagaactttgggaggcggaggtggaaggactgcttaaggccagcaattcaagaccagcctgagcaacatagcaggacacagtggtctacaaaaaaaaattagcctggtatggtggtgagcacctctagtctcagctacttgggaggatgaggcaggaagatcacttgagcctaggaggtcaatgctggagccatgatctaagccactgtactccagcctaggtgacagagcaagaccctgtctcaaaacaaacaaaaacccccactgttggggtatagttctaaggggcagccacttgttatgcaagtagaaaagagagaaatgtagaaagaattacaatggtcagctgtcttaaaccaaaatctaaggtaattttcataaaatgggttcaatttttcatgcaattgtcccatgtgaagcttgttccagggatttaatatgatgtttttcaaaatattgttcagaactcattattaggctaagaaattagtctagcgattcatgggcagaattttttaaatgacacaaactgaaagattaaatatcagagtaagtcatataccaaggatagaatgcataatatgatctcatttctgtttcaaaaggaaaaaaaaaaaccttgatatgttgtatttttatgaatctgtataacaatctattaaaaaattagggaaggctatacttcaaacttttaatatggttactttaggagagtggggctaaaggaaaccatacagaaaaaaatttatttcaattatttattccaataaagtcaccttctttaagaagtcttttcttgcttattttatctgatgctaatccctttactaattttcttatcaccttagcactaaagccactcattcatactttcccaaacagtcattgtactacgcccctaggaaaaaaatataaataccataccagtatctgccttaagagtttgatctagtgggaaaggcatactcatatttaattataaataatgtggtataagttttaaggagtgagtaggcagacaggcaacagggtagttggtaggcagaggaatattttggccccaaactgccactctaaaaccttgtcagaggtaacaaacagcatgcacaagtgtttatagagcagcccagggatgggctagaaaagtgggcaggactggaccacagaagggctttgtatggtgtgtaagcatttaggctatcctgaggagcgtaaatgaaagatttgaagcaaaagaaacatttagctgatttgatttttagatacaccaaaatggagtctacatggaggatggatttaagacattaacttgaggcaggaatttggttgtataacataaacacacttttaaaaagttatgtggcctttctttacggagtacttcatggctctttattccatctccctcatcaattatatcaaaggttaggatggaaaggctaagacacggcaatgtcttatttgacaacccctccccaaacccctactccaggctttcccacagcaatttcaaaacctttttcctggcacttaacatattctcccctgcatttgcttttgactgtacagtacataggtcttaggtctccagtctgaaaactgcaccactagattttacagttccacaggacttagcacaacgtctttgaaaaaaaaaaatactgcttaaataactctcagatctaaatgtataatcctaatctcttgattgccagaccacattcccaattgcccagatatctctacctggatgtcctataattatctcaaacttaacctaatccaaatggacctgggtacctctcttcaccgccaaactagtcatgcttccatttcatatttaagtacttttccaaaccctgagtcatctttgttcactctctactaccggccatgaacactcagctgctaaatgctgcacacatctcttccatttctctctcttttccattaccctagtttaagctcttgaaatgcttccctacctctccctatttcccacaaaacctacataatagctatcaggattaccttgctaaagcagaggtgtgatcactgtcatttcccaccttcaggtagctggaaaccccacaaaacgaggatcatgcccatttaaatcccgcagcattctccctctcgttctactgatgccgactggatcattgtacttgccaagtacagtttgtttttctccccattacttgtgttttctagtttctccaccagatggtgatgacagtacaactgggagctttgtgccctgtgttcctaggccagtgccaggcccacttgaggcgctcactaactatgatatgaacgaatgaatgcttgagtgaattggtccccagaagcggtcagcctctccgccaaggcagaggggaagggccgggaggtgcacgtgggatgaatggaaacatagtgattggcctttttggagttttcttcttaaaaaactgaatacattacagatgttgaaaacagcacaaaaatcataactgtacggcttgttaatttttacaaataaatacaccctcgtgaatccagaacctagatcaagaaccagagcattaccagcacccagaaacctccccgcgccctcctccactgagcggccctttcaacccttacaatgccggagggcgcaattcctgggtcctgtgaccttggtgaccgacgcccgggacaagtcagaaagacccaagggcgtggaaaacgctcctcttaccgataaacttgaagcgactcatgactgcgcatggaggacctccccagcggaagcggaagtggccgccggcaactccgcccttccggctggccccgctcagtcacccgcagcaggcgtgcagtttcccggctctccgcgcggccggggaaggtcagcgccgtaatggcgttcttggcgtcgggaccctacctgacccatcagcaaaaggtgttgcggctttataagcgggcgctacgccacctcgagtcgtggtgcgtccagaggtaagggatggggacccaggactcggggaggtgaccctcggggccccatggaggtggagaggcccctgggtacctggaggttcaaggacttcgggaacggaattggaaggtggcctctcgcttcacagaatcctatggtagacccgggttcaaatccaggcttcgccacttatggccgggagaccttgtagagttgcttgtcgggtctgggcgtcagctttttgtttagtaaaacggacgcacgaccagcgcagagggtcgcaggaaaattaagtgaaataaaggaaagtgcctaaaattgtaattgtcatgggtccagcgctcgctcaatcgttttcttcacgatcttctcctttccaatattaacagcaataaactatgcattattttcttcagtctgcaaaactctaggagttaggaattatcttaagcttattttacagataagaagatgagcacagctggtaacttgcgcaaggtgatagagtttctaagtgtctgagccagggttaaaatttaggtctttctccaaagcatcatcattctcccacccctcccattagcttttctctttttagcttcatctagtccttttcattacctttacatctttttcacctcttacataattctctttcgacctctatccgtctgagactagtctgagaacatagtgttaaaatgtgtagattttaatcacctaaattcattgcagggtgggctaacaacccaagatgtgtgagtgcctcgcctccactccagtcttacgactctccaaacgtagttttataagaaggccttctgggaaaaaaactctatggaaaatggagtaggcctggaagaattacagagggtaccctcgaagcccagattgcatatatgt

SEQ ID NO: 11863 - DNA, 6000 bp, Homo sapiens
aagccaggtgtggtggcacatacctatggtcccagctacttccaaggctgatgttggaggatggcttgagcctgggaggtcagggcttcagtgagctatgtttgtgccactgcactccaactgggatgacagagcaagaccttgtctcaaataaaaaaataaaaaataaaaaataaagaaaattttgagaagacaattatttcgtttgctaccaaaacaatgggataacatttttaaaaagaaagattgtattcaatacattgaggaaatgcttaccatatgccaaatactgagtatacaactgtgaataagacatggtccttgtcttgaggagttgaatcccttgtgttagggaagcaggagcctaggagagccagagtggcaccactttaaaaatcaactccatcttgagactaacaaggcacattccttttcggtcacaacccataatcataacacgtttatagttgaggaaacagcctaaagatacctactacaaggacacactcctacaaaagcagaaagcccacatgtcccaatacccataacaatctatgttttcaagataattacagttaagctttgatgtattcacacactagaatgtcaaggatagttatctttaaatcaatagaataatttgtaatgctgtctgctcaccgacatgtagacacagcttagctttttacatagataagacctctgtataaggaaaacttacagacaagacgtgcctcctcttactctctggggatgccctactttgtaatggagtagcttttaataaactctcttctcactgcgctctgctactagccttgaattcctttttgcatgagatctcagaaccctctcttgagctctttttcgacaacttggaaaaggcattgtgagtagataattatagtacaaattggtgagtgactgctacaacagaggtggaattatgaaaacttgaggaaaaaaaagatgattaatctgaggtctcaaagcatgggtagttgaggaaagctgggcgggactttttcttgcattgagaatggcacttaaaacacaaatctagcctggtgtgccaaactaggctaacagtgaaaactcaaaagcttaagcaaaaaagagatcagatgtgcttgtttgtttcaagataactaggtctttgtgtggggagaaaaatcaagtcacacattcctaaattcctcacatacattttctgggcttggattcagactctgctagtcactagctgtgatcacttccctgtgcatgagttttcttgtctgtaaaatggggctaaaaaaatagtatcttagctgggtgtggtggctcacgcctgtaatcctggcacttggggaggccgaggcgggcggattgcctcagctcaggagttggagaccagcctggccaacacagtgaaaccccatctctactaaaatacaaaaattagccgggcgtagcagcctgcgcctgtagtcccagctactcgggaggctgaggcaggagaatcgcttgatccccgggaggcggaggttgcagtgagccgagatcaggccacggcattccagcctgggtgaaagagcgagactccatctccaaaaaaaaaaaaaaaaaaaaaaagtagtatctccctaaaagtgttgtcaggaagccaaaacgagctaatatatgaaaagtatttagaatgctacccgtactatatgtgtgagctcttgtacgaaagtatttctcatgtacctacttgatagcattatggctttctgccagtaagcagctgattttgtctcacatttcattgctttcccttcaggtctcaatgacagatttgtttttgaataaatgaaccatggcaagattcaaaaatacttaagcaatgcttatataacatttaattcagttcagaagatataggcattcagagtgtgctctgcggtaggtattacaagtgctctttttgccccaaattcagaagtggatcttgaactgcctaaaggattcagacctgacattgtaagaatgactttgtgaagataaaaacatatgaagaaagtcgctttccagagattaaaaaattatctacttaataagaaaaattccttttatgataatcttgagtacagagttagcaggtaacagccatcctggtgataactgtattcccatctgtaagagtcagttggccgggcttggtggttcatgcctgtaatcctagcactttggaaggctcaggcgggaggatcacttgaggtcaggagtttgagaccagcctcgccaacatggtgaaacactgtctctactaaaaatacaaaaattagccggcatggtggcacgtgcctctagtcccagctacccgggaggctgaggcttgagaatcgcttgaagctaggaggcagaggttgcagtgagctgagattgcgccactgcactccagcctgggccacagagcgagactctgtcacaaaaatttaaaaataataaaagagtcagctgctcctctattattttaacaaaacagaactcacagataccaataagcagtttattgaagaattctcttcaggaaatgatttcccatacattgaactgattctcttttctgcagtccttttaaatttgatgtcagttcagacagccaaacttactggtaacagtgaggaatattgtagaagaaagaataaaagtattggaaagcaaggcagttattgataattatgcatactggggaaccacaagatttggagaccaggactttgacttttggtttcatcattacgatttaatcacagctgtgatttagtcaagccatttaacctctttaattttcattttcctcattttaaaaatcaaagttgttttgagggtcaagtgaacgcctgtgcgggtgttttaccaaataattattttattagcagataaaacataatattgggggtgaaaagttataagaggtgccatgtttttttaaaccctgccaagtatctgatacagaattgcaaaggatgttcgagttcatgaagaagttgccttctccccacagaggcagagtgacttgtaacatctgtaaaaggtcacagtctggttagcggtagccagaatctgggtctcctaactctagttgcctagtcttgcttttatgcgccagtgtcgttcatcattcattaaatacatgttatggaggataaattaagggcagagcattgtgctaggtgctgtgggtgatcttatcagacacagatctttagggaatctagagattaaaaagtatgaataaagttatgtgacttggtgaaggtcaatggcgatttggtggaagaggtgacaatgcagccacgctccaaaaggcagaagggatttgcacctattatcataggggttaaagaaggaagtccagagttaagaaacaggatgagcaaagacactgaggtcttaagcctcaataaattttaggtaagtttcatcgtagtagaataagggctgtctcactccgagacttttgcacacttttgctccctcggactgcttgtcctggacaccgtgtaacctccccctgggcgcctcaccagacttctccaggccaagggaaggaccacctcttgggtttccatggctccctctctaaccacccccttctcaggacacctatgacacgactatttgacttctttgcctccgagcccccacccccaacgtttctggtcttgagagaacgggctgggcgcatccgtgtatctctagcctgagcacctggagcgtcctctccttttcttcttaaggcaaaagcctactcattcttccagcttcagctggaatgtcaggctctccacgcactcatggccctcccttccgccctctccacatacacagggcagggaagctgtgtctgattcctctttcggactccggggactgacatatcataagcgctcaataaatgctagcggaatgaatggaaacgttccgacccgaggcagcggatcactccaggcttctcctcaaagcgagcacacctcagtccagggagggcgcaggagctggggctgctgcggtgaaccaaccccaaccccgaccccgacgccgatcccggccccagagcgcctcctaggcgacccctggccccacccacgccggagccggcccgcgcccatccccacgccccaacccgcaccacgcaacatcgccctagcgcctttcggggcgtcgccgcgcaggttgcgccgcctccgattggccaaacgcggcatagcgccatctcggcctaccgcgcggtgcgcgccctcattggccggcggcggcaggagcaggggtagggggcggggcagcacgcggggcgcgcggtatgggcggactcgcgcctgagccccgcccccggtccctcgtctgggccgagcccgcccagctggctgagacgcgtggagcctggcggcgagtgggggcgtgcgacggttactctggttactggggccgcgccgcgctggcgagagccgccgcccgcgagggatgctggtgaggaagccgtcgggagccgccgccgccatctgagggaggtaccctggaaaccaccttttatcggtggggaagtgcagtcgcggtgggcggctctgggggccagcgaaacgggaggcctctaaatctttaggttggggctgcattgccctggagccgcactcttgagtccgaggccatcttttgttggagaaggcgtcggcgttggcgttttcccgaggttgggctgtacagtgtctccgtccgcggaaaaagaagcctctgaacccgcgccggcccgcagcccccgtgccttccggccgctgctcgccgtcgccagaggctaggccacgtttcccccagtgccgaggtgtttctgtgaccctccctccactcccattcccttctgaaagggcacctgctcttggtgagaaaagaaattatagcacgaagagccagtatcagaagagtatccatcacccgcagcaaccgctcagggaacaccatcaaaaaagaaaaaaagggaatatctggatttcctgggcgaggaggagcgagtctgctcgggagctgttccagcaggcgatttttaaatactgctttctacgccctatacaacttggcttcacatacttttacactaactttatatgatttttaaaaactggtctgatcggacttctcgtcctgggacactgtttactggagtctggccggctctccgtgctcctcttggtacctcattttggggagaaccttaaacccactcgagcagataatctccgccttgaccggtgccaccaaagaagccttggaaccatgtggacttttctgggcattgccactttcacctatttttataagaagttcggggacttcatcactttggccaacagggaggtcctgttgtgcgtgctggtgttcctctcgctgggcctggtgctctcctaccgctgtcgccaccgaaacgggggtctcctcgggcgccagcagagcggctcccagttcgccctcttctcggatattctctcaggcctgcctttcattggcttcttctgggccaaatccccccctgaatcagaaaataaggagcagctcgaggccaggagggtaggttgatttcaaagcgggcagatgaatgtcttatttaggagtaggattgggttcactcaaatataagttttatttgaattgcaaaaggcggcaggttagatgcttgtatacattctcatgtattttttattttaaactctgctgtgccttggttacatctttgaccttcttaagaatgagtgaagacatttgtttcatttagcattggttgagcctcagatggaggttggatatttgattatgaaagatggaacgaaatgttagaatttcattttgaaggagaagaacaaccactttccatgatgaaaaagtttttaaaaagttcttgggtaaggattggatttgtgcctgaggaagaaagaaacgtgctgcgggtaagtccactgcttgtaagaagtgacagctgactgg

SEQ ID NO: 11864 - DNA, 6000 bp, Homo sapiens
tggacggtggtcctccaggagctgggggtcacaagtgcaatggcaggtgccagatggggctgaggccagcagggctgtgtgtggtgggacacctggccacggtcacccccagggaggccccgtcatccccaggagacaccctagctcttgcctgggaccccagcaccaggccacagggtccctgctgactcccccatcctccctccgccaaggcgcccctcctgcctgctgagctccagcctctttcctccaggaagaacgcttggccggcaggtccctgctcagatgcagtgcctgggacgtgcctcctggatgcccccacgacagtagctgcagcactgtctaggggggctcccgctgcaggtcccagtgatgcctggcacaggtgctcaatgaaagtttgccaaactcaggggcagggggagccaggagcgctttcagctgccaatgggcgacacagctagagcatccaggcttagggtagccccactgctgcaaaggtcccagctcagtgtcccaccaaactcccacaccctacctcactggtggtctcagaagtccaggtcaggcactgccatacctccaccccagcccccaaggggccggagctcagcctgcagtggccttccctcatccttgtaggtggcaccagctgcaggcttgggaagccgccccaccctgcccacaccaagtcagggcaggcctgggtgccccacagaacacagtgaggtggcactgggtggcctctgaggtcagatcacacgtgtcttgctctcctgggtagctccttgtgggggaggccagccccagcactgggaggacacccaagcatccctacagaggggcgtcttgaggaagactctgaagcagcagctaataacctgcatggcctggccagctgggacagtgagagggttccgaaggggatcccccagccgcagtcgggcccttgcatgtctggaaccctggccatctgactgcatctcatgagaccccagccagagaaccgccccgcccagccactcagaactcttgaccacagacgcggagagagagcaggttttacaggcacaactaatacacaaatgaaaatgtcaccatcacagtagcgtggctgcattaacgaaactaggggaaggagggaaatgaaaatgactttcccagctcctgcacgccaatcccccgagtcctggcctccctcaagccctgcttcctcttcgcatcaggggcgtggctgcttacgctggttccctcgatagcagagcctgagatagggacattggtgcaggtggtttatttgtgatgaccaggtgagggagccaacacaggtgtgttatggaggtctcagctggtttcaggacctcctgagaagtgtgccggacacctgaggaaggtccttctgcagatgggaggcaggtgtatccgccagagccctgccacactgcggagggctggccctcctctgcccttcagggcttggtacacacggaaggcaggcactgaggaggagggtccaagctcgctcagaatgggccactgccactgaaatcagggaacagaggggacgtgaagtggcccagagagcatcgttccgcacacttactctcttcctagatgtatactcctgcaccccgctcctgtttacctaactaaccactgaacaacaagctcttttttattttgtttgacgctcagggcttgaggaggattcaaaaggacagtcataaagacatctacttctgcgcaggcagaagcaacgcagcacttgacagccaccatcttgtgggtcttcccaagagccctgtgaggttggagctattactatgacatttatagatggggaaactgaggccaggagaggtcaaagtgtgcagcccagtgatgggggctcaagagctgctgctggtgccattagcccacccatgccctccgtggctggatctaggtcccccagcctgggcccctcctgtagggccctgctgggctggaggaggctttccagaaatccacttaacgctgacctcgtctttgtcctccttggagctaatctgctaatcctgccagccccagtgggcctcaccactgtctagatcgtcctgcatggttggcatccctctccaacaatcccccacctgcgggggcctcctcctggccatgcctccagggctgggcaggtccagtgactggggtaggtggagctgggattctttctgtggaacattcctcaatcctgggggagattctggagtctggaattcaggagactgggcctggcttctgaccccaccttttcacggctcagccatcatctctgaggccccgttttctcctctgtaaaacacgatcactttgagctctcttccggctatgaaatcccaggattctccccaagcctgttcatgcccggcccattccactcacagcagttggacagctctggtttcaccgtgcctgggtttgaatcttgattctgctttcgcttagcttctgcttcctaatctgcaaaatgggggtgtcagggattcctctgcagggctcagtgtggacttggtgggtgggtgtaagtccctggcatgtggtcagcactcggtgaatgtctgagaactgaaatgaatccagcatggaggagcctcctcctttgctcccgactccctgcaggatggtaagagcgtggggaggaaggaggctccagcctctcgggagcccactcaccccagcaaatttgggtggctgggatagaaacctctctgagattttgggcaggagaggaggaaaatagcatgaaacaggcagggggtgttggtgctgctcaggctagatgaagccaaacatttatttattaatgctttttttttttttatcttttttgagacaggctctcgctctttcacttaggctggggtgctggcgggatcagggcttactctagccttgtcctcttaggctcaggtgatcctcccacctcaatctccaagctgggactataggagcatgccaccatgactggctaattttttattttttgtagagatagggtcccactatgttacctaggctggtcttgaattcctaggctcaagtgatcctcccgcctcagcctcccaaattgctgggattatagtgtgagtcactgtgcccggccttaagctaaacatttaaaaaataagaattaaaatgcagccacagtgaaacgggaaggggctgcttttacaggtgctgaacttcccggcaatagaagcatttaatgggaggttccctttttcctaggacctcaaagctggagtaccagggatgttgccttgaccttcccatgtgtggatttctgcttgaacacaccaagtacaggacaccctgtttagcagctaaacgtgggaattgcaccagctttactcccaacttgctgggcaatcttcgggagttgctgaccttctctgtgtctcatcagcaaaacagggagaacactagctctcccaacatgggctgtgtgaggaccaaatgagctgaggagcccagatttgaacccgggtctgcaaggttatgtcctctgagccatccccacccctgcccttaaggaccaggggcctctggacaccatcagcttgcccacctgtccaggatttgcacgcacctgctcggtgccagatgctgggcactggggacaaaccaggtgaggtgtggaccgtgacctgtgttgtcactgattgggggactttctggcagagtggagagtgcagtgggctgagagacaggatggccagtggagactgagctctcagaggcggcggcagctgatggggaccatgcaatgggaaggatggaggccctgggatagtctgcggtgaacttccaggcagaaggaacagcaggtgcaaaggcctttagctgggaaggaaactctgggttggaggaatagcttgcaggcgctctgagagaggctggcagccaggtggcagggaggcagcccagtcaggtggtcttgggacagtttagggtctctggccttcaccagtgaggtggtgtctggagacttttgcagacgaaggcagctctcactcccatcttcccggggtccctctggctgctgagggtggatgggtggaaaagcatctttcagggaagtggaggcagggctggagcagttgaacatctgactgggccaagggtccagggactggcatggaacagggctgggtgggtgaggccgcctgggagaccccagcttgcctctgtttccccctgtactggggcctcctgcgtgaaccagcactggtttttccagtaactggagccacaagcctccctaggaacggctgacccataagaggacgtcctcaaggtccccaagggctagaggctgagatgccgccttcgcctgggcgggcctcgcagcctggaggcaggcggtggtgcagctcgggcaggccccgtccacacgcctccccgctcttctgagcaccacgcgtcccgtgggctccctacccgtcctgataacacggcggtccgggggcctcgaagccggtctgaccccaagtacccgggccaggcggctgccgtcttgtcgccccagcccatcccctcagccagcccgcctggcggcacgggacctagccccagtcgacttagggggaaactgagaactccagaagtttcgtgaactccctggcttcgtccgcatcccgccctctgcctcttcgctcgggcttcaaaactgcccctccgacgcccgcctgccccaggccgacctggcctaggcgcccggcaggcacaggagccaaggtcagtccccgaggccgcccgcgcgaccggagccgcctcctcccagcccaggggcggcctcgggggcggcgggcgcgcggccgcggcgtggggagcgctcccattgggccgtgcccccacgtgacccagcgggtccggcgcgcgccctaagccggtggagccgcggccgcgcctgtgcgcgagggcgcgcgcgtcccgagccctccacccgtcgtgccggcgccgcccggaccgccaggtcagtctcctccgcgcccgctcggggcgggggcgcgcggcgctttgtggaggcgcgtggggggccgtccgcgcgcgagcccgccgcccgctccgggcacggcttcggggccgcgcagccgggagggccgccgccttccccctgcccgcgcgtcccgggaccctgcgcctggcggccgatccggcgggaacgtgggcctggaggctgccacgtgccggggccgagcctcaggaggccgctgtttccccaggcgagccacagaacacccctggctggaagggggtgacccgctcccgtttctgggtgcgcgggagacctcctaccctgagttcatcctgcgcagggtcccgcccaggatctggctctgcccccattcacggctcattttcctcagctgcacagtttggggggctggaaccccacagccttccgtgcctccagggcgggtcgtagatgtcagtggaggtcaggggaaagcagagcgtcaggtctcaggccgggtggagtccgcctcagaccataccagtgttgggactcgggcggcgcctcagccctccaagcacaccccggtagaatcaggtcagcagccttgatccacgtgcctcagggattaaacgggtgactcctgacacgcccctgggcagctggtggcccaggggtggggtggtggcatgcttagctccaagtgggcagagcagtttcaccctgccggttcccggagggaagccctttatgagggaggcttccctggccctctgtgatagcggctccaagggcagcgtgaggtccaggctagctggtcacagtgtgtgcccgggcaccctcagccaagacagaaaggcacgtgctgcaccccctctctctgcctgcgggctctggggtgtgccccgcacacgatggtgggtgttgggcatccacctagtctgtggaccctgggggccctgctcccaggttggagcagtgtcctcggctgcagaccagaggag

SEQ ID NO: 11865 - DNA, 6000 bp, Homo sapiens
cccaacacacccacatttacacacatgcttttgcttacacaacacacaaccggtgcacacacccacactcacttgcatttacacacatgccacacatttgcacatttgatccacatgcacagacaagcatcctctctcacactctcacacacactatgtggcacactcccatgcccacatagttggcacatacaaaccctcacagtcacatatcacacacacacagcttgcaagtcatggccttaatttccagaacccaaatgggggcttggcactgagtgcccccagccaacccatgtgcatcagtgggttttcctcctgatctgcaagggcgtttttccaaagcaaagatgctaaaaactgacaccagcgtggctttgcaagtgacatgctatctttatttttttaattaatgctgcatgaaataaaaaaaattacacacagggatgtgtgttccagcatgggaccgtgtggggccccagaaggtggtggtgggactccctgcaaggtgagtcagctcccagaagccccagggcctggtccggctgtcctggccccggcctcatgccctgcactaggtggaagacaggatctccagggaacccggctgctttgggcccatggcagtggggtgggtgggcagaaggccaagagcaaacaggaaaatctggagtccctggaggcaactggcagagaagaggaaggaggccaagggtgagtcacactgaagccacactaactgttgttattgtacatgattctgtgggtcaggaatttgagcatgctagagtcagatgtttcacagtggaggacgcttagtcatggggcataccaggcacatggtgggactagaacccagggccgctggatgggggttcccaaggcagggtctcctgggacaggaaggctggttccatccctggtgtgactgcttaccacctcagggacgggatcacttggtctcccaggacttgggtgctgctggtggggagtggagattggcatggaactggggtcggaactggggcctgatccccaagatgcatggggctcccccaggtgctcctaccattactcagggaaccttggatctcttctcaaagaccaagtccattctggcactggggagggatcagaaagagaggaagagaaggaagaaaatacactagtgtgtgatcacccagggggttcattttgacccctggcaagatacagccgatttatcaagacaggggaatcacaatagagaaagagtttaattcacacagagccagctgaccgggagactggagttttattatcactcacatcagcctctcagcccctgtccaccggatgaggatctgcaggaagccatgccccttgtggcagaacttcccagaaaggagaactgccagaagatccaggctcagtttaggctcaggggctgcattcagtgtatggccaaagtgtgaatgacaggggacagggattcgcctgtgaccagggtcaaaaatcagagggtgaccacagtcagggttcattctgtgaccaggatcagggctcagccagtggccagggccagggctcagggtggggccgtaaccagggctcgttaggtaaccaggattagagttcagactgaccacagtgagggctcagttttggggtgaggtcagaacccaacctgtggtcaggggtggggctctaggaatgtcacagccatggtcttccgtataggagccatgaccacggggccatcctcagaccagccacaccctcagtgcggcggatgctggggctgcggattctgtggtggggatcctgtgtgttgccccctccttggcctgcacccactagaggccagcagcacccctgagctggaataagcagagatgcctccagacatcaccaaacattccctggcggtgcagagtcacccacgtgagaaccactgccttacagcaatcactgtgtatcaaatcagatcaacaaacacttacacacctataaatatttgaggacggaaagttccaggctggcaccttgaacacagagacagataagaaaacgtcttgtgcgggagtggccagagtccgggcgagctggggcggggggcggagggaggatgggacaggggctgtcagccacacacggaagcagttcatgactgtatgaggccccttgtcctgagcttacaggacatgggctggagggcgtgtccagagggaaagttctgggtgggcagagtgggcaagcaaggagtctgggggaggctgcagtcaccctgcatggcctccagtaagttcctgtccctcttgggctcaggctcctcacttgccagagaagagacaatttccatggaaaagagcccaacccagtgggttccagggaggcaggcaggagagacctcagaaggacaggggctgacctggagccccgggggaagcccaaaggcagattcctggtgccactgagtcccagggaggtcgggtcttgcatcgtccctgcccccatcagtagtgtcaccttgatcccagactcaaggtgagacagtgggaagctgatgtcccctgaacaccccagaaacatctaccagccttcctggacggtgcaggccttcctggacggtgcagacctgctgggagagggtccgattccccgagacttttcctgactgcaacatcctcaccaccccctaaaatgtgccagagccttttcaggggcaaaatcgaggagaggaggtaacaatgaaggccggacaaccatcagcggggacgagagagcgtcaggggagaaggggccggtctccctccagacacacactcggcagcaggcagggccacggaccacagtggacctaccagcttccggcaggaacaacagcatacccaagagggttgccaggcagagttatctaactcagggtccatgtacaaaggcaggggtcaggttgaaggagacagcagcggccacaagtccccctcaaagccagccagcagcaggaagccaccagcccctcgggcttgcagggatgagggggagagcacagtgaccagaggctggccagaacccgggggacaggagaagcctggctgacgggacctgggccttctctagagggccatagccactgccaccaccacccagccactggcaggagagcctgggcctgctctagagggccatagccactgccaccaccacccagccactggcagcagagcttgggcctgctctagagggtcctagccactgctaccaccacccagctggctggcaggagagcctgggcctgctctagaggaccatagctactgccaccaacactcagccggctggcaggagagcctaggcctgtactagaggaccatagctactgccaccaacacttagccagctggcatgagagcctgggcctgctctagagggccatagccgctgccaccacccaccgcccagctgactggcatgagagcttgggcctgctctagagggccatagccactgccaccaccgcccagcgggctgggcctgctctagagggccatagccactgccaccacctcccagctgactggcaggagagctggcctgaacttgcctcttccactctctcatctcctgcctgtgggagctggaccagcctcccaggacatggagcaggacggagaggggatctggggcaaacagaggccatacagccctgggcctagccgctgcctcctgctactgcagaggctgctaaaagctgcacttccccgactcgtttgcagctaaagttccaagctgagggggtcactcaaggtcctgagggtaaagcacctagcccagggctcagcccacactgaatgccccataaatgaaggcccgtccaacagggtctcctccccagggaggctgtcccctgtgtcaacaagagccaaactctgtaaaatatttgaagacatttattctgagccaaatatgagggaccatggcctgtgacacagcccccaggagaccctgagaacatgtgcccaaggtggtcagtgcacagcttgatggtacccattttagggagacatgagacatcaatcaaatatattgaagatatacattggtttagtccagaaaggtgggcagctggaactgggggcttccaggttataggtggatttaaacatcttctggttggcaatcgcttgcaagagttatcaatagaaaggaatgtctgggttatacggggttgtggagaccaaggctttatcatcagatgaagcctccaggtagcaggcttccgagacaatagatggtaaatgtttctcatcagactgaaggcctgtgttgatgttaacgctggctgttccagagttctgaagggaggagggataatgaggctatccaaccctttgctgtcatggcctgaaccagtttttcaggttaacttcggaaagcccttgccaagaggagggttccactcagatggctggggggccttagaatgttacttttggtttataccggaacagcccctgcccctgtcctttgcagcacctgctaatgatctgtcagtgacgctgtgaccaaggctcatcaccctgcgggccgtgggccccagagggcggcacagcttctataggagcacagggcccagggaggtgccctcatccttggctggaaggccgaggcctggaggagtctggagaaagggtctcccttgtctggccttgcactgtgaggtgggggaggtgggagaggcataatctgggtcttgaggacgtttcagccctcagcccggggtggctgagatatggccctgggtaggctctgtcctccagaggtggaaagaaggacaaagggagagggaggtgcaggtcgctcagggaggagactcggacctgcccagccccggggccctcactggctccaggaaacccgctggtgttgactgtgggcagtccagcctctccccatttgaggccatataaagtcacctgaggccctctccaccacagcccaccagtgaccacgaaggctgtgctgcttgccctgttgatggcaggcttggccctgcagccaggtgaggccttggctggcccccagcagggaagggagcaggggtgagccggggaggccagagggatacctgcagggcacacggagaggaggggaaggaaggaggaagggagaggaagggggtgaggctcttgccctagcctccgctcctccagggaagctcttggcacgaccaggcagcgacctgttccctgccgtcccctgtgaccggggcttgcaggggcagcacggagtcactctccttcaccaccgtggggcagggcctggctcctagggggcaggtagacagactgacggatggatgggcagagatgctgatgaggagctgggagacatgggacaggaagcctcaggctaagaagtggtttttggggcacaagggggaggtgctgggggtgtcctgcgaggacccgggggtctacatccggcccagtcccagcactgcagcttccaagggtcccagggagctgctctgcttgaggtgggaccctcccgacccagggtcccgggttcagtcacccccacagccgcagcttcctcttctgaaacacacggtcacaaaagcagccaccgagggactaaacagggcaacatttcggaggcactgagcagggggccgtgaagatggggaggagacattgagggtgacaagagggcgccgaggacttcctcaggccaccgccatggaggcccacctgcctgggagcccccattcctggggagtgctatggggcagcctctgaggcccctcccactccaccccacaggcactgccctgctgtgctactcctgcaaagcccaggtgagcaacgaggactgcctgcaggtggagaactgcacccagctgggggagcagtgctggaccgcgcgcatccgtgagtggggggacgacagccgccaggcctaggtctctgccactgaactattaatctttctggccatctgtccgcatctgtgtgctgt

SEQ ID NO: 11866 - DNA, 6000 bp, Homo sapiens; identical to SEQ ID NO: 3107

SEQ ID NO: 11867 - DNA, 6000 bp, Homo sapiens
gggaaccaagcctgagagcagagtactggcagctgcacgttggaatgtgaagcctggacacagggaggtcaggcagcgagctcacctcacggcagcccagccagagagtcagcctgctctccccgcactgagccaaggctgggagacagcctacctcccaccagagccagcaggcaggtcccagcccagcctgccccgtcccgccccagcctgccctgtcctgccatctgcactccccgtcaggcctcctggccagccccacagtccctgccttccaagagacacaggcagcggcagcaggggctggatgggggaggccaagaatcagaggcgctcccccacaggacccctgaatcgtggccagagaaaggtcagggcaggatgaggcctgtggccacgggcagatctcaggtggctgacccgtcctaggagcacacagggcagctgtggctccttccctcttgaacccagaaaacagggcagagctcatcggtggcctcatctgccagccccagcagtaaggccaccggctcattcttcatggggcagcagcatctggctttctggctccagacaccgcctgctgggccaggccttcaaccaggtccctcctgacagcaggcacgcctgagtccagacccgagacagagccgggaggcagcctgcagcaaacgtgccccaaactccacaggcgcctaacccagtcctgccaggggaaagtgctcaaggctctgccctctcgctggaggcccactgctcactctcacccgtgggacttctccccacaggccccagcagcctcctcccgtcatctgagacgctaccaggacaaaagtcttccacaactagggccaaaggcctcttagtcatggaagtctccctgaacctattctggttcggaggttgcctggtttaaaattttaaaaattaaaaaaacaaaagcctccgcatgacagcaggcccgtcccagtcttatgatctctctgctctggtgtgggaggaggagggagtgccgtgtgaggaggagggagtgccgtgtgaggaggaggagggagtcctgtgtgaggaggagggagtcccgtgtgaggaggagggagtcccgtgtgaggaggagggagtgctgtgtgaggaggaggagggagtcctgtgtgaggaggagggagtcccgtgtgaggaggagggagtcccgtgtgaggaggagggagtcccgtgtgaggaggagggagtgctgtgtgaggaggaggagggagtcctgtgtgaggaggagggagtgccgtgtgaggaggagggagtcccgtgtgaggaggagggagtcccgtgtgaggaggagggagtcccgtgtgaggaggagggagtgctgtgtgaggaggaggagggagtcctgtgtgaggaggagggagtgccatgtgaggaggagggagtcctgtgtgaggaggagggagtcccgtgtgaggaggagggagtgctgtgtgaggaggaggagggagtcctgtgtgaggaggagggagtcccatgtgaggaggagggagtcctgtgtgaggaggagggagtcccgtgtgaggaggagggagtgccgtgtgaggaggaggagggagtcctgtgtgaggaggaaggagtcccatgtgaggaggaggagggagtcctgtgtgaggaggagggagtgctgtgtgaggaggagggagtcctgtgtgaggaggagggagtcctgtgtgagggggagggagtgccgtgtgagggggagggagtcccgtgtgaggaggagggagtgccgtgtgaggaggagggagtcccatgtgaggaggagggagtcctgtgtgaggaggagggagtgccgtgtgaggaggagggagtgccgtgtgagggggagggagtcccgtgtgaggaggagggagtcccgtgtgaggaggagggagtgctgtgtgaggaggaggagggagtcctgtgtgaggaggagggagtgccgtgtgaggaggagggagtcccgtgtgaggaggagggagtcctgtgtgaggaggagggagtcccgtgtgaggaggagggagtcccgtgtgaggaggagggagtcctgtgtgaggaggagggagtcccgtgtgaggaggaggagggagtcctgtgtgaggaggaaggagtcccatgtgaggaggaggagggagtcctgtgtgaggaggagggagtgctgtgtgaggaggagggagtcctgtgtgaggaggaaggagtcccatgtgaggaggaggagggagtcctgtgtgaggaggagggagtgccgtgtgaggaggaggagggagtcctgtgtgagggggagggagtcctgtgtgaggggggagggagtcctgtgtgaggaggaggagggagtgctgtgtgagaaggagtgctgctacgtaagaaggaggtagatgtgtggggggagagttggcattcggcccggtcaggactccatggcccttgttacagttgtgggtagaaatggaatctctgtgacatctcctgctcccctttcacctgccccaaggcaggtctccagtactccctctcctttctgatcatgggcccaaagaggctcattcagagaggatcagtcccatgccctgggggcaggaatgctgagcacatagaggtttcctggaggggccacgtgggcggcatggaagctccccaccccttccgggagacggcgccctgtgcctctcgcgtgtatccatttataattaactgcaaatgtgtttccctgagttccctgagccactcttgcaaatcaattgaacgcaaaaccgggaggggctgcagtattgctgggaaagagggtcctgatccagaccccaagagcaggttcttggatgttgtgcaggaagtaatttggggtgagccacagagcacagtgagagaagcaggtttatttgaaatggctccgttccagagtggggcgtgctcagaaagcaggaggaggagggcctgtcctctgttagtgcctctgcttacaagaaactgtaaggagctacaattacacctggaatgggcagatgcacccactaaggataggggctgtgggtgccatcagtgcccgttcatcctccaacctcaggctgctcattgaaattatctctgagtaaagtggcctgcactcttgggttatctggacagtctgcgggcttgctgggagatgccccatatggccacaaatattctgtaattataattggtgtccagcttgagacatggctatttttagaccataagcattaaccttataggtgccttgtgagtgcctcctactcacttcaagatggagtcactctggtcatgtttcattaaaccagaggcctggtgagcaagcgttcctctaacagtgggaacctcaacgtcgggccagtcggtaagaagttccagaggctggccctcgcagctcatgtgtgtgcatatgtgtgtgtgtgtgtgtgtgtgtgtgtgtgtgtaggtgtctggatctgacgctatctgcaggtaccggaatggtgttggaggacactcggctggtgtccgctgcagaactgatggcttgctcggtggcggggagacgtccacctgccacatttggccccagcagtcttgggagtctcctgtgttgatgtcttctgtgttgagtgagagacaggataaatggtttgagagttttttccaaacagccctcctcctaatgcagcttgttttctgaatcagagggtcctgtcttgaagggggcaaacccacccgtgctttcgtcccacagttcttactgagcccctgccatggcagggatggccccaggtgccggctgcagagacagaaccccctgccctcaccgccaacattccagaggggaagatgccctgcctgtgccccacgtaagacccagaggcagggactcccccgggccacagcctactggaggctcctgtccccagagacagctgggccatcgcccccaaagctgtggaagccccacccacgatgccatcataccacggccaggacatctcgtgacacacacagccccagcctcagcctccatacacacacacacacgcaccacacacactcactcatgcaaaacacacacacagccacattgactgcacccctagatttgagacaggggtgttacaggtgtctgtcagccccagccccctcctgaccacatggccacctgcccaccctcacatttccgcacaccctccccctactcccgtgtggggttcagaagacccctccctggtgctcgccctgtcacccagaaaggaaacgcactgtcaactggagaacaggccggtggcagagccccagcgcccacagcccctcggagagggcctggcgggaggagaggcacccaccgatggcagagcctcagtgccctcgcagaagccagcacccacaacctcccacctcccaacccttgccggtctccccacccccgcctgagggatggccaaggaacagcccagcctggagcgggaagcagggacaagatgacctcaggaatcccaggctgcgggggtgcctgcgtcctcccctcccgagctccactccgcaggcgagacccccaacactgctccccgacactctccgaggcacccctcctccgtgctcacacccaaacacgtctgctcacccgtgggcttcccaccccgaacacaacgaggactgtccaggtgtcagtgacggtcaccccgacctggtcccctgtccggcctcgccaggtcagcacccgccgcgcgcacagcagggccgggtggaaggaggccgggcctggccgtggctcaggcgccacctcactggggaaactgggaggtggtctcagcccccttctgggcctcagcttccccatctatcccaaggagccggggtaggcctgggcggcgcggggacccccaccgcgggctcgccgactccgcccgccggaggcccctcccgcgtcccgcccctgcccccgccccggggccgcgcggctgcctgggaggctccgggccagccgcggtccagagcgcgcgaggttcggggagctcggccaggctgctggtacctgcgtccgcccggcggtgagtccgcgggcccccggccgggacgcccccgccacctgcgcgcacgcgctcagacccggcggcctcggctgcggtgcacgcggccccggctcagccacgcgcggcggaaggcgccctgcgggggccggggcgggagagggtgggagagagcaagaggggcgcacggggaggcgcaggagaggggctggggctgccggtgggttggtccccagagagctgagcttctcctcccatcccccgcaggcctccccgaatgtttccaaagatctggggcgggagcgggcggagactgccgccaggagcctcccggccgccccagggctgcgcagccactggagcccatcacccaactccagacgctcctggctcctctacgtgggccgggagggacagccttgaggactaggggagggggcacgggaccttgcagagctcctggccggaaagggaggattgaccgcccccggcatatcaccccggagcactggaacccgcccccgcttcttgttttggcactggtggtgcttgcggtgaggtccaaggagcccagcctccctgagtggaccgccgggcccctccccgttccgggacacaggagaggctcccgccccttgctggctgggcagcccctagatacctggctcccaggggccagcttccctgagcctggggatgagccatgagcctgcagcctgggccccaggggcgccccccacggcctgccggctggctccctccgggctccatggcccacccggccttcctaattgccttcggctcccaccggtgccttagctcagcctggtggcccagcgggttgggtgccacccagtgagcaggtggcggcaccagctggacctgtttgtggccctgtatgctaggacttcctcagagacagctcagggacccccccacaccagaacctcactttaggggggtggggggaaaa

SEQ ID NO: 11868 - DNA, 6000 bp, Homo sapiens
gtgtggcaggagggacactatgtgacttctgaggttaggtcctaaaaataccatgcacatgttgtccaccttgttgtcctggaaggctacccttggaacccagttgccatactgcaaggaagccctggttgcatggagaagccacatgtaggtgtgctgcctgacaggcacagatgaggtcctggcccgccaccagcatcagccaccaaagatgtgagggagaaagctttaggatggctgcagccccagctaccatctggcagcaactgtaggagagatcctaagtgcaaactatctagctgagcctagataaccccagattgcagcacataataatagaatgatttttattatttgaagccgctgaggttaagtggcaagagataaacagacatacaacccctctctggaaaggatgaggaaatctgcatcctcaaagggaaaagggaggcccacctgactgcagtgtggaagctcggtgtaaagggagggcatgagaggactggagaggtgccaggtgtggaccatcctgggacaccagcctggtcactttcctaggaccgctcaatgccttctcctgtcagtgtcgcaccccactgggttcatccttccactttcacacttggggcgcggggaagggctgaatgcaggcaccactggtcacgagggcgtgactgggcaattcctccttcggcgggcgcccacctcctggcacccgtggcacagctccgggaacggctgcgggcccagccgctgcttccccgatagcgccgccgcagttccccggagacagaagtagagccggaccgccggaaaccgtagatccggggaggtcggggccgcggtgaactccagttcaccaggacaggaagtgacagcggaacgccggaaaccgcagatccacggaggtcagggccgcggagagctgtagttccccggaaccggaagtgatggcggacctccggaaaccgtagattccgggcggtcggagccgccgggagctgtagttctcccgcggctcagagaagtaggcagagagcggacctggcggccgggcagcatggcggggctggagctcttgtcggaccagggctaccgggtggacgggcggcgcgccggggagctgcgcaagatccaggcgcggatgggcgtgttcgcgcaggctgacggctcggcctacattgagcagggcaacaccaaggcactggctgtggtctacggcccgcacgaggcgagtgggcgcgcgggatggggaatcgtgtggccgtgggagctgcggggcagccgggctgagcgctggctcggggacttgaggggcaacggccggcgcgcctcagtctacacagccgatgctcagcaccgcatctcactcggagtaaacgcaagtccttagtgtgctgcgcggtggtcctgcctttctcatcggcctctgtccctgcgccctccttcctctttgcggctcttcaacgtgctaggcactcccccactcgctccctctcctttcagctctactccgacgtcactccttcccagacgaccttattatccacgcggtacttctcgccctacaataaaccctttgttttgtgcacctacaatctcaaatgcctattttgcttaagcattttcccctttgtttcctcgctggaacataagcttcctaaagaaaggaactttacataaaactatctggtttcattactgtgcttccagcgctgtaactgcctggccagcgaaggtattgaaagagtgtttgcttagcgcatgagtgtgggagctctgctttccaggcggagggaaccagaagggcgaagaccacggtggtgaaaacaagcaaggcacttatgcagagcagaaagactgctggtggggaaagaggggataactccaaatcaggttgagggttcccggggaggtgaggacttagggttttgtagagtagggaaatgatttgggatcttatttcatatgtaatgtgaaacctttgtaaggtagttaggatttgagtgtgtaggtgagacagaagcagcgttgatgtttgtaaacttgggttggcagggaatggggcaaggatggacacaaggaagccaattaaaaggtgccagagggcgacacatgcaagacagagagcgcaaaacagggggctttgttttggaggtaacgcagttgccccttgctgaggcattgaaagtggagggagaggcagacccacagaggacagtggagtgtgagctggaaggagtgggcctggctcatgtgtctgtcctcttccagatccggggctcccgggctcgagccctgccggacagggccctagtgaactgtcaatatagttcagcgaccttcagcacaggtgagcgcaagcgacggccacatggggaccgtaagtcctgtgagatgggcctgcagctccgccagactttcgaagcagccatcctcacacagctgcacccacgctcccagattgatatctatgtgcaggtgagccagctgcagccgtcaatccagggagggaagggtgtgatggggttggggagggagtctgatagactgacaccctgggttccctgcaggtgctacaggcagatggtgggacctatgcagcttgtgtgaatgcagccacgctggcagtgctggatgccgggatacccatgagagactttgtgtgtgcgtgctcagctggcttcgtggacggcacagccctggcggacctcagccatgtggaggaagcagctggtggcccccagctggccctggccctgctgccagcctcaggacagattgcgctgcttgagatggatgcccggctgcacgaggaccacctggagcgggtgttggaggctgctgcccaggctgcccgagatgtgcacaccctcttagatcgagtggtccggcagcatgtgcgtgaggcctctatcttgctgggggactgaccacccagccacccatgtccagaataaaaccctcctctgcccacacacccctcactgtacgttatcacctaacagcacttcagagccatgtgaaggctggcagagcctggtctggtgctggctcctggggatgattagggaccctcgcccacacatgaacggcctatctctgtgtagcctgattcaaaccctgaagagaacagtggattagggggtttctgtaggggaggccctgggtggaaaaagcagcatgtcccagtaaggactcaaggcagctgagcaggaggcagggcctggcaagatgagccaggccattagactgaggaatctgttacccttattccagcacatcgggggccctgagcaaagggctgaggaagaactcagctggctctgggtacccaccctagggatgtgggggccatgtcccacaacctctggactatggtttggagccccctgggcttttcctgctgcttaccttgggctctgaaagtacaacagccaggcatggtggctcacgcctgtaatcccagagctttgggaggctgaggcaggcggattgcttcaggtcaggagtttgagaccagcctggccaacatggcgaaaccccgtctctactaaaaatacaaaattagctgggagtggtggcacatgcctgtaatccaagctactcaggaggctgagacaggagaatctcttgaacctgggaggcggaggttgcagtgagccgagattgtgccactgcactccagcctgggcgacagagcaagactccatctaaaaaaaaataaaagtacaaaaattacctgttctcatggatcacttgaggtcaggagttcgagaccagcctggccaatgtggtaaaaccccatctctattaaagacacaaaaattagtgtggtggcaggcacctgtaatcccagctactagggaggctggggcaggagaatcacttgaaccaggagttgaaggttgcagtgagccaagattacaccactgcactccagcctgggtgacagagcaagactctgtctcaaaaaaaaaacaaaaaaaaacttgttctcacatggagtcttcagctttgacccttctctctgcccaccactattttgtttgttgagacatggtcttgctctgtgctcaggctggagtgcagtggtgtgatcacggctcactgcagtctggatctcccaggctcaagtgatcctcccactttagcctcctgagctgagactacaggcatgccccactcacctggctaatttaaaaggaatttttttgtgtgtacagactgggtctcatttcgttgtccaggctgatctcaaaggatccacccacctcaccttcccaaagtgcaccctcttgagcaaactcccccttcattcacctctggcccaccgagccccgactaccagtccctgcagtctggaccctgggactgcttctcccctaatattccacggatctcctggcccggacagtgacagtatgatcccccactttataatgcacacaccccagctccagtgaagcccgttttggccagtagtgccatcagcatcttctctgcagtcatctgactctgaaaacctcggtgctgggctcacgctgtgactccactgggacgtcctgagtcattggcagtctcgcttggcatccattctctgaccgccgccggctttccacccacctgcccggctcatcacctctgactcctgcgggccttccagccggcgctatctcgcagcccccgaccagctcggcctgctgtcgggcatctctgctgtcctccggctgtagggctacctgcctccctcccggggggtgcactgcgagtccgactctagtgggggcagcgcctagcggactcccaaacccgctcaggtcctgccggcctcaccggcaccgcccaccctccagccggccgcggctctgcgcttgcgcgccggcagcacacagtgttaggggcgcgccctctgctctggacatgcgcgccgtcgcgagcgtctctgggaccggaagtgcgggcgagcgcgggtccccgggtctgacaggagcagcctgtgggcaccgcggcggtagttggaggcgggagagggtccgtagccgcgccgccctgccccgccatgggcctcctgtcggacccggttcgccggcgcgcgctcgcccgcctagtgctgcgcctcaacgcgccgttgtggtgaggacagggcccggggaggcggggacccgagggccctgggctcgcgccggcggccccatgcgcggtccccatcgagggccggggccgctccagctgctcgcgcccctccggctgctcgcgcccttccgctcctgccctctggaagcactgagggtatcaggcccaggcttagggctcgggtccggcgtcccgatgcaggactccgggtttaggtctcccagacccgcgcgatcgaccccgggtgcggaggttgtggcctcgggtcggcgtctgaggacccgctgacgctccggtgcccctccgtcctctctcacagcgtgctgagctacgtggcgggcatcgcctggttcttggcgctggttttcccgccgctgacccagcgcacttacatgtcggagaacgccatgggctccaccatggtggaggagcagtttgcgggcggagaccgtgcccgggcttttgcccgggacttcgccgcccaccgcaagaagtcggggtgagcggcagagcagggcgtatggggcgagcagtggtggctaaggccggggagctctgctcagaggctcccttcgtgtctgcagggctctgccagtggcctggcttgaacggacgatgcggtcagtagggctggaggtctacacgcagagtttctcccggaaactgcccttcccagatgagacccacgagcgctatgtactgggggagtggggtgtgcctgggcccagaaagcaccttggagggaggggtctgggctgggtatcaccttgcgggggtgtcatggggccaggaagctcagtgggagggaaatccctggtgggcactggagggctaggaaagttgtggggggcccttcagccccct

SEQ ID NO: 11869 - DNA, 6000 bp, Homo sapiens
gtaaatggtgtataaatgatgtgaggtaaaggagccaacttcattcattcattgacatttgttttgcaaatcgttggctttttgtttttgttttttggttttttttttttttttttgagacggagttttgctcttgcccaggctgtagtgcaatggctcaatcatggctcactgcaacctccgcctcccaggttcaagcgattctcctgcctcagcctcccaaatagctgggattacaggcatgcaccaccacgccccctaatattgtatttttagtagagatgggctttctccatgttggtcagtctggtctcgaactccggacctcaggtgatccccccacctcgacctcccaaagtgctgggattacaggcatgagccaccgtgcctggctgttttgtttgttttgagatagggtctcaactctgttgcctaggctggatcgcagtggcatgatcacagctcattgcagctttgacctccccaggctcaggtgatgctcccacctcacccgcctgagtagctgggaccacagacgtgcatcactcttggcttttttaagacagggtttcgccatattgcccaggctggtctcctgggcacaagcaatctacctgccttggcttcccaaagtgctgggatcacaggcatcagccagcatgcccagccctgtttgcatttgaatatccaattgtcacagaaccatttgctggagagagtcttctttctccattggtctcagtacccttgtaaaaaaaaatcaaatgaccatagatgtatagtcatagactttatttgtggactctcaattctattccattgatctatatgcctatccttttatcagtactaaaacctactataaacctacagtaatcaagttttgaaattgggtgatataagtcttccagctgtttcaccatgttagccagactgttctcgaactcctgacctcaggtgatccgcctgccctggcctcctgatgtgctgggattactggcgttagccacttcacccagcaagcctccatggtttgagaggagaaatcttttgttaattttgttgagaattcttttttctttctttctctttgtatttattattacttttttttttttttctgagaaggagttttgctcttgttgtccaggctggagtgcaatggtccaatcttggcttactgcaacctccacctcccgggttcaagcgagtctcctccctcagcctccggagtagctgggattacaggtgcatgccaccaggcccggctaattttttttgtatttttagtagagacacggttttgccatattggccagtctggtctcgaactcctgacctcaggtgatctgcctggctcaggctcccgaagtgctaagattacaggagtgagccaccgcgcccggccaagaattatttttatgtgatgagtcacttctctcttgctgctttcaagattctttgtctttcaacaatttgttatgtgtctcctttagtttattctacttagtgtttgtttaacaaaaaaactagatgtgcagattcatgtttttcatgaaacatggcatgtttttggcctttttttttttttttttgagacagagtttcactcttgttgcccaggctggagtgcaatggtgcaatcttggctcgctgcaacctccacctccaggttcaagcaattctcctgcctcagcctcccaagtatctgggattacaggtatgcaccaccatgcctggctaattttgtatttttagtagagacagggtttctccatgttggtcaggctggtttcgaactctcgacctcaggtgatctgcccacttcggcctcccaaagtgctgggattacaggcatgcgccatgacacctggctaattttgtatttttagtagagtcgaggtttcttcatgttggtcagactggttttgaactctcaacctcaggtgatctgcctgcctcggcctcccaaagtgctgggattacaggtgtgagctactatgcccagccttggccattttttttttttaagtattcttactcctttctctgtctagtctactcctgggactgaaattatgcatatgttggtatgcttaatagtgtcccacaggtctctgaggcccagttcatatttctttctttttttaaatttctcttcctcagacttccctttgtgtagagcctcaaggtcagccagaggtgagagtttagggctttttcaggtctctcctgagtatatatccatagtcctccgtgtgtatatgacctgtattcccaaaaatgttttgggcttttcaaagcgcctgtggacatctcattcccttgctcttcctttttagctttttgtttagtctattgtttgtggcaactgttatccatcacctcaggcagctggcactgggcaagccctgagccaatgtggtaggagtcttctaggcagccatcagacacgttcaataacggaggttctgtgcgaatgagggcattttgctcccacagtaactaggaatgtaggttcttatttccaagattaccactgagctggagggcagggttgaaccagggaaagctacaacccacaaaggccactgttcttactgatagtcacctgtttaattgaataacaccccctgggatgacgacagcctttgattaatttccatagctttgtaaaagttgattctgatcatttttgctatgtttttcttgctcttattgggtgaggggtgggcacattttttaggggtctttctccattttcactgacaactaattttggatttttattttattttttattttattttttcttgagatagagtttcgttcttgttgccaggctggagtgcagtggcgtgatctctgctcactgcaaactccgcctcctgggttcaagcgcttctcctgcctcagcctctggagtagctgggattacaagcatgcgccaccacacctggctaattttgtatttttagtagagatggtgtgtagaaagtaaaaagtttcctcttcaaagtttcccttcttgttaaagaataaatcgtaagtgttagaaataatagtttcttttacagactaacttccttcaagcctccttgttttgtgctaataattcttttcttttctttttttattatactttaagttctagggtacatgtgcataatgtgcaggtttgttacagatgtatacatgtgccatggtgtgctgcacccattaactcgtcatttacattaggtatatctcctaatgctatccctcccctctcccccaccccacaacaggccccggtgtgtgatgttccccttcccgtgtccaagtgttctcattgttcaattcccacctatgagtgagaacatgtggtgtttggttttgctaataattctttaagctctatcttatgtagctgttaaacatgctcacaggcaggtagtacattctatgtccttgtaccttaaccaaaatatttgtgctggacgtgctcacaggcacgttccagctcacagcctgtgccccttccctatttggcataagcaacttcctcttttcctctgttctcccttgcctttatctatttagaaaagttttaaattattagccagtcgacttttagtttagattgtgccatctggctctagccaatggagacaggacacagtagcagggacaagctgtgtaagggataaaaatagcttctctcctttattcaggtgtgctctcaccatttttccatctgtgaggagcaccctctctgcagaaagtaaaattgacttgctgagagaactttttgtcggaatgctgatctttccttatggtaccagggaacaagcgttctgtttctaaataaacattttacatataacacagggtttctccatgttggtcaggctggtctcaaactcacgacctcaagtgatctggggcctcccaaagtgctgggattacaggcgtgagccaccgcacccagcctagtttttaaattttatttgcttttttttttttcttgagagggagtcttccgtctgtcatccaggctggagtgcagtggcacgatctctactcactgcaacctccgcctcccgggttcaagcgattctcctgcctcagcctcccagagtagctgggactacaggcgcgcgccaccacgcctggctaatttttgtattttcagtagagacaaggtttcaccatgctgaccaggatggtctccatcttttgacctcgtgatctgcccgccccaccctcccaaagtgctgggattacagcgtgagccaccgcgcccggcctttgcttactttttaaatattttacaataaaaatattctcacataacaagatcatatttacttacttttttgagacgaggtctcgctcgatatcgcccaggctggagtgcagtggcgatctcggctcaccgcagtctccacctccggggctcaagcgatcctcccgcctcagcttcccaaagcgctaggacccaaggcgcgcatcacgcgtcgggccatgagtcaagggaatgaaggagaacagggtgctcagcctgggggcccagcctcccgctgtcacgcgctgcctgcggccgagacccctgcccgcgccctctgccgggctgccctccaagccgccctttctctggaggtcctcagcctgcaggggcaccctccacccggccatcgcgcagcctgggaaggtggagaaaaggagcgtcggggtctcggaggcggcgtgggaaacgccgggcggagcgtggcgctgtcacggcaacagagagacgcgacggggccccgccccaccgccagtttccacgacaacccgaagagcgtggggaggcaggcggtgccccggcccctgactgacgcgaccgggaccagcgcgcttcgtccccgcccacccgacaggccccgcccccgagcccggccccgccccgcgctccccggctttcgcgaggttttgactctcgtggcgccccaggggccgacgggagtggcggccgcgcggaggaggccaagatggcggcagctgcggcttcgcttcgcggggtagtgttgggcccgcggggcgcggggctcccgggcgcgcgtgcccggggtctgctgtgcagcgcgcgtcccgggcagctcccgctacggacacctcaggtgagcgctgggccgggccccggcctccgcgcggccccgcatctccgtgaaggtcacggcggggaggctgcgggcgcgggcctgggcagcgcggaagcggtaccggccacccagcgtccccggtcccagctgcctgccgaccttgagcgtgtgggatcagggctgggcgcccacctctccgaacggcagagagcccgtccccagcgtgggggttggcgggacgggctagctgccgtggcggggctggggctttcccgaatggcgcgcccaggacggctcttgcggctggctgtccaaactgggcccgcgtcctgaagtgaccccagcctgatctcggccagctgcttgtgaccttggcctgtcccagcacccttggtcacttcggtctgatccccggctcaggatccaggaacaccctctcctgagagcgaatcacggtctaggggtcagcggcggagagggatggggtgggtagtgggacagggtgtgcgtctggtgccctgcaggaggaggccattgctgggtggagaggtgggcgctgagagtcagatccccaggtagggctgggtggtgtcctggcaggcgctgagcggagatcttgcaggcagtggccttgtcgtcgaagtctggcctttcccgaggccggaaagtgatgctgtcagcgctgggcatgctggcggcagggggtgcggggctggccatggctctgcattcggctgtgagtgccagtgacctggagctgcacccccccagctatccgtggtctcaccgtggcctcctctcttccttggaccacaccaggtgtgcagctggctggctggctggcagcgggaggttctgggtggagctggtaaggtgg

SEQ ID NO: 11870 - DNA, 6000 bp, Homo sapiens
aaaaatgctcatcatcaccggccatcagagaaatgcaaatcaaaaccacaatgagataccatctcacaccagttagaatggcgatcattaacaagtcaggaaaaaacaggtgctggagaggatatggagaaataggaacacttttacactgttggtgggactgtaaactagttcaaccattgtgaagtcagtgtggcgattcctcagggatctagaactagaaataccatttgacccagccatcccattactgggtatatacccaaaggattataaatcatgctgctataaagacacatgcacacgtatgtttatagcggcactattcacaatagcaaagacgtggaaccaacctaaatgtccaacaacgatagactggattaagaaaatgtggcacatatacaccatggaatactatgcagccataaaaaatgatgagttcatgtgctttgtagggacatggatgaagctggaaaccatcattctcagcaaactatctcaaggacaaaaaactaaataccgcatgttctccctcataggtgggaattgaacaatgagaacacacggacacaggaaggggaacatcacacaccggggactgttgtggggtagggggagtggggagggatagcattaggagatatacctaatgttaaatgatgagttaatgggtgtagcacaccagcatggcacatgtatacatatgcaacaaacctgtaggttgtgcacatgtaccctaaaacttaaagtataataataaaataaaataaaagaaatacaattataggaattagtctatataaaaaagagaaaaacccttcaaaaaatcaatgaatccaggagctggttttttgaaaagatcaacaaaattgataaactgctatcaagaaaaataaagaagaaaagagagaagaatcaaatagacacaataaaaaatgataaaagggatatcaccacccatcccacagaaatacaaactaccatcagagaatactataaacacctctatgcaaataaactagaaaatctagaagaaatggataaattcttcgacacatacatcctgccaagactaaaccaggaagaagttgaatctctgaatagaccaataacagggtctgaaattgaggcaataatcagtagcttaccaaccaaaaaaagtccaggaccagatggattcacagccgaattctaccagaggtacaaggaggagctggtaccattccttctgaaactattccaatcaatagaaaaagaaggaatcctccctcgttttatgaggccaacatcatcctcataccaaagcctggcagaaaaagaacaaaaaaagagaactttagaccaatatccctgatgaacatcgatgcaaaaatcctcaataaaatactggcaaaccaaatccagcaatacatcaaaaagcttatccacaatgatcaagtgggcttcatccctgggatgcatggcttgttcaacaaatgaaaatcgataaatgtaatccagcatataaacagaaccaaagacaaaaaccacatgattatctcaatagatgcagaaaaggcctttgacaaaattcaacaacctttcatgctaaaaactctcaataaataaggtattgatgggacgtatctcaaaataataagagctatctatgacaaacccacagccaatatcatactgaataggcaaaaactggaagcattccctttgcaaactggcacaagagagggatgccctctctcaccagtcctattcaacatagtgttggaagttctggccagggcaatcaggcagctggaggaaataaagagtattcaattaggaaaagaggaagtcaaattgtccctgttggcagatgacgtgattgtatatggagaaaaccccatcgtctcagccccaaatctccttaagctgatgggcaacttcagcaaagtctcaggatacaaaatcaatgtgcaaaaatcacaagcattctcatatgccaataacagacaaacagagagccaaatcatgagtgaactcccattcacaattgcttcaaagagaataaaatacctaggaatccaacttacaagggatgtgaaggacctcttcagggagaactacaaaccactgctcaaggaaataaaagaggatacaaacaaatggaagaacattccatgctcataggtaggaagaatcaatattgtgaaaatggccatactgcccaaggtaatttatagattcaatgccatccccttcaagttaccaatgactttcttcacagaattagaaaaaactactttaaagttcatatggaaccaaaaaagagcccgaatcaccaagtcaatcctaagccaaaagaacaaagctggaggcatcaccctacctgacttcaaactgtactacaaggctacagtaaccaaaacagagatagagaccaatggaacagaacagagccctcagaaataatgctgcatatctacaactatctgatctttgacaaacctgataaaaacaagcaatggggaaagcattccctatttaataaatggtgctgggaaaactggctagccatatgtagaaagctgaaactggatcccttccttacaccttatacaaaaattaattcaagatggattaaagacttaaatgttagaactaaaaccataaaaaccctagaagaaaacctaagcaataccattcaggacataggcatgggcaaggacttcatgtctaaaacaccaaaagcaatggcaacaaaagccaaaattgacaaatgggatctaaataaactaaagagcttctgcacagcacaagaaactaccatcagagtcaacactcaacctacagaatgggagaaaatttttgcaatctactcatctgacaaagggctaataaccagaatctacaatgaactctaacaaatttacaagaaaaaaacaaccccttcaataagtgggtgaaggatatgaacagacacttctcaaaagaagacatttatgcagccaaaaaacatatgaaaaaatgctcattatcaccggccatcagagaaatgcaaatcaaaaccacaatgagataccatctcacaccagttagaatggcgatcattaacaagtcaggaaaaaacaggtgctggagaggatgtggagaaataggaacactttcacactcttggtgggactgtaaactagttcaaccattgtggaagtcagtgtggccattcctcagggatctagaactggaaataccatttgacccagccatcccattactgggtatatacccaaaggattataaatcatgctgctataaagacacatgcacacgtatgtttatagcggcactattcacaatagcaaagacttggaaccaacccaaatgtccaacaatgatagactggattaagaaattgtagcacatatacgccatggaatgctatgcagccataaagaagtatgagttcatgtcctttgtagggacatggatgaagctggaaaccatgattctcagcaaactatctcaaggacaaaaaaccaaacgcctcatgttctcactcataggtgggagttgaacagtgagaacacatggacacaggaaggggaacatcacacactggggcctgttgtgggaagtggggagggatagcattaggaaatttatctaatgttaaatggtgagttaatgggtgcagcagaccaacatggcacatgtatacacatgtaacaaacctgcacgttgtgcacatttaccttaaaatttaaagtataataataataaaatatatatatatatacacaaatggggatattacattacaacttcagagtgtgtgataagagaaagaaccaatgatttggtggagtggaggcaaaaaattgttgcatgtataagattttttgttttataaaaagttctggtctgggcgtggtggctcatgcctgtaatcacagcactttgggaggccgaggcaggtggatcacctgaggtgaggagttcaagaccagcctggtcaacttggtgaaaccccatgtctactataaatacaaataataatactaataataactgaacatgacagctcatgcttgtagtcctagcttcttgggaggctgaggcaggagaatcacttgaacccaggaagtagaggttgcagtgagccaagatcatgacactgcactccagcctaggagagggagcgacatcccatctctagaaaaaaaaaaaaagttctgacaaaaatagggcaaaatgtaggaaaataaagatctactatctgctatacttttctctatatttaaggatttatcttgattattttaaaaatacaccacacattccataccttacacagggtgacataagtgttttctttaaacatgtaatatatgcaaaacaaagcagttgagactcgtgggtagtttttttgtttgtcgtccactgtgactttacctcccttgtaatcggtgtgcaatacgcaggaaataaaaaactgtaaatcagacccattcagggctgctaatttttgttggtgtttcaactaaacccttcttgcttcaatggccctaaataggactacatagatcctgctgcctctgaatgtgagtccttaggcatagagatttttaagtcactctgaaaaatacctggaagtctaatagaagtatggtaaaattttataaagaagggagtttatgttacccatttttgcctttctgttggtattttaaatgatgaagttttaaaatataatttttagaaagaagtacaacacaagagcagaccattcagacacaggtagaaaaggtcgtaatggagtaagctcttttctcctgctgtggctgctgccacctagcggggcatttcgtgaacaacactgactgcaccgaagctgccttccatctgcttcaaacacatctgtcaatgccaagcttatatttggtttgtgtgccgtagaaagcttaaattatacagagatctggaagtctcaaaagcaatccttttatcctaaaatggatagctcagcatctagctcacctatctctctgcgtccatgacagactgaggtcctgtgtgctttatcctaatttacactcctgaattatcttcggtgagcctcattttcctcatccttcattgtcagacagtaagtaccgaggcacatgttggtgggggttgtgtgaaagcgaaatgagcttgcttactttacagctatggggtcaggacatgctcgatgcacggcaagtagcgctactgtgttctctcttgcagcctccatttcattgttttcgacacggagatggctcacgacatcctcaaggtctgggacgggccggtggacagtgacatcctgctgaaggagtggagtggctccgcccttccggaggacatccacagcaccttcaactcactcaccctgcagttcgacagcgacttcttcatcagcaagtctggcttctccatccagttctccagtaggtggcacagcgtgcttcttctttaccttgatatcaaagtcttgtcatgaacacagatctccctccatttatattcaccagcgtctccttacacagatgcaatttattgagcctaatttgaagttaggaaaatgcatgttgcagagaagagttctcttcccccattgctgggttcatggctgaggccacgataacagaagccagcttaagagaaatgcataaccaaactcatttgatgtgcattttgcatgccactggaaccttcagaaatgaagacccaaagaaagagagaaaattgtgtgttttaatgtatagtcgtgcagaagtatgattagaggacgaaaagatagaatttagtggtgataaacggggaggaacttaagtctcctttgctcagcttcttccctgtgtgtctatgtcttcattcctttcctctgcatcctgggagtgtccttctggaatgaaggtttcatgacctgcttccaaggaaggccagagaattattctatgccctgcttcagggcagaaggggcaagtagaggctgga

SEQ ID NO: 11871 - DNA, 6000 bp, Homo sapiens
ccgcagtggaggtctgttgctgtaggcatgattttggcttttaggcatcagatgatccttgagacccaggctttgctgctgagcgacagaagcttgcacattagcccctagtcttgaggcagggatattgcttaagatgcacttggctgcaaggaactgaatgctgaagagaggctcaaaaacaaaggcatttaactatcatacatgacaagacactggagatggacaatgccaagaatggtctagccattccaaagtgtttggatgttgaattcctatctctatgactctcctgacctatccctcatggtcatacattggctgccacagctccaagcatcagaacagcatcccaggctggaggcaagaagacagatacaacaagacttttttttgtagcagctctttcctcttattcaggaattaaatcctgatcagaagccaactggtagggttcctcttggggtccattacccagaatttggtcttatgtctgtccctacgctaatcattagtaaagggaaacaggatgaactgcttgacttggaccaatcatattcacgccctgaggctagggaaagaatctacactctgtgttgcagctagaatagagatgggcttctataaacaaagagagaggaggcagctggtagctggtagggtaacctgcagcggcagccacagggaactccatatccagctagagagagccatctggcttggtctgtaaggtctccaaggacagaaatcctacaaattctgtttgtaatggcccacttagctctctgggtcctctgagcctttgcacatgctattccctctgcttggaacaccaagcctcactgccctgggcccagcctgcatgtctgcagacaccagcaatgcagggacattgtcttcactctgtgtgtacccacaaccctgttcatctacagatgccttactctattccacttggtggtttacttttctgtctctcatcaatagaatatacatcctcacaggacagaaaaagtatgttggtcattgatgtctccaatgactggcatgtctcagacatgcaacatacgataagggatggatagtgacaattgtgaccataggggcagcacactgttccctccaccctaataatacccaggcagaaggcctcctctcagtgccacattgtccacagtaggcgctgaatgaaggaatcagtgtcctactaggccactaactggctcttctgcttccatttgttctctccccagctcatttctcaccctactctctagtgaatcaatcaccaattaatctcttatttttctttctctcctctttaattgaaaaatttttagtcagtcacagtggttcacgcctgtaatcgcagcactttgggaggccgaggcgggcggatcacttgaggtcaggagttcgagaccagcctggccaccatggtgaaaccccgtctctactgaaagtacaaaaattatccaggcgtggtagcgggcatctgtaatcccagctactcgggaggctgaggcacgagaatagtttgcacccagaaggcagactgtgcagtgagctgagaatgtgccactatgctctagcctgggcaaaagagggagactccatctcaaaaaaaaaaaaaaaaaaagaaagaaagaaaaaatatttttattatatatgtctatcatacaaaccttgaaaactgtagatatgaaaaagaggaaaataaaatataatctcagcattcagagatagccactgtttaaatttgattcctatcttataatatttttgctagcaaattcatatataaaatgggattacaatgtgatgtatttttccttaacgaacacatcgtaccatatttgcatgttaatacacactcgtatcatcatatttcattgtgggaaattataaataacagaaaacttcccattttaacaatttttaagtgtacagttcagtggcattgagtacatccatggtgttgtacaaccattaccaccgtccatttccagaacattttcatcttcccaaatggaaactccatgcccattaaataactgctccccatcccacttccctccagcccttccattggagatatgtatatatatatatatctatatctactacagtcacttcttatccaagatttcaccttatgtggttttagttacccaaggtcaaccatagtccaaaaatattaaatgggaaattctgaaaataaacaatatatgagttttgagttgtgtgccatgttgagcagcatgatgaaatcttgcgtcattctgcttgggatgtgaatcatccctttgttccacgtatgtatgctggacacactacctgccctatacaatgtgactgtatgagaaaaaaacttagtatatatagagttctgtaccatctgtggtttcaggcatccactgaaacgtatctcccatggataaggttgcagagggactgtaccacattctgttctactttctgttcctatgaatttgactactcttggtacgtcatttaagtagaatcatacaatttctgtctttatgtgattggctgatttcatttagcataaggtctgcaaggttcatccatgttgtagcatgggccagaatttctttcctttttaaggctgaataatgtttcatcatgtgtgtaaactacacgtttatccattcattgtttgatggacacttgggttgtctccaccttttggctattgtgaataatgttgttgtgaacatggatatacaattatctgtttgagtccctgcttttaattatttgggatatagcttcagaagaggaattgctggctcatagatataatttttaataactgcagagggttccactgtggatgagcaacaagttttgtttaaccagctccctgttgctggcctggtaggcagttgctactttttgtaaacatcaggataataaaccacctggtcaatatatctttgtcccaccggagctttattttttatttatttatttatttatttttgagatggactctcactgtgtcgcctaggctgaagtgcagtggcgtcatgatctcggctcactgcaacctccgcctcctgggttcaagtgattcttctgcctcagcctcttaagtagctggtattgcaggtgtgcgccaacatgcccggttaatttttgtatttttagtagagatgaggtttcaccatgtttgtcaggctggtctcgaactcctgacctcatgatccacctgcctcagcctcccaaagtgctgggattacaggcgtgagccaccacgcccggccccacaggagctttttaacatagacttgagcatttcactgccccagcccaagactcccagggctcctcataactcccagacttcgctccatctctgcagctcagggctcagtggacaaggtcctcatgttctagtcctgctgtcgctgctctgctcactcactcttgtgatgccccaggacccactactccacagccacccgcccttccttcgccactctctgcttttgcacctgctgtctcctctccttgaagtatatggccatccctcttcccaccaggagaacttgaaagccctctggacggttcacctggactcttttctcccttgggaaccttttgctctcatcacaggcagaattaaccacacccttctctgtcctccatacatatgcctgttagagcatttattatgtgttagcataattatttgttgatggagacagcttggaatgacagaaagagggcagagtctgtagtccaaaagacctgctccagaatcccagttcttacagtttgactttgagcaggctgcatggcttctctgagcctcactttgcatttgtaaaatgaagataataattcctactttaaaaggattatttgaggattaaagacaatgtattccccagtacttacacagattaggtataatagtattagtatcagtctggtagctatgacagtgatgactgacactggtgaagatggtgatggtggtggttgatggtgatgatagtgactatgattgtggtgatggtgatgatgttgatgataattatgataatggtgataatgatgacattgttagtgatgtaatgacgatgatggtagtgatgatggtgagaatggctgtgatgataatgatggtggtggtggtgatggtggtgatgatgaggtggtggtgatgatgatggtgttgacaatgatgttgtacttgttcttctgttagaacctgatcactacaatgccaggtggtgtgcagcttcatctgtgcctccttggtgtctgacatagagtacgtactctattatttcaaggctcacctgctttggcaggtggtgggttgatgcttcctgaattaacctggttggctgaaccttccttctgagtcctccccagttgcaaattttgtgagctgaagcagggagtgtccctgacttggaattgttagattggaggtttttttttttcagtggtccccttagccagtgaccccccttctctgggctttggtgccccaacaagggcctcctatccaacatctgattcaacatcatgattttcattcagaagtgccttgctctgtaaccatacccagattatttccaccggtgacttttatatcccatctggaataaacatcagcacctgaggagggagactgtgtttatttcccttctatctcctttctgcagtaccatccttagcactgagcccgcaccttgtctatgatggtggtggaagaagacaatgcttggggccgttgaactcgcaccaccccctgggcctgggccatcccatggttggcgtggtgagaatgatgacttgtcacgtctgtgtcccccatcaggcatattaccaaaggccttcctgtgctggctgggagggtgaccagatggcaaagccccgcccagccacagggctctgggtatgcaccacaccttccccattcctgcttgctcagtgtatcggttggctttgattcttgagtctttttctcctgccttctcctggagatgaagagaactgcaaacactgtgtactgctgcacgcgggcctcccccaggccaacagaactgctgggtgagtgctggctgagccttcccctgcaaaggtcatggtccagcctttccaggctatgcatcttacttccattccagctcttcacatctgattaaagatgaacacagtctttacaatacaaggaaagtgtgccatgggatgcttgtggaagtcagaggggagtggctttgtggaggaatggtgctggccctctcaggattggggagggtgaggcattcacagcagggtgatgcctttgacaaagtgcacagaggcggaagcatttgcactttcttggcagggacctggaaggaggttttttgtgtgttttttttttttttttaactcacatggtaacgacatggatttgtcttcttagggcatttcctaaaggagaagagaagacttatctctataatcccattggcctggttagaaaactgaggtctgctggaaggaagtgctgtggggagcaacgggtatggtggggctggagaggctgaacagcagagggaccagggctctccaaggtctctccaggccacagtgagaccagacccacagcacagtgccgcttgcccctgaccggcagtgagctgctggcctgggctgctctgcccactgggaggctggtaggttctgaaggagccaggcaggaagtccttgtggacttcagccagcttctcattaacacatggggctctctctgcccctctgttctaactctgcctgagcttttgcggtgcagcaacggctacaaccctcatctccaggaatggggggccctgctgactcttgggtagtccagaggcagggtaaggagaggcctgcctggcccagaattgggatccaaggactggctataggggtagagaggagtttttctttacatgttagacatgtttctgctcaattgggataaactcc

SEQ ID NO: 11872 - DNA, 6000 bp, Homo sapiens; identical to SEQ ID NO: 3771

SEQ ID NO: 11873 - DNA, 6000 bp, Homo sapiens
cctacacatagtcatcacccagttttattgaatctttatattttgccatatttgctacaaatcccccactcccagtaataaaacattaggaatagagctaaaatctcttttctttctctctccctagactagatacttatttgaatttggtgttaaatccttcccatacatgttttcatgttgttattatatacatatatagacattaacagtatgtagtactgttttgccttttttaaaggtttatgtaaagctgtcatacaaaacattctgcaacttgtattttgtttaaaatgtttttgccatctatctagtttgatacatgaattctagttcactcattttaactgctatgtaatattccactgtaataggtcagaatgtgttaatttcttcacctgttgatggacatttaaagcattaaatgtgcttcaggaacatgcttatattcttgccattttaattaaccactattattattacacagtagtacaatgtttcaggttaatgaactttttgttcttttgatttagcaaaaatgatgtacaacttgtgctgtagaagcatctggcctgaaatgcagggagatcttaaaagtgtgacctgaattttgttcagaaggcctgaatgttgttgggatagttttgagaaatagattcatcctctcttagccatcctcagaaggcaagaaaggcatttcctatgacgagagtttcgttaggatgaacctttctttctctgacacgatacttactttgtgttcctctgttttcttgctgtttcagacagaatgttgctgcgggatgtaaaagctcttaccctccactatgaccgctataccacctcccgcaggctggatcccatcccacagttgaaatgtgttggaggcacagctggttgtgattcttataccccaaaagtcatacagtgtcagaacaaaggctgggatgggtatgatgtacaggtaatatccactacagtaatggcagtctaaatggggtttttattcagtaaattgtttattgggacattattcagtcttttgagggtgcacctacggaaatctcagatcagcctaaaatatgtaagtaaatcaatcactcttcctgtggaagaaatggcctccaaaagaaatgaactgattttaaagcctgaaaatactcattttagtttttgtatcgtgacctccttctaagatatttgtaaattttcacaactttttatatacttgagggtgagggataggggatatcttatggttgtcattttcctgtcgttcctcaaagaataccaacctacccttaagacaaagttaagataattaggaattatagatcgtaaatagtaggggttcatatatctctattgtgcttctagcacttgattttaaaattgtcttagaactgagggtggttacttttgaaaggaagcatttcggcaggtttcattgattgcctttgggacgctggtgttttgtatacgagcagagcatctccttgaagttccaaaactgaatatgctttagagatagattttattaaatgaattcagtttaaatcactagttacatatttctactttgtattctgactgctttcaaaattgatttaagacgactggtcacaaggcaagaaacttatgttgacgatttcccctctccatcagaatgatattcttgtttgatacaacctttatgcgtggtctttgcaattcagagaggaagttgatgtgtactgggtgatacttacttcacaatattttcccccagtactgctaagttgaatcatagaattctctgggttatagcagaagtctcactccactttacttatgacttttagagtcttgatgggaaaaaaaggcagtaatggtgatgtcattcattaagcatgtattaattgcaatatacaaaaatgaataaggtagaatgaagaaactgtcttactagtagaagaggtaagacaggcactcagattacatgtaggtcccaacacaacattataaagtcacgtctggttggagccattgggacttaaaggatgagacatttgtgctgtgttaggaaggaatgataacatttttagagaggaaaggctagagaagggaatagcatgagcaaaggagtgttgagcatatcatacattggcttatgtttagtagcaggagagaggccatttagtagcaggacagaaactccttctattccaagagttgaaatttaaatacagtacttagaagctacttgtaagtacgcatgattaaggaagtggtagttaacatgaaataccaatacaagtttagcttgttttatttacctaagtcaacaaacctatgaatcttcctccaaataaaattattttaaaaacagtgtagtaacagcaacaaaagaaaaactgcatcttatccaaatgaaaaacttttgactatcaaaggacatcatcaagaaagtgaaaagacaacctacagaatgggaggaagcttagcaaatcataattggtgagggacttgtatttagaatataaaataactcttacaactcagtaagaaaacaaccaaggtaaaaatggcagagcatctgaatagacatttctacaaggaagatatataagtaataaataagcacatgaaaagtgttccttattattagccatcagagaaatgcaaatcaaagccacagtaagataccacttcacactcagtaggaaggctataataaaaaagataacaaggctggtgaggatgtcgagaaattggaaccctcatacactgctgttgggaatgtgaaatggtccagctgctttggaaaattggcagttcctcaaaagtttaaatgtagagttaccatgtatgcctcagtcattccactccaaggtatatacacccaagagaattgaaaacacatgtccacacaaaaacttgcatacaaatatacatagcagcattattcataatagccaaaaagtagaaacaattcaaatgtccattactaatgaacgataaataaaagtggtatatccatgcaaagaaatattatttagccataaaaaagtgaaatagtaatacatgctacaacgtggatgaatcttgaaaatgttatgctaagtgaaagaagccagtcacaaaagaccacatattgtattattacattcctgtgaactgtccatttagggaaatccatatagacagaaagttggttgggaggtgtgcggcgggagaatggagagtgactgctaatgggcacaatatttctttggggtgacgaaaatattctaaaattgattgtggtgacagtagcacaactgtgaatatactaaaaccattgaaatgggtgaattgtatggtatgtgtgaattatatttcaataaggctattataaatgaagtaaaatagtgtgaactttgaaagaggaaaataatttgtacaaaaatttgcagaagggcaacagaaccaattaaatctactttagcttgtgtcttttttcattttttttgagacggagtctccctctgtcacccagtctggagtacagtgcagtgacatgatcttggctcactgcaacctctgcctctgggttcaagtcgttctcctgcctcagcctctatttttgaagtagctgggattacaggcgcctgccaccatgcccacctcatttttgtatttttcgtagagatggggttttgccattttggccaggctgttcttgaactcctgacctcaggtgatccgcccaccttggcctcccaaagtgctgggattacaagcatgaaccaccgcgcctggcctttagcttgtatcttaagagttaaagaagcatattgctttttccaccacaaaatatagaatctagaccaaacttgggcatatatttttttataaggtggacatttttggggctagcctgggttctttttgcatttttctaaatatctttaaaaaatacaagagaattacatagaattggaccttggaaagttagtccatggttttataaaatttgtgtagaaaagtttttttctctgaaggttatgtaatatctctgttgctttgtgtagctaccagacattcatatatgatgctgttttgagccttaacatcttttaagaaatctggatttttaaagaaagcatcttgaacaacagtggcaaaaagttgacattttggcagtttgcttaaattttataaattgtagaatacttaatatgttcagatggatatataacatgtatatgtaaagaatagtaataaaacgaatactcatatacgcaatatccagcataagaagtagaacacagataccaccattatctttgaagcccctcattttccttcccttagacatgaatacttaccattgtgaattttgcggatcattcccttgcttcattttgcaattttatgacggatatatagcccaagtaacatttttttttttcttgagacggagtcttgctctgttgctcaggctagagtgcaatcacgatctcagctcactgcaacctccacctcccaggttcaagtgattctcctgcctcagcctccttagtagctgggattataggcgcctgccactgcgcctggctaatttttgtatttttaataaagatggggtttcaccatcttggccaggcgggtcttgaactcctgaccgcgtgatccacccgccttggcctccgaaagtgctgagattacaggtgtgagccactgcgcccggcccccaagtaacatatattaaatgaaaaaaatgtttgtttctaatagtctgtttctatttttcttcacagtgggaatgtaagacggacttagatattgcatacaaatttggaaaaactgtggtgagctgtgaaggctatgagtcctctgaagaccagtatgtactaagaggttcttgtggcttggagtataatttagattatacagaacttggcctgcagaaactgaaggagtctggaaagcagcacggctttgcctctttctctgattattattataagtggtcctcggcggattcctgtaacatgagtggattgattaccattgtggtactccttgggatcgcgtttgtagtctataagctgttcctgagtgacgggcagtattctcctccaccgtactctgagtatcctccattttcccaccgttaccagagattcaccaactcagcaggacctcctcccccaggctttaagtctgagttcacaggtatgtttccctcgcagtggccataaatagagcgggtgtgaggttagtgcatcctgtgcttggttctgaaatagaaaatcgttgcattgggaaaccaaaggaggtttgtcttctcattttgttttttactttcaacttcttttacctcttctgtttggctctctcccaaggtatattgtggttgctatgttaatgcctgattggccgggcgcggtggctcacgcctgtaatcccagcactttgggaggccggggtgggcagatcacttgaggttgggagtttgagaccagcctggccaagatggtaaaacgccgttcttactaaaaatacaaaaattagccgggtgttgtggcgggcacctgtgattccagctgcttgggagactgaggcatgagaatcacttgaacccgggaggtggaggttgcggtgagccgagattgcgccactgcactccagcctgagtgacagagcgagaccctgtctccaaaaaaaaaaaaaaaaaaaaaatgcctgattaaattataaatactcttaatcagagaaacttgatcaactttgctaataatcatttgccctgactcctgtctcacactatacataaaaattaattctttaagtattataaatctcaacgtaaaaggtaaaacaattaagtttccagaataaaacataggagaatatttgttatgaccttaggatagggaaagatttcttaaacagaacataaaaagtactagccataaaagaaaacatgggtaaattagactttatttaaattaagaacatctaatcatcaaaagg

SEQ ID NO: 11874 - DNA, 6000 bp, Homo sapiens
tgagtagctgggactacaggcgcgcgccactgcacgcagctaatttttgtacttttagtagagacggggtttcaccatgttggccaggatggtgtcgacctcttgacctcgtgatttgcccacctcagcctcccaaagtgctgggattacaggcgtgagccaccgcgcctggccaatatttgttttttaattaacttgtttgtttagattttatttaatgtaactatatttccaaaatattatcatttgaacatgtaatcaatatagaaattattgatgagatactttacatttttttcataacaagtttttaagatgcggtgtatactttttacttatagcatatccgttagcaccagccacatttcaagtgtgcagtggccactgtgtgggccacaggtctagaatataagacatgaagatggagagtgagaaatgcctttggaaaggttggaagttcctgtccttctgctgccaattaccaaatctcctgagagtgctattaaggagtgactcaaagcactacacaaagagaattataaatatcttaatattatatctgaaatccaaatgcataattctttacatttggttggtactttagagaggagagaatgggcacagtcacccacaccacccatttgagcctcataatcacctgtgatgtggcttcctctaggtgggaaaccgaggcttagaacggttaagtgactatcccagggtggcaagatcataagtggaagggtgtgaattcatactgtctccagcggacaagaataaaaagacccaggctgggtgtggtggctcatgcctgtaatcccagcactttgggaggccactgtaggtggatctcctgagcccaggagttcattaccagcatgggcaacatggtgagaccccatttttattaaatatacagaaaattagcccagcttctcgggaggctgaggtgggaggatcacttgagtctgggggatggaggttgtagtgagttgagatcgtgccactgcactctagcttgggtgacagagcaacactctgtctcagaaagaataaaaagatttggccatgaattcgtcagctagttttccttacataatttttggacaaggagatctgacattcataggtttttctcttagaagtgggagagcttcaaggtcacgtggtccgtccagcccctgctatctcaccagacactgtccaccctgtatgttggatcagtactccagtgagaagacagcaggcactttcacccatgcagcccattcagtcttcataaccacctgtgatggaggcaaggcaagtatttcagccccctctgatgagtgggaaactgagatgtgccccctctctgctccccaccgaggacctctgcatgcaggcatgaatcccaggagcctagctgatattggagagacggggcggggggaaccagctgcagggtcttggaggaagctgctgtgtacacctgcaaggctgcaggttacatctatctgtcaagcagtgaaggaaggaagttgtttctaagggattggaaaaattcattaattagtagaatgagaaactgaggtgaagcaggaggtggcagggtcccagacagcatgttggactagtggcctgtgtcactgtgttttttgcaggcgggtggcatggggtgtatgctgacttcttattccaggagttggtgccaggaggccaggttttcttaacatccttgttttacagatgtcaaacttgagggccagaggggtaggagaggaagagactttttgtaccttttttgggaaagaacaagagggaagctggcagatgaatttgaagtgcattgaccagggagctgagagagggcggtctgcagccagcccacacctgggaggaggcggcaggcttttctggggacagagtggccaagtcgaagcaagcttaaccatctcaacatgacaccactctttcccattggaacctgagaacttgttcagtattctgacacttagcaagggacctgggttttcttggtcaggtgtgcgtttctgggtgacaggcctgcatcaggtgtattttcgggatgtagtaagttgtggaatatgggtttaggggcatcctctggcaagcactgcttctatcccagctctgggaatgtgccccatgcagtgtcctagatggcccatctgtggtctgcttccaagggtctttcttttagttagttagttttgagacagagtctcactccgtcacccaggctggagtgcagtgatgcaatctcggctcactgcaacctccacctcccaaattcaagcaattctcatgcgttagcctcctgagtagctgggattacaggcgtgcaccaccacacccagctaatttttgtatttttagtagacgaggaatttcaccatgttggccagtctggtctcaactccccacctcaggtgatactcccgcctcagcctcccaaagtcccgggattgtaggtatgagccaacatgccctggcacaagggtctatctttgaccaatggaactgcaaatcaagcctcttttgttaccagagttaccttggatttacccttatctacttggtttggataaattgagtttgcatcagatggagtcaggcttgatcaatcccttatttacttcctcccaccctgttctctaatatccaaaaaccttgaggcactattacatgctagctacatttccttgagtaaagtacttaacctctttgagcctcagtttctccattgcataaaaggaataataaaacttatcccccataagtttatagtgaggaatgaattaattcctcactatagttctaaattaattctacttagggcatccttggtacatagtgggtgttcagtattcatttcattttctcttttctgattcctttcgtaaaagtagaaaaatgaaagagaaatgttgacttctcttttgatttgaaatcattaaaacattttagtaagccttgggagggagctagtggtgtggcatgtgtatcccgctggccaagcacatgtgaacgaagccaagaatccaggggcttttctgccagccagcactgactcacttgcgaggggccctgcctggctcgggggaggcagggctgaagtaccacattagggcatgttccggggaagtagattctctgaataacttggatggctccctggagcatttaggacagaagccacctggaaaatagagatggtcacccccacgtagccttgacagtgcccagaaagtcttgtcacttggtaaatgttaacagctatgatccgttctttaagaccctggggagttttaagttttaccccaccagacctgagaagggtaaagggctgcagattctgttcttttaactggggccagtgtgagccatctttgactcagtgcttgcaatagaccttgattctgcagtgggacctcccaggcccccttgccccccgcaacttctggactcatatccgtcagacatcacttgtcaccttccagcatcagggagaactggatccctcctggctccacactcttaggctctttgtaagtagctggtgagggttttcttctctctgcaagggaggctggtagaactatggatgtgattcgtacaattttagagacaaaaagaaagtacccaggaggtcatttatttcagctgcttcattgcataggtcggggagttgagcatggagtccagcagctactaactagttatctctgtacctggcttccatttactggtccttagcttgttccgtgattcttcattgccccttatttctcaccagagggactggttggccctagatggagtggtctttttaaaattttttttttaaattttttgagacagagtctcactctgtcacctaggctgtagtgcagtgctgcgatctcggctcactgcaacctccgcctcctgagttcaagcaattctcctgtctcagcctcctgagtagctgggattacaggtgtgtaccactatgcccagctaatttttgtatttttagtagagatgggatttcaccatattggccaggttggtcttgaactcctgacctcaaatgatctgcccaccttagcctcccgaagtgctgggattgcaggtgtgagccaccgcacctggcctgggcagagtgaagtcttatgctggggagccatcagcatgctcaaacctcctgcaattgtagcacactttgtaaaactgtttcccacaaaagggcagaactatttgggactttcatgagaccattcactttgtagcacatactactttgaagtttataccttggaaaacctcatgatggtattcccaggcttgcacgtaatctgcactcaaaacatagctgtagaattgaactaaagcatccctctgtccaattaagacctataacctctctttttgagacagaatctcgctctgtcacccaggttggagtgcagtggtgcaatctcagctcactgcatccttcgcctcctggattcaagcgattctcttgccttagcctccgaagtaactgggactacaggtgcgcgccaccacgcctgggtaatttttgtatttttagtagagacggggtttcgccatggccaggctggtctcaaactcctggcctcaagtgatcctcccgcctcagcctcccaaagtgctgggattacagggtgcaccaccacacccagccaggacctatgatctaattcattgttggggtagcttcacaattttcttctggacgccttagtaagtccacactttaagcagccaccacatggcatactttaccttctgtttttcctttcccctcccctacctagaccctcctaacttttggggtttttttcctttcctcagggtcagtttgaaaaggaggatcgagctcactgtggagtatccatggagatgtggagccttgtcaccaacctctaactgcagaactgggatgtggagctggaagtgcctcctcttctgggctgtgctggtcacagccacactctgcaccgctaggccgtccccgaccttgcctgaacaaggtaaggtgctggctgggggcagcctggactcctgggccttgggaacaggatgggctgggagggaggtgatatggttgcaggtgatgtggtcaacagggaaggctccttcccaagtggagcaaagaactcccttcctgtaggagaaactctcaagatacctgggttggttctggtctggttataaacataactgacttcatcagaggttggggtcatgaaggctggtgacatccatttacctgagatgacatgtttgtggggggtaatttatgcttttctctttctgaggaaagaatatctgatgaggaccctagtgtcacactttaacataggtgatgtataaaatgcagctggtggtgcaatggggagagaatgaccttagaatttgcgtgtagaacttgggtcagactacaggggatgttgtaggaggtgagagcttgctaaagacctctgacttccagaaaattgtttcaaggccacatcttcgccaggcatagtgggtcacacatgtaacctcagcactctgggaggctaaggcaagaggatcacttgaggccaggagttcaagatcagcctaggcaatatagcgagaccccatctctacaaaaaaaaaggaaattaactgggtgtgatggtgcacgctgctagtcccagctacttgctactcaggaggctgagacaggaagattgcatgatcctaagagttgaggctgcagtgaattatgattgcactactgcgctccagcctgggtgaaaaaaaggcacatcttctataagggtcagcagtcatggcttcacgcctgcattttcctatccttaactgtgtctcacaggttctgtttgggggcctgccaagcgatttgctttggataggtactgtttgaggggttttgaagtgattgagacccaggaagcataaaggggcatggagacctatggcgtgttggaaattcagagc

SEQ ID NO: 11875 - DNA, 6000 bp, Homo sapiens
gagaccagcctggccaacatggcgaaaccccgtctctactaaaaatacaaaaatcagctggtcgtggtggcacacacctataatcccagctgctcaggaggctgaggcaggagaatccttgaacacaggaggcggacgttgcagtgagccgagattgcactactgtgacagagactttgtctcaaaataaataaataaaatacagagaattcttaacgagttgaagagttttttcttcaatgttcattttttgatggcttttttttttctttgagatagagtctcactctgtcatccaggctggagtggtggcgtgatctcagctcactgcaacccccgcctcccaggttcaactgattctcatgcctcagcctcccaagtagctgggactacaggtatgtgtgaccgtgcccggctaagttttttgtagagacggggtttcgctacattagccaggctggtctcaaactcctgacctcaagtgatcctcctgcctcaaccttaaatagttggatcaaataaccaggttcaatttgatgataaatagctcagaatagaaacttcactgctatttccagatgtcattttaaaatattttagaatacctgatttctccatgacctatccatgcttttctaaggttccaaactaaaatgcagaatcttgagttattccagaacatagatttaaaatttgatcagaaaataaccttcatttaagaaatgaggggtcaggcatggtggctcacgcctgtaatcccagcactttgggaggccgagttgggtggattgcttgagcccagcctatttatttactatcctattatgagcttgagaccagccagggcaacatagcaaaactccatctctacaaaaaatataaaaattagccaggtgtggtggtgcacacctatagtcccagctacttgggaggctaaggtgggaggatcgcttgagcctgggaggtggaggttgcagtgaaccaagattgtgtcactgcactccaggctgggcgacagagtgagacatcttctcaattaaaaaaaaaaaaaggttgggggggtattgcgtccctcttgtgtggcaccctccttcctctccccgctgtagccatagcacattgcacataaactgcgtcttcatacttacccaagtattgtatctgcctgggtgagtctgttcctgtcactaaaatgtgaactccctggacatagagaccttgtctttcatctctgtatctgtccccagtacctggcatagtaactggaacatgccttttttttttttttttttttttttttttttttttgagacggagtcttgctttgttgcccaggctggtgtgatcttggcagtggcatgatcttggctcactgcagcctctgcctcccaagttcaagtggattctcctgcctcagtctcctgagtagctgggactacaggcgtgcgccaccatgcctggctaattttttttgtatttttagtagagacagggtttcagcatgttggtcaggctggtcttgaactcctgacctcgtgatccacccacctcggcctcccacagtgctgggattacaggcgtgagccaccacgcctggccaccaatttttattatatgattttataactaaaatttcatgtctagcaatgaaattcttcttctctcttttttgtttatttatcttccttttagtctttctttctcctcggatctttccccttctatctgtctcagttccttcattttccttagctctccatttctcccagcatctgctactagtctagtctcctggctcttaacctttttgagacacagactcctttaataaagtgatgaagaaagttatctccccagaagaatacacacagagaacacagaatattttgcatattatttcaaaggtaaagaatgccaagaagccaggggcagtagttcatgcctgtgatcccagtgctttgggaggctgaggtggaagaatcacttgagcccaggagttcgaggctggcctgggcaacatggtgagacctcctctctacaaaaaaattttaaaattagccaggtgtgctggcacgtgcctgtagtcccagctactcaggaggctgaggtgggtggattgcttgagctcaggaggtgaaggctgcagtgagccatgattgtgccactgcacttcagcctgggtgacagaatgagaccctagctctaaaaaacaaaggatgccaagtatctaaactttgagctccttgaggacaaaaactaggcgtttttcatcctatatgcccagtatttagttgatgtttcttgagtgtatataagtgtgcacatgcccagaaacatgtaaatattagtacatgttgtagaaaagctgttgtcaggaagatatttgtacactctggctttccactatgatagtcaccaggcacatgtgggtactgagcactggaaatgtggattgtccagattggaatgtactaattgtaaaatacgcactggattgcacaggcttggggcagtacaaacaaaagaatgaagatatctcattaatagtttttatgattattacacattaaaatgatcatatcttggatatattgagttaaaatatattattaaattaattttacctctttattgttacttttctaaaagcagctactagaaaattttaaattatacatgtaactgctcatagaaggttggtatctgggttcattcattagtggacattcataaacatagtaattttctttaatttcatggattcgttgaactaaagatcccataggtcaccgccttccctgtccctcctctaccaccaaaaattaatgagaacaaatgggaagaatttactctgcttttcaaggtactctgatacagatttttatctactgtcataagtatacctagaacaaaagcactgttgactcaagtagtttcactaatgaaaaggaagcagcagaatgactaatgtaaattggaggagactcttttatttggaatgctttggttcttccactgtggaacaggtgtggctgctgttgaaacagcagagtcatactaggcatatctgacatgtgaggaaccggagcattgctcaggggcccctgccttccaatgaatggatgtaggatccatcatacatcagattgctcctttccaatacaaactctgatgcagaaatgcacttggtgtatttgctttttcttactttctggtttagggcagaaataatattttggcttagagacttttgtcctgaactatgacataataggatgagaatatcgtgtcaaaaatagccttacaaggtcctttttggcattaagacttctggagtgagtttgcagtggattattgagaataattctgttcattagcagctagccatctttgatgagtgctgacttctctcctttcagcacagagcaggaaatgcctgcctcccatgactctgggttggagtgaaggggaatgcataccagccaccctcttgcagaggtggggcaggtgctggcacagagcctcaggttaggccgaggggatgcaatctcagatcagcagccagcagtgtttgtaaacaacaggagggagattgtgctggtgatgtccaactcacaccaatgaagatcaaccggtttgtgctttgggcagcaggctgcagatggacagtgcctcctgagggcatcgccatgttttagggatccatgttgcaggatacctgtctgcaagagagagtcaaggagggctttttaagcccctggggttcaggcctggcatctgggtgttaagtagagtgaatctcctgaagtccaaactaacatatgacattttaaaatgaggaaaacaaatggctctgaaaaggtctataggattataggtaagtggttaatacggaagatgttataaaggtctcaggaggagatggggtgatccagggttggttgaagtcgttgaaatggaattaccctgtcttttacctgtctgtgggaaaaaaaaaaaaagaggaaaatgacatctcccaaagatgcttggagatttgattgatgtttgtaaagtgctttgatatctttcatagagtgttcaataagagcaaaatatgtcatcagaacttagtctaaagcaaactagtcccaaaccgtcttgagtagatactaagcggttttgtgtctttgttataagttgtacttatattttcgagagaaagtttttcatgttctgattttcttttaagtgtcagctgtatgtttggggtctttacctgttaacttgagttccaacatgctttgtagatggtcagtcacctacagaggacaatttttctagccaaggagttaaatccaccttaaaatgcttcttgccaaggacaatgcctttgcaaatatttgagatgtttattctcagttgtgatttattactgaatctgtgtcttcatagcgactccttgggaggtgcaggaggaggcagagccagaaagcaagtccctgcaatcagttcattatagagaaagaaaaagcttttatttcaggattctggtggatagacttactgatatgtatattctgtgtctatttaatttcacgtagtgctgcatctaatcacgctgtttaaataatcggacagaatgtccttttgctttgcttttgcttgtgaagagcacacagcactgccaccttgttgccaaagtttggtctgatttgaatgtgcttaaaaatcaagtgaatgcctgttgggaaaaagcttactccttctctttgtcagtacttgcaaaaacaacttaaaagaagttagtattattggactgaattcagtaattagcataatcatgatgctatgtattgttcaccagggcacgccccttggccgcatttcccattaagaggacaccgatgttgtcctagtgaataaatcccggcacacatgatgcaaatcagcgtgttcctgcctgctgcttggctgcagttaattttagccggggttagttctatgagttgtaaaagtagaagttagcaagctgaaatgtgacttctcggcctaatgtggtaggatatctattttagacttcagattgtgtttgtgatcaggagagcagtcttctgaagaattgtggctcagttttcttggaaactacttgtaagtactgggtggaattttaagacttctctttgttcttttctccttaaatcttcctaatgttaccgtcatagtaatgtttatctcttgggaaaactggaagctttcaggttggtacgttagagaaagctaagagaggtggcaaaaggtttttctttaaatgtctcctactgcaataaatctgccttattcaatttgcccaagaaaaagttttcgattcttacttatttttgcaaaagcaatctgtagattattattttatgttaaaatatttgattaatggatatggtttctgtaaatacagaaacattgtattgtgtcattgagctttgttttctactatggtaacctaattcttgagaaaaaaatgttgaaagttaattcctgttatactctgtgctacaagtttattttgtagaaataatggagtgtcaaatgtaattttcttgaatgtatagatggacagttttttatccttttaagggggattttgtgcttaaaaaataaacccatatatgcctaaagagaagcactttaaaaaattaatttaggaagaaggttttagagaataatttaaagcatcctcttttagactgagttagttatcaaaagtaaccaaaggccatgggattctgtaaccttaactgcagttcatctaacacattattaccaacttaaatttgtactgaagaaaacaaaagattttgatattgaatattttaaattaaatttgaatcatcttgcttatttagaagtgtgttttcaatgtggactgacctcaagccaaacagtttgcttacagcagagaaccaggcaggaatttctttatcaattagcaagtaaatgtatcagctttaggaatattgttat

SEQ ID NO: 11876 - DNA, 6000 bp, Homo sapiens
aatgccgggagtacctgcctcttctcttctccctactccaggcaaattgtctggtaatgttgtgatgctcggagaacgccagcccaggtgcctgtgaagcagtcccctctgctcactgcactgttcctgattttgttccataactttgtgcctctaggaaaagaggagagcctcccgaaatctgatgagactcgctgtatcacgccagtctgtggcttaggtgatacagaaaggaaatgcgaagatcaggcctcactgccagctttgctcagttacacagaaaacatgctgtttcagcttttgggagtttcttagtacacgatcggtttctttttctcttttatgaaagtttttccccttagatttgctttcaaaacaacagactttcacttctggctaagacagaatgagtgacctagtacaatctttgacactgttattatatatctttattcataatcaatgcatgattttgattattctgactttaattttacgagtaaaaatgggttggttataaatccctttcaaagaattttttttttttctttttgagacggagttttgctttttctgcccaggctggagtacaatggtgcggtcttggctcactgcaacctctgcctcctgggttcaagtgattttcctacctcagcctcccaagcagctgggattacaggcatgcgccaccacacccagctaattttttgtatttttagtagagatggggtttcaccatgttggtcagctggtctcgaactccagacctcaggtgatccactggcctcggcctcccaaagtgctgggattacaggagtgagccaccgcgcccggcccctttcattgctttttaaggaaaacatgctatcatatatacttcacctccagggcagtacattcttactttaaggcaaagacagttgctgaggcctggactaggggaaaatttgggctccagatgggactgttggataaaataccagacgtcctgtaaatgtgaattttagataaacaacgaataactttttagtataaaagtaaatactgcaatggaatttattatttgctaaatgtgcaaccctaggttaagagagcttttcagacccacttctcagcccgagttttctatttaaaatcagaataagaacgcctgcttcatggagctgttaaatccaaatggaaattaatttgaaagcgcgaaatcaaacttttcaaaagaatgacggttacaataagagcgttttggcctctgctagctgcttccgggcggaggtcctcggcctcccctaggcgaggcactaggtctgggggcggcgggtcttagcgtgcccgccacgctcgccgcctcccacctgccctggctggctggggcccgacccttgcgtcgctccggggcccaagttacggactcgggaatccagttgtccgcaccgaacaagccccgccgcagcgcccgcccctcctcttgctgctttggagtctcccggcttccgccttccgcagcagtcacgtgcctccgatcacgtgaccggcgcctctgtcattctactgcggccgccctggcttccttctacctgtgcggccctcaacgtctccttggtgcgggacccgcttcactttcggctcccggagtctccctccactgctcagacctctggacctgacaggagacgcctacttggctctgacgcggcgccccagcccggctgtgtccccggcgccccggaccaccctccctgccggctttgggtgcgttgtggggtcccgaggattcgcgaggtaaggccgccctcgcgttgtttggtctcaggctgcagaccaggtcaggcgactcttgcagtttctccagcttgcctggtgcgtgctggtgtctcgccgcttggtcctctcctgttcttcggcccccggttgccagattgcttttcttccaggcctcaaccaggtttattaagcgaaattctggagcctttctcgcagggggaagaaacgtcaggggcgggcaggagagtggagggggaggggtaaaaagtataccttctccaggactgggccacggccctggatcgctgggggtgcgagtagttcagggacttaggtaattgtctagagacaccttgagctacgccaggacgggccgctgaggctgagcctccttggctgcagagttccagcctggcccagttgaagcctgttttttcctgggccctgtcgttcgcgctgcccagggttgtttatacagcaaatcttcagatacagagattaagttccaaattgattaagatcgttggaaacccggaatataattttgggtaggattttaacttctttgtggccatggccgtgaatttatgttttgcaagtggcaacctgtattttgctttgtgttaaaatcagtcgtttgtatctggaagtttaggagtgagaattacatagaatttcattattgtaggttcttgtcgtccagccagaccgccattgttggcttacctaaattgtaatatgtatttgttctaaaactttctctccgaattttgattttgcaaatactatgaattttgtttgaaaaggaaagcactgtcttctaagaaattatgttcccactttgtgtattttaatttgagtaattttcgaaaggacttagaatttttaatgtgccacttcaaaatgatgcttagtaaatgtttataaaactagccttatccgtactattcatattcttattgtttctctatgagaaaagttaaccacaattgtataaatttacaatttttcccatatttatacctattctatttaatcatgatttctgatttcagtatattaggtgattgctttaaaaatcttactgcagtgttagtgccaataatgaaaaaaatttttctagaaaagcaaaagcctaaagaactcttttatggagcagtggacaatatttgaaatataatgatactttcagacttaggacatttaatatttgagttgaatgcctggggagattaaagtgatcacgatattcataatcataatattaatagttgtaaaaaaaagaaacacctcgtattctgtttttaccttgcatcaaaattgaagatttgttgaaagacattcaagattacgaagtttagatgaccaaaatggatatccgaggtgctgtggatgctgctgtccccaccaatattattgctgccaaggctgcagaagttcgtgcaaacaaagtcaactggcaatcctatcttcagtaagtaccaatttgctgtgaatcatggacagtcatatgcttttgcatcagactttttcatggtcatgcttctatgagagaaatacagggaaaatactgaaaaatgtggaagaaacacttcctcttcagaataattagctgtcttagggagttaagtgtagtggggtggaaacagcttggcgccctagtggggaagcagagcggcttatggtgcttttgaccttctctggctgcctggggaagtacttttggaataagtgggaaacataggaggaatgtccttgggctaacggagggaggaaggggatgaggggcaaaacctgctagactggtctgatatgccctggcaatcagcatgggggcaggtggcctttttagagtggtgcatacaactaataagaagcacagatatttgagttgagagacttggatttgagttttggttcttgctattagtttggtgatcttaagcaaatcacttaacttctctgaggctcaataaagtaaaatgtgaaatggggagacataccccacaggcttgttgctgaaataatgtatttattagcacagtagaatacaagcattagtatgttgaatacaatacattttagttcccccttctttcttgtatgtattaatatttaatgtgctgatgtttcagtattttgtatttatctataaagtgagcattcatgtattcttgaccatattttattgacttcatatttattttggtatatttataactgagttaccaaggaattcagttcagatttgcatatgcattttgaaaaacaaattgaggaatctagttttatattagtgttaattttatattagtattaatagtttgtgttgttgtaggagggatctataatgtacaaaaatgatcctttaatttctgttaatttaatcactcatcaaacatttattgattacctgccaagtttgaggcatttttccaggctttgaggctacaaaaattccatacagagtactgtccctgaaggaactaaaactctagtagggaagtcagatgtattaatagatcattttaattcactatttttttttttttttgagacagagtctcactctgttgcccaggctggagtacagtggggcagtcttggctcactgcatcctccgcctcccgggttcaagcagttctccttcctcagcctcccgagtagctgggattacaggcacctgacaccttgcccgcctaatttttttgtatttttagtagagacagggtttcaacatgttggccaggctggtctcgaactcctgacctcgtgatctgcccctcttggcctcccaaagtgctgggattacaggcgtgagccaccgtgcccggctctaattcagtatgttaactgtggcaatagaaagatgcacagggtctggcaggtgcacataaaaaagacaagtaattctaccccttggaaattttcctgaaggggctggtccctgaactgagtttttgaggatgatgggtatttagccatgtggcaagtaggagcagccttgggaatagaacagataatgtgagcaaaggcagggaagcaaaaacagcacactgggtgggagtcatacatgttttggaggcaggcaatgcagagagctgaggctagagaggcagccaggggccgatcgtgaagatgctgtgtgtgggtgtgtggttggaaggagtttggacttgatcctatcagtcagtgcttttcaagctgatttttaagctgtgaagcccatgattgatatgaagttagcatgtaaaacagatgaaaatgatagaatggaggtgggagtgtgtgtcccagagccctctttttgagaccattcaccattttccaaggagctgtaggtgttggaaaccaatgaatcttgtagccgggagttagaagaccatatctgcctcttgattgaattgttctactagcagcatgaagggtgagtttgtaggtgataagtctagaggtagagagaagctatagcagtaaccaaggtattggaatagatagaattggttagattgagagagtcttagtgattgatttggtgtgtgggggtgaaagagaagtcttggatgacttctggattcctactttaaggaactgggttattgtggggccactgactgaaggacaggaggaggggagacttgctgatgttttctctgttcatcagtgtttgtgtaattgtttaaattccctgtgaaattaggattctgagctctgtttcctaatttctttagtccagagtgcatttagactagaggacagggagttttatgtttataaagcctggatctgtttatagcctacatagaataatattgttgatcataaagcactggtggactggccagagctccgcctaacgttggcatttggaatgtttgtagttacatggagcttttaaaattgctttatttctgttcttcgttacccatggtctatgacatgttgtgttttcccgttttcctatatatctgtcttttgttctgatgtccatctcacaaatttcttttgtaaaacccctccactccgtaggcctgtgggcaaatgttcaccaaatgttaactgtgggcctgttgagcctgttgatgtgtgggtgctggtgggtgtgaaatgtgtctcatataaaagagcttacagattgttgggggctggaaccaacacatgaagaatcagtgaatcttctatcacattctgtactgagataataagacctgtggaagcgtcccccagtgtcgagagccc

SEQ ID NO: 11877 - DNA, 6000 bp, Homo sapiens
cagaattttcacacttaaaaatcaactagatgagagtgagctagcaaaggagactgaaaactacgaagtttaaagaggtgttaggagtgccacaagattctgaagtcatgagagtcgagggaagagagtgtggaagaaggagggagagttctgctgagagggtcaagtcagatgaggactgaaagttttgcgttgggtttaatgacatggaaatcattgatgtgacattagagccactatgctggagccgtgtgcagaaaccagatggaagcctacaggttgtaaggagtgagtgggaggttagaaaatgaaaacagagaaacagcggctctgtggagaatttcatctgtgatgggaagagcaagatgacatgggggctagcagcgggatggagggaaacctggcaaaggcagtgaggctgggggagaaggggcgagaagagacagtgcagagtgcgaggtagctgaggagaaactcggaatggatgcaggctagggcaggtttgtgtgctgggcattgggcactcaggatagcttcctgctgagggttctgttttctctgtgaagtatgaggctatggcagtttgagtatgaggaggtaggatacattgggggcagagaagtttgacatagtcatcataaagaatggcaaggtgagtttgtagagaatatgggagggtggcaggcagcaccgaggcccagctgaggctggctctgctgtgttcagttcctgatcttgattccgtgagcccagctgcccttgcctctgtggcgggggatacttgtgttcacccagggaggcagtcacggcagtccacgcagtgaactgatagaggagcaacaaaggctcatgagtcgctggagtgatgtaaatggtcaactgtggagtctaagatggccactgatggatatgaaggcaggaggtgaagaggggatatgcaggaagcagaaataagagaactacaggatccaagaagaaaatgttgaggaaacaaagtggagatgtaggaagttgtgatcaaagagtgaatgttcccattctgtgcgtcgtgtggtgagagaacctaaacccttgcatgtggaggtggccttccccagtggtggtggccgtgggagtctgtctaagcaggtttgacttgtgtctgcagagttgcattttgttatttggtaatactggttgtttagtgttagtttgaaaatgttataattctctcctgttaactttgggtacgatgtgtagatgaaaaaaaatttgtttttgttttaaagaatcatattttcactatcttgtgacactttacagtcattatgatggagccaaaaaagcagagccttcttagcagggttacggaatctgttaggatggccgcttgtgtcatccaacaagaaacaaggtgtgaagaggaacatgaattaggttgcgtttatgatgaggtccatggtaagaatgtaagaatgagtgttggatataaaatggaggcgaacaaggtctctggggatgaagaaatgaagcaaaaagcacctgtctagctggccacagggatagacattgaaatcacatggttacggctggacttggggtgtagaagacttccctgagcatggggtgggagtgggaaagtcactggaggtggtggatgacagcaatgaggcacagtggagggttggataattagatgtcatagaccacagaggagcagggagcagggttttgttgttgatgtcatcgttttctttttttcttttttttttttccttctggtgggtaaggaaatgatggtctggaaattggtaaaagcaagaactacttcccttccttgagaccctgagaattagggaccgctggtatagtattctttgtatgtggtccctagaccagcaacatcagatcatctgggacttagcaatgccaattccagggtcccactccagacctacaaaatcagaaactctggggttaaggtcggcatcatgtcttaacaagccctgtttgactctgacgtgctcagagtttgagaaccattgctgtaatgatagctgatccggggtgaggggaaggaagtattcagtgctgactcatgagaaggctgatggattttcacctggaaggtttttggagggaggtagaaccctcgactcagtgggcatatgtcctggctcccctggttgcgagtggcattaggctgatactaatggtctcagaacacacgttggaagtttggtctttgcttagacttggagttgctattagtaccagtagctgttacaaggaatagttaacttagtgtcattttagttgcgtttgctaaagttttaaaaacatgatttactatatgcaaattaagtttatttttaaacttttcataaacattctccatcataaaaatgaattgtcattataagaggcagttgttcagaattcagaatttattgttctttaaaaagtgttatgatagattaaatgatatttcagagggttttctcctgatctccatatctaaaatatcaggtatgtcattgtcattgtgaactgaggaggaaagacatttttatcaaaataactattcaattattgcaaaagacaaaagattaactagaggacttgtgaaagtgcttgataaagatttgtcaaggagaaataattggagctgtgttgaagaagtcttggggtaaggtataatcacattttaatagctgtgattcctacagtttgacgtttagctgtagacattctgtaatttggagtggagctgaccttgcacaggccagtaaagagaggagaagaaaccctaccagctccagcagttgcaggggcagatgggattatgaaacgagctctaaattgggggtaaggttatttatgcactagtcacgattgaatcaatagaagtttgtttcactgatgactccaacaaatatttgcatgcctagtttgtgcggagacccattttataagcaaggaaattcaggcctagaagtttgatgacttcccccaaatcaaatttaatggagaagccgtgaagcaaatccaggtgtctaagtatgaaagcataccaagctgcctgctggatcagtgtaggggtttggtttctagtggtctcacccatgggggtatcgtgttgctgtcattctccctccaaaaacaacacaatgaaaggaagcttccagaatatttgtcttaataaatttgtatggtgacgaaatggtgggtcaccttaacccctgtcaacaagtgattcattatcatttaacaatttagcaagcactaagtttagtgggacagatctttgaagaaaataatgggggaaaggacgcttggccagagggcacctgagaccattttgtttagttggccatgatgtctacctacttcactctgtcctaaacctggaccatcaaatgttggtaccataggttgcagactatggtaccaacctcttaaggctttatcttaccatgcattcaatagtttcactggacagaaactgatcttccctttgagactaggcacaccatatttacaaagtgacatatcaagagtatattgtttgcttttgataaaaactgcccctaaaacaggcatctgaggaaagaatcccttctataatttagtgttttgttcctttttggaactagtaaatatcaatagtagtaaggttaataatactagagtaacacctcatttatttgatattataaaaggatagataaaatattgctaataatttaatattgtagttaacatttagctttgaatatatgtgtttcagtgtacacacacacacacactctcagacggatttaatttttatggccctttttgaaaaattgatctagtggtgtattttttaaaaatgtgcatatccttttaacaagaatttcattttttcttccagaagaaatattggcaatatattcttgccgtaagccactggaaattactagtagtattcaaagcttttaaatttttaatttgcttgtgaagctttaaatttgagtgaaaaatttagtcttataaacaacttagaaaggttgctgcctgctctagatactatttgtgctaaattaatttagtatactaatcagaactctaatgaattctgtgaactgctaatgttagatcagtgaataaatggctgattttatttcccagaagagaatgtttggagatgaggttggggagaagttgaaaaaaaaaatcagaatgtggttgtgtaatcttttcctagttccctttcaagatgatctttcccaggtcattattcttactcctgaagatttttctttccctctcctcacctcccagccttccttctatttctttccttcccaccagtcctctgtccctccttttctagtgaaacattttatgttggtgctttatttttgctgttggaggaattattcctgggatggtgtctgtgagtaagaattctagagcattgattaatttcttactatgtatggttttgtttcattcaagcaatctaatggtctttccttgtagccattttattagattctgaagggccaaatcaaactgtttctgggcttggggccatattttatagcaagacttgtttgagttttcaatgaattggtgcttaagctaaagccgttaaagcctgcttccaagaaaacaaaactggcagcacagtttgttccatttcattttttttcagcatgcttgattttttaggggttggagttagctaggaccaactgggaaaagaatcccgtaagtgggagaaaggctgtggtgttgttagggagtgcacttcagcctaagtggtgattagcagcatttagcctctaaaaataactggtgagcagagtttgtagtcaggtccaatttcagttctagaggcccttacagtgcagggattggccagtctcaagctctggtaggcaagtgcatgcagtgtgcctaaaacctgccagcagtacttttgagtttttttttttgttttgttttactttagcatttattattcatggattgaagaaatcaaaatggctgaagataaaggtatatttttgttatttaggctaaaagtggctttagatctagctgacagcttttcactttattttcagtggtgctctgttaaaatatttttggctaagtgctttgactgtactgtctacattttctattttgaactcctggagatactgacttttcatagtagctgaatatttcattgaataatctgtctttaatccgaatatgttttagtgtcttaatttagatgaccttttagtatgttgtactactggaggctgcattttacaaatttcaaaaaatgtacaagctctcttcttattcttataagttaattacaatgaatttaaagaattatctatatttagattttatataaaattataggagatataaattcagtctcatattaatgaacagacttacctggttcaagcaaggacttaccatttatggaaagtgacctacttttatgtgaagcagacaataaatgcaaagaaaaaacacaagggttttattttgattttaaattgactctttaactttgaagtattctttaactatgtattgaatttaatgttttgtatatatttgcttttgctttactttgtaaattaagatagtctttccattaattgaaagactgcattcactcattatgttgaagatttataaaagaaaagaatagatgtatgaaaactgcttctaactctcagctgtctaatcagcaactgaaaggattctttgattaggatagagaatataagcatgtactatgtgaatattatttgaataattggtgagaatgggtcacttgactcgtctgataaagtgcttcatgtagccatgaagaagaatatgagatatgtatctgacttttagttcttttggaagacatttctctcctcttgtggattaggtaatccatgtagttaggaaaaatcagctgttgcatctgatgcacttttaacagtttttgattcccaaagggtgaca

SEQ ID NO: 11878 - DNA, 6000 bp, Homo sapiens
aatgcagcacagagaggccaaggagaatatggtcagacagggcttgctgggtttcccccactcagtctatcagtattagagcctctgctttttgtccaatcaccgtctgacatgtttgtcttcagtcatgtctatccaaggaagtctccaaaaaaggcccaggaggacagggttcagagagcttctgggacagctgaacatgtggaggtttctgaggggtggcgcacctagagcgagtatggaagttctgtgcacctccccgcatacctcccctgtgcacttcttcatctgtgttctttctgatatcctttgtattaaactggtatatgtaagcgtttccctgagttctgtgagcctgtccagcaaattaatcaaacccaaagaggggttgtgggaatcccaaattgaagctagttggtcagatgttctggaggcccagacttgactctgggtctaggggagagaggaggcagttttgtgggactgagccctcaacctctgggatgtgatgctatcttgaggtagatagtgtcagaacggagttgaattggaggatgcccagctggtgtcttctgcagaactgattgcttgttggtgtagactgcccaccaacatctggtcacagaagtcttttgtgttgattgttgcggtatgagagcagaggacaatgcagtttgagtttctctgcattcagaagtggttagggctttgcattctaggtgcacccaagagaaacatgtagagatgctcacagcccatggaggactgcctcttctaacctgcttccttccccttcccatccgaccactttcttttccaggccaaggtggcagtggtggtaattatgaaacatctttcaagggaacatgattttttttttaagacaactgtctcctcttcacagggaagtttccctccattactagccttggagtatctggctttattattattattattattgttgagatggagtttcactcttgttacccaggctggagtgcaatggtgcgatctcggctcactgcaacctccgcctccccagttcaagtgattctcttgcctcagcctcccaagtagctggggttacaggcatgtgccaccacacccagctaattttgtatttttagtagagatggggtttttccatgttggtcaggctggccttgaactcccgaccgcaggtgatccacccacctcggcctcccaaagtgttgggattacaggcatgagccactgcacctggcctggcttaattattttttgttgttgttggtttttgtttgtttgtttattttttgagacagggtcttgctctgttgcccaggctggagtgcagtcgcgcaatcacagcctactgcagcctctacctcctgggcttaagtgatccttttgcctcagcctcctgagttgctgagaccacaggcatatgccaccatgcctggctatttaaaaaaaatttttttttagtggaaatgtgttctcaagggatcctcccatctcagcctcttaaagtgctggggttacaggtgtgagccacagtacccagctaatctggcttaattatattaagggaggtggcagtttctttatagggagccaagcctccaggtgttcatggaactgtggtttcttgggggtgtgggacttgcagtgctaagtctctttggacacagttggtcactatactcctttagcacttgcagggccctcaagccaccagggctggagtgattgcctgcattcattgtaccccagggccagatctgttccttctcaggttttacccaacctgaaattcacttctaaggaaggatatacatgccaagttctattaaggggctaccttaaagatacaatgtgtctcctcttaaacaaccaacacctaattcaattatgttactggcaactatgtattatgttttgcacccacaaaatattctgaaccaaaaactcagttcttgttgtatctgggagacctctgaagtgaaccttctttaagaaggaagggaagggctgtgggaaaaggctcccttcagctttcttctgcccattctccaggacggccagattttaaacctgtagactgccctggaaattgcaaaggctacatacttgttatatgaagatcaggaaagaaatcatttatttatttatttatttatttatttttaaaaagaagtcatttatgtataaagtcgatggacttagaagaagcaaacgtaagtctgaaagtttgaagagggtttacagtcatatgcttcctctcccaaaatgccaaacaaggcaggcattctggttaaagtaactgtaattattgagtgaaataaggatagtaaacactaccataggggtagtagaaccccgtgatatgagtccatttctttgtattaatcagacaattacggctaatgaggtgtgctcttctttttcaaagtcatatttaactgggaaagataaagcaaaagaaatgcttcttgctgaatgttttcttcttgtttcctatgtgagtaaaattggaccttttaaaattttgtcttttttaaagtcatatttaactgggaaagataaagcaaaagaaatgcttcttgctgaatgttttcttcttcttttgtgagtaaaattggaccttttaaaattttgtcttttttaaagtcatatttaactgggaaagataaagcaaaagaaatgcttcttgctgaatgttttcttcttcttatgtgagtaaaattggaccttttaaaattttgctgtaaatcatgatctattagtggcaataaaaaaatccataggttcttagagttgcatctactttacggtaactgagcatgaataaagacagagtgtttcagggacacgattgcttgattttcaagtagggaagtcctgtgatgtcccctgatgtatcacattgaattcactgatgtctggagctgagactgaaatgagagaatgggacacagagcttggaaggaggtaataggaggtaggttgattctgtgtggatttagaatcagctcagaagagtatttgggttcaggaagtgccacgtatctttgctcactttatcagcagtagaggactaaaatctgggcagggtggcagcgggagtcctattgcctgtttgtagaaaagtgactgtgcctgatggcgatctcaagaggaggagacaatggcagggaatgaagaaatgcctcggttgataggtcagtcttgcagctgccagaagattgatgctctctcagcatggacttcaaatacacactgattgttctttactgtcaactggccttaattgttctctaaggatcgctgtagatacgacggttgttggactaaagggagataatcaaaagaatcaaggtgcattgacgagtcaggatgttattcaatggcaggagagagggtagagagtcagggttaagaggttaagtaagaacatagtcttttggagcacattggttcatattgtctacagagcagctgtgtgcctatataaagttacttaacctctctacacttatcacatctgtaaaatggagacaatgctttcattgggcaaggccaagggccagtggaggggcttcgacctggcagcaatggccagcatggtcactggtacttgtgagcaacctcctttcctccattagagcactatcctgctctgtcaatggtcacaagtgccctcagatactctttttttttttttttttcagttatcatcctgtttgtcttccctgcagcctgtacacatctgacccttcccttcttacagtcgtctgctcttttggcttttctgatgcgtcccacacctctctgacccttgcttccagtctccttcctttggctgtacgctgtcctcctagattcttcacaatttggatgatcttccctattcattccatcctttctcatgccacctttgggctgatgactactgatcaatattcctagtccaaacctcctgtgtgtccagtggcttatgggacacgtacactgggatgtcccccaaacatttcaaactcaacacatgtagatgagaacaatctttctcctaaagcatgtttctccacctgtgcttttattggctgtcaggcacgtagtcacccaacttggtgctagaaacttgggagtcatcctacctcggctggttttcttctcttgcagattgcatcagctgcccagttccctcctctccatgccccctgccaatgcctcatcacattttgctttcagactgcctcccaactcacttctgtgcccgcagtgtggcctcacatctgtctacctgtcactgccagagccagctctctggtgaggaagtcagaacgtcattgcccccacattattgacagtacacaacttaggaaacccgtagtgcccctttctactcagccactcttgcagtctggtcctctgccccatccctgcaatcttctaggaagcttatctacctattgactggcagcaccatgcccccgtgcctctgttcttcctgctgcgtggaaatgaaggctaatggatattggctactccagtagcaggctgcatagatgtaccacgttgttttaagccatttacatgagtatttcccccacaagccagaggtttcctccgaccaagtatcttgtcttgtttatctttggtcccagaatctactatggtgaatgagacatggtgtgtgcccaaggcacggaataaacgatcagaaatgatttatttattcagagtgggctgtcagcttcagccgctgacttttctagagaccggctccctcggggcttcagcgctcttgggcccccgcagccacgcaggtgaagggcagcggggtggctggctgtgggagggctgggctgggtggctgccctcgcgcctgcgccctcggctgctcctctccgggcgcgtctctgtgcgcgtgtgtctgtttggagcggaggagaggcttgggtgacaggcgaggggtggggggaagagttcagcctgagtcacagtctcattcactgatttctcttcggctggacggaggctgcctcctcacgcggctcccaactattcccgtagctcagtgcccccctcccgccgctctactcagccaggcagacagactgacagactcgctagtgagtagcggcggcttgagcgcccgggcagcgcggcgggctgtcgccggcggtcttgtcttcccacgggctctgtgtgtgtgtgtgtgtgtgtgtgtgtgtgtgtgtgtgtgtgtgtaggatgtgcgtgtatgtgatgtgcgcgcagggggtgtccctgggattccacgcctgctccaagagctccctgccgggatccgcgtgtccatccgagtctgcgatgctgtgagggcgctcgcctaagcagggggttcggacgccccccgcgagcggcgagagtttgctgggattccccggctcctcacgcagcggctggtggggttccccgggaaggcgcctgggtaaggcagcggcggggaagcccgggattgtgagtggctggcaggccgggaatctgggagcgggtttggcccagcacagccgagggagatgccggagcggccacccttggccgcccagcctctctgcctttctcccttgcccttcctcctttcttttctcagcagcatcacaaaggcgcgctgcaaaatgaaacccagtgtagtgaagctcggctgtctcccacctggtgcatattccgccccccgtccttgccccaggctggaggagtggagtgggggtccccaagattaggggcggggtcttaccacgggggcacacctgttttcgattcttgctgaattcaagctgggtgcgggatcgcgagagaggttccagtacgccggtgtgtgtgtgtgtgtgtgtgtgtgtgtgtgtgtgtgtgtgtggccgcgcacgcgcacacgctccccaggcccacgctagcggggtgcgctcagtcaatagcacacctccccgccggcccgcgtgcgcccagccggctccgtgggctcctcgcgcg

SEQ ID NO: 11879 - DNA, 6000 bp, Homo sapiens
cagaggttgcagtgagctgagatcgtgccactgcactccagcctgggcaacagagcgagattccatctcaaaaacaaacaaacaaacaacaacaacaaaaacccaatggtcatctcaagtcctatggctggccagagtatgatatgtttaagcagctgaaagaagaccaatgtggtcttctcacaaaggagtgaaaaatcaccagattctaaggtttgaaaggaccaatttcagtttaaaaactgacattagtagagcaattcatttccaaatgacctagaacacttctactgcaccttgcactgtctctttgtaaatatccatcacattggtcattgtttactgtctgtcttctattccaggtatgcgtttcaagaacaaagactaaatctgtcttgttaataattatatcctacaactcaggacttgcttggtgcattgcaagtcttctttaaatatatttaaaatgagtaactttgtagagccatatatcatttttatgtttgtttcttggttaaactatcttaaggttttattctcatttatgtgaggtattttttcttttcattccctcaataaataatgaccactaaatatttgacagtatagcaccaggtagtaggagctggaaaaatgaaacaactcccagttcctgaggagtaccagtctagtgggaagacagacttgcaaacaatagaagatagtatgattattgctaaaatgaaattatgtacaaaatacaagtgagtcctcatagacccaagtgtaagagctaaaaccataaaactcttagaagaaaacacaggagtaaatctttggaatcttgggttaggcactgatttcttatataggacaacaatagcaagtgattaaagagaaaacaggtaagttggactttgctgaattaaaaacttttgtgcttcaaagaaaaccatcaagaaagtaaaaagacagactgaaagaaaatattttcaaatcatatatctgctaagatctagaatctatcttttattttttaaaataaattacagaacaacatggacatatagaatagatatttttaaacccttacaactcaataaactttaaaaaattaatccaacttagaaatgataaaggatttgaatagacatttctacaaaaaaagatatacagatggcttctgagcacctgataaggctagtagtcaatatcattagtgctcagggaaatgcaaagcaaaatcacaatgagatattacttcacacccactaggacagataagattaaaagacagaaaataaaagtattggcaaggatgggaagaaattggaacctctacacattgctaataggatgggaaatagtgcattcactttggaaattagtgtgagagttcctcaaaacgtcaaacataaagttgccttatgatcagcaattccactgctaggtatatacccaaaggaattgagttcaaacaaaaacttgtacacaaatgttcatcaactgatgaataagatgtgctatagccatacaatggaatattatttggccataaaaaggagtgaagtactgatacatgttacaacatcgatgaaccttggaaacattatcttcagtgaaagaagtcagtcacaaaagatcatgattctatttacatgtaatgtccaagctggccatggtggttcacacctgtaatcccagcactttgggaggtgggagaatttcttgaggccaggagtccaaggttgcagtgagctatgatcatgccactgtacaccagcctaggcaacagagcaagaccccatctcaaaaaaagaaagaaaagaaacaaagaaagaacaaaaagaaatgtccacaataagcaaatatagagaggtagaaaataggtcagttgttgccaagggctgccaagactatgaggggaaatggagagttactggtaatgtgtataaggtttcttttagagattacaagaatgttctaaagttatattatggtgattgttgcacaactttgcaaacatactaaaaaccacagaattgaatatctcaaatagctgaactatatgacataaattatactgcaataaaactatttcaaaaatgcaattgaatcataaaagataaattgcttaggtcacagaattcagtgaagctttcgaagaggtcatgtgtaaatgagacatgaaggaacagcaggagcctgctgtgtctatgaaaggacaggagaaaacattccagacagagacagcagtacacgcaaaggcaggggagagcatgggaagagagcatgtcatggcatgtacagtcgtccctcagtcttcacaggggactggttccagggcccccgcggataccgaaatccacccatgctcaggtgccttatataagatgatgcaatattctggtaaagaatatcctaaatcctcccacagacctccaatcatttctagattacttataataacacaacataactgctaaataaatagttggctgtactatattatttagggaataatcatgggggggtagtctgtagatgttcagtacaaatgcagtttttttcttgaatatcttttactccaggttggttgaatccacagtgtatgcggcacccacagatatggagaggcaactgtatagtgtgtgtagtcaataatgctggtacagagattatggcctgtagatgcagggctccagtctgttggggtaggcaaggaccaaatcagaaagggctatttcatcatgctagctttccatgaagggaaagggaacccgctgaaaaactttctgccagtagaagcatcattctagtataaacgttgaaaggtgatctgaagggaaatgaaactagtgattgcccagaaggaggaaaagaataatccctgactaaatttataaagcccttactccccgctaagcagtttccttcaatcatctcatttaatcactaaaatgagcaatagttatccccactttatagatgatatccacagggcttgctccctcacctcctgcaggtcttcaggcaagtataagtgcctcgcactttcctattccccttgctttatttttctcctggttgctcaactcaatttaacatctgtttcgcttttgaaatcttgtttaaagattctctcccacactagaatgataagtccctaggaataatttaatttgtatttcagttctgtatccccagtgcccaggacacagtcaaccctcagtaagtacataaatgaatacatttttaaaaatgaggaaatcgggtcccatagagattaagtaacttgtccttgatcgtacaagtaataagtggcagaattctgatttaacaacccacattcttaaaccactaagtggttacaccagagttgtaatattgtaggcaagaggcaagtaccctcggactgcggtagtggggaagcggggtgataggtctgcctcgaattggtgatgactggatgtggaagggcgctgaaagggctcaatctagcatgactttggtttctacatttggcttatgggtaaacaggagagcaattcttcaggaaaaagaatacaaaggactccaggtttgggcaaaacgataagaggaggacgtgtcttaatccacgatcctttttaactcttttactatttcccttagattactaaaacatgttgttaatttgaatatatgtgaagccagtaaacccaaactgatcccttcgtcttcagtctgaggccagtgggggataggggtggggatggggacggggatgggggtggggacggagaggcagaccagaatagggtcagctctttttttttttttaagttagtccaaacttaccaagagtagaaataagtccccagcagtgcttaactctgaggtaatttttaaggcagatgctaaaactggagaatacaccgtacccttgtggagtcaggtagtattcgtagttttagattatcctgacggtgttagtcacttgtagaagtgacaatgtgcaacaggccactgacacccaatccctggatggccaggagggcaggagggcacccggccgcggcctcaggctgctgagcaggcgcaggaagctcgcgcctcaaacgactcccaaacccgggcccggcgcgaagcagggaagcgccgctcacattcctgcacgctcgcccggccgcgggccagcggcctccggtccccaggtggcgctgtgggctcgcggaggcggccgcggcaccagggagcgtcgtctccctggtgcgcatgctcgcccccgctgcgggctagctgttgtgtttttttttttcccccgggcggcccggcggctgcgtactggctgtgggatgggaagtgaagccccagcgagcggctgcagcggggccgtgaggagcagccagcgggaggcggcggcgagtcggtgagcagctgggaagagcagaaccggggcggagcacctgcaggcgcgggcggcggccccaccatggcgattcgcaagaaaagcaccaagagccccccagtgctgagccacgaattcgtcctgcagaatcacgcggacatcgtctcctgtgtggcgatggtcttcctgctggggctcatgtttgaggtgagcccgccccgagtcccaaccgcctgccccgccacctccagcccgggcccgggctccagatgccagccccggcttctccgcccaggacgcggggggctcgggcccggggtgggtgcagacccccagtccctgaggtgcaggccttccctgccctgccccacgtcggcggcagctccccggcggccggcccggagatgcaaagtcccggtgggcctcatcgcggcccgcagggggtggggaccgccgcgtcgcccccttcctgacccgccgccgccccctcccgcaggctgcgcggcgcagttcctggttcccgcgaagggttacgtggcagccggcgaggggcctgcgggcgggggcggcccctgcgctgccgagctggctcggggcgggtgggcggacttggggggactgccagcctcggccgcggtgagcgtcagccccgcgagggccggggaaggccgaggcccggcccccgggtctgaggagtgccggcctggagaccacaggccccgagtgacaggggagcccccggtagctccgagattggggtgagcgagaaaccggagtcaggcatctgctttcgacttgaagggcggtggccgccgggcaccggcgcagtggaggcgcgccagattgttttcatttttgtcttttaaactgatattattaccagttaacgaactttttgccctgacgctttaaagaaacaaggtctgatggataaatcgaggttctgaacagcggtgccaaggaatcgagtaattttgtttcttgaagtaggagaggatgggaatgtcaggagtgtgtaaattctcttcccacgtatctagtattttgatgacttatttaacagctgttgaatgtggatgataaactttgcaaggtgaacgagtaacatcctacgtttttcccctcgctccccaatacacacgctcattcctttgcttttttccctttttaatttttctctggagcctttatgtctcagtaaatatacaaattattttgctcctgccttgttttgtctcctctctcctgcatgtaacaagtgagagtagagattttggagtatttttacgagtctgtatttccagagtctaggatagtgcctgggacataggagtgcttaaaaaaagatgagcgacgttaagaatccttgagaaaacctaatggaatgatattaccagtgaccaaaaggtgaatacattttctttttaatggagcatatttgtttttttttttaattttaaaattaaataatattttaaccttattttcgcctctcatcaaatgggcttttctggatctagatacagatattatttactcctgattgtgtcatgcatgtttgaaaccactgctaaggaggtagcaggtatagttaaagggtaggtagaaggaaactaacattctcaagcttt

SEQ ID NO: 11880 - DNA, 6000 bp, Homo sapiens
aggaagaaacatttaaaagggacttaggaacagaaacaatctctctgttggctgagggatggtagatccccgcatctgtgctccagaaaatatcctctatatagcaagcttttttggtaaaacatgcagctggtcatgcctcagactttctagcaaaacttgtgaccactggggaggttagataaacatctttatgagggtttatccatgccatggaaacaccttggtatgcagtagtcaaacatcggtcatcatggcagtttttcttcaagacggcatcactcttgccatgcaaccagctgtttccctaccctggaccccacttccccctaagtttgtatttaaaaagtggcatcttatcaacacattttaaggtaacatgctgacctggtgattgtcaaggccagaatggagagatatagtgggaacaagactgttggtatgcctctttaccaattaagggatccttgtctcccccaagtggatgtgtctctggttgaggatgaccttgaaagggactgatttctagccatggggaatacttaactgacatctaactcccagtatcttccacccatccatcctactttattccttagggctatgcagaacaagcctagtctttccactgaggcatcttttagtttagtgaagaccatgggcttgtttcatgggttgtttcatcaacctttcaatataaaaagatacctcttcacacagactttctttacccctactctgttgtttccattccacttacctccttcagatatattttttatttttgttggttttttcctcgaagcccactagaatgaaagcttcatgaggcttttcatgccattttgtcatgtgctgtgcttggcacattataggcacacagtaccctctggctttatactctcacagatctgcaagacccctactgcaacccaatgcaaactcctctctctataaaaagatatcttttcccccagtagtttcaacagaagtcatagaattgagtttcactggcctggccagaatcctgtgcccatcctcaacaaattactgtggccaaggggatgggctacattgcttggctactcttgggtcatctgctcaactggaataatgttttttctttttctttttaaagacagggtctcactctgtctggctggagtacagtggtgcagtcatagctcactacagcctgcaactcttgggctcaagtgatcctccagcctcagcctcctgagtagctgggactataggcataaatcacactatgcccggctaagttttaaagttttttatggagatggtggtctatgttgctcaggttggtctccaacacctgggctcaagtaatctgccttccttggcctcccaaagtgctgggattacaggtgtgagccaccacacccagtctggaataagatttgactgttgtagaatcacatggctagaagtgatgaaggattgattaagcactgctactaaaagaaagattgaaggaatgcaggacaggcaaaagaacacagggaggaatgcatattcagaatgtctgtttgtcaagcactgtataggttgaacacccttaatctgaaaatccaaaatccaaaacgctccaaaatccaaaactttttgagcactgatgtgatgctcaaggaaatgctcagtggagcattttggatttcagattttcagattgggatgctcaactggcatgtattctgcaaatactcaaaaatctgaaaaaatccaaaatctgaaacacttctggtctcaaatatttcagataagggatactcaagctgcatatacattatcccatttaatttacatcacaacccaacaaaatgggtactatttttagaggagaaagcagacttagaaagatgaagaaatttgccgctacaagttgatgagctgggactcaaatccaggtctgttcggctctagaacagaacctatatgtaacatgtctctcttcatctatcgctcaggttttattcacgtgtcaccctcagtcattcactatggttcactggatagctagggaagcacagaacaaacactcagtatttcactcaggtcaggctctgtgccctgagtgtgcctgtctttgccatgttctcccagccaatgttttctctccaatttctccagttttccaggctttccattagactgaaactcagctctgcttccatctcttccacgtattgtctgaagctttccctgatggtttcacatacactaatccctgtgaactcttaagttcaccacttcttctctgggggtggggatggaaagagaatagaaacaaattactctctggacaaattccatgcaaagattttcagctgggtagacccttgataagaggcctgaaaaacgttggtaaagtccaaacctacttttgaacctcaattgagcacctttctttgtggccaggtttcaccctccagagtgttggttaataggttgaggacaaagactccctgatcagaatgagactccccgaagatctgtcctcttgtttagcagaatctggcacatagtaggtactcagtgtatatatcgactcaatatcatgcatctgttgtgtcccagctaccttccacagggcttgatgggttgacttaaataatgcttttaaaattcaggttatttcaatacaaacagcctggcatcattaaggcacaagagcctcacccttctacaccactttccacgaacttccagttgccttccttcaaaatccttgttttcttaagaaacccacaaaaataccgcccctctatcaaaacgtcctcagctttgccaggtagagaattgcttctgcagtagctgggccacgtctctgtggtagtgcccactgcatgggatcggtattaatctgtttgtctttttcatcttctgggctgtgagctcctagaagtcagctttttcacttttacccaagccaaacggttattcgcgtaaggttggttataattaaaatgtcggtttgtgcacatggtttgggactctgtgtatgagtacgactaatatcttcaatttactaagaagataaagaggtcgataaataaggaggtcaagcccgttttgcaaggtcacacaggaaagaagcagaccacgaaatgaacttcggctgtcacctgcggtgggcgcactagaggtcttttgaactccttcggctaccgtcgccgcgttctcgctgtgcactcttattctgcgcctgcgcgcggctacagcacggttcgtttttcctttagtcaggaaggacgttggtgttgaggtgagtccggtcccttttgcatccctaccccgacactgcgggttgtcacaacggcaccctcccgctttctctctgcctcggatttagtcgtgactgtgtgtctccgccgtggtgcagcttcaggcctctcccgcatctactctctcacgcttccgctgcggcctgagggagggcggcgggcggaccacggaccggggtgggttgcgacggccccaccgaagccgggtgggctgcgggaccctcgagaacccagctggcttcggagtgagctggcccggggctggtacccgctgcgctttttcacagccattgtgaccttggtgaggtcatttgacctatctggccccggtgtttctcccgtgagaaaaggggtggtggtttctaatgcagctggtcgtgaggcgcaagggttagtgtaggcgaagcagctggcagcgtcgctcgctgtgtggcagcgttttaaattagagctggaaaactggaggagggtcaccgtacctgccgcaggaggggaaggatgggcttcctgcaacctcccttgccccacggcttcccatcctacccccggccgcgttagctgaaggccagcagggacgcaaaagtttttaggccccttaggtctttaggtgaggctgggcaaaggagcagttagggaatttgggccctcatggtatttgccgcgttcccgtccaggttttaatggtataccgtgtgaccgtggaaaacacctgcctcatgatctgacagggttgtcgcgaaggtttaacgagtggacagaaaatttttagaagagaaagtgttgcataaatgggtttgcaatcgttaattaccaatgcggagctactgcttatttttcttgttgttggaaagatttttgttgcctttgctcgtccattactagtgtgccgcagtttgtcgcgtttatttagggtggtcgctcagtatatggggggcggggggaagatgaaacaggctaagccaagagacagcttaggctttgtgggaggaatccatccactgtcgtgctgtgcctctctaggtagtaaaatgtactatgcatgagaattccttttgatatcttttctgagtttttcttttattattttacccgagaaagggaaaaaaagctcagagtagtgagagctacatgaggtatgcaggacgcagagacctgagtattggacttcagtgccgcccctcacccatgtctcaacccaaatcttattcctgaatttgtgatataaaggacagcgtttagtcagtcaatagcttatgttattttaatgtaaatttttgataaacagtttaggaattgcctctcattttttcttaactcacttgtaggccggaatcccagcactttgggaggacgaggtaggatgatcacttgagggcaggagtttaagaccagcctggggagcatagctagaccctgtttctgccaaaaaagaaaaacattcatttgtaactgctgctaatcggagtgtatattcagggcagctccaatcaatgcttccaggtggccattctcaagtttgtggcttaaataaactctgtacttaatcatattttctgaatctcttaaggttagcatacgtatcaaggacagtaactaccatggctcccgaagttttgccaaaacctcggatgcgtggccttctggccaggcgtctgcgaaatcatatggctgtagcattcgtgctatccctgggggttgcagctttgtataaggtatgtatgttttttactttgtgccgaaggtcataaagtatgtgtttttggttgaaaaatcttttaaagaaactcccccttgtaatgtgtttctttctaaccctttctgcactcacctcagtgtgacaggaactatagcttgtcctccatctttaaatgaagcttgttagtttgctggaatgccgtaacaaagaaccacagactgggtgccttaaatttgctcgcagttctggaggctagaaatctgttggcagggttgatatcttctgaggcctctgttggcttgtagatggctccctttgtcttcacagggtcctctgtgggcatatatctgtagctgaacttctttccctttcttttcctttacctttccttcctttcctttttctgcccttcttttcattttctttccttctttcctttttctttctttgaaacagggtcttactctgtctcccggtacctgggactgcaggtacacaccaccggaactggctaatttttatattttttgtagagatgaggtttcagagatggccacgttgttcaggctggtcttgaactcctgggctcaagggattcacctgccttggcctgctaaagtgctgggattacaggcatgagccaccacacctggcctgctgaatttcttaaaagaacatcactcatattggattagggcccaccctaaaggcctcattttaacttagttataaagcccttatttccaaaaaacgtttagattctgaggtactgagagttaggacttaaacacatgagttttggtcaaacacaattcaacccattacagaagctagtatgcagaggggctgggaaggcagcatagctgcccctctatccatggggaattggttcaggagccctgacgatattttaaatcatctctggactacttataatgcctaatgcaatgtaaatgctatgtcaatagtttatattgtatttttaattttgtagca

SEQ ID NO: 11881 - DNA, 6000 bp, Homo sapiens
tttatggtaatatctataagagtaaatgttttaagcagaaattctcaagcaatattgagatatttaaacaaattttgttcaattaactgtaattagatattaaacattaatttttagagatgctaatgtaaataaaataaacaaatataaatctgaatacatgatatagtcataagaattccaaagttatctatttgtgaatgggcaaaactaaaatagaaatgagtattttaaaatagtagcataggttatctctgtatggtgggattatgagttattttctttatgctttgtatactgtatttcctaaattttttacttatggcctcttttataaaatcatattttacctcctttattgaattggccatttgattatcttattaatgtgtttcttaccctccaaggccatgcaagggacatgtaccttttgttttcttcatcaccgtatccctagaaactaccataccatgggcattaaagtgttttgaatgtttgcttaataaataaaaaattggacagcgcattaaaatgaggtttttttcttcaaaagaggtagatttattctaatgaagtttaagctttggagccttgcatttgctcaagcccttcaaaaactctgaatggacattagtaatcttcttttttcaattttgcattctttttcttagagttagatccccaaaagaataaacttcaggcctttaaaaacctagatctgtttctgcttcttggatagtcttcattttcattaatttcttcttcatatataaatgcttcattttgcagaaccccttgtaatccccaaatatgttatataaattatttccctcacactttaattattctatgaaaatcatttaatttgtgtttctctttccacttgcacctgggaaactactttagcttacctgtagtgataaattcataccagttttgtcaaataaagaaaaaaatcttctaaaataattcgacaactttattgaagagaaacatctatttttgaagtcaagaaacattgtgcgagcttggcatttatatatggagacgggatttggatctattcctagctgaaagagctgactgcctggaaaaggcctgagggaagaagtgagaagcagtcttctgaggtttgcctttttctctttcttttctttttattcatttttttttcttttggtttatttgttttccttcagactgcagcacatcaggacatggttttctggccacatcacatattctgaaaagcatctggtctccgagtggcacatatcaaagacagcaggagactataaagcattccttgggcaaaagggaaccttcatttggtgacgacataagtcaaaaattaattgctttaaatatctatttgcttgagaaacagaatataggcatagtttaaagtcatttttgtgttattatggaaggttattgttcaagcagtttggttttgagtttggatgtgttagtaaattgtggttgatgttcattgtcagtctttgggaaagtggcaatagttatttatttatctgcaagttgtggaaacattagtctatattcagatccatttcaataaagggcatttacagtagttcatatttttctaattctttcttttttttctaaatttgaaaaaaggaaacacacatgcagcttttatatgtaaatattctggtaatatattcaggaaaatatcgttcagagatagggagttttcgactattgttttattcataccttagtttgaaaaatttcatgatgtgatgataagcaacttgaagttaattgaaaagaagtgtcctgttaaattagaatgttataagataaacctgtgaaagcaaaattttcaacaaaaggtaaaattacaactctaatggaaatatcaaaatgaacatgttaaacagtttatttactcattaattaatgagggaaccccacggatgttatagctggttaaaaaaaagaacctttcaaagagcagacacagtacggatcatgaatattgaaatgaatatgcaaatgggggcaagtttgcctttttcaacagtgaggtgggaagtgaattaaataaacatctactggacaagatcaaatttgcatgtgacaagacaggaattagtttgcattgctatcaattttccacaacttgcagagctgtaagatagctttcataaaacaggaatctgataaacaggaagggtgtactctagtgcaaaaacaatgtatagtttctatttaatgatgcatatttatagattttcctgcatatataaggctactgaaatatagtcattgttttctgttttgtagctataaaataaatctcaactttgttcaaagattaaaaagtacacagatattatattattagattaatttccaagtaaaataaaatgtaattgaattacaaagggggctggagaagctgaagatatgagatccattgcagccacattcttttatagccactttctttctatttttattactgataccttatctgcttaggtgctagagctaaaaatctgtgaggtattactgaccagtccttcttcttaggctacacatccaacctatcacttagtcttcatggtctgcctccactgtctgtttcaaccagttcacttcatttttattgccttcttcctagaacaaataaatttgcaatggttatatgccttgtggaatattattatatcttccttactggaactgttgtatttagttttattttatactattatgttatccacaaaatactcagaatgtgtgtgtgtgttttttttaattctcagaaaaatccctttttagcaagagttaatatgcaagtttttttaaaattccatgcaaaagacaataatagcatggtttgtttacccaaatgggttcatgttcattataatttacttctccttttgactacactaaaatattcctactgtagaaaataaaagaccccttttcattaacccactatttcccagagtaatgatttttaaaatgtaaatgaagtgttattagtatctcacttaaaacctaatgataatacacagtttttcacagaatggaatccaaacttcttgtcatggactacaagctccttcatgatccctttctacctcctcaatttcattttgtaacattgtgctttggggcacattgcacttctttcaatttctttaaagtagggtttctcaagtttagcttcttatgaagagctgtcttctgcactgaagaatgtttagcagtatttctagcctctatccactagatgccagtattaatcacacacacacacacacacacacacacacttcagtgtgacaatcaaaattgttttcagccattgccaaatttcccatggtggggagtggcaatatctcccctagctgaaatccactgcattaaagcagcaaacattcttgcacgtagacattctcatacaaatttcctctacaaacaaggctctttttaggttcgctgcatggctgccttcttctctttctataaatttcaaaaacacatctcttattctaaaatgcctttcttgtccactataacgtaaaactactatctaccctatcctctgaggattaaatactattcttttctttatataacttaccacaatatataattaaaatgtttacttatataatatttacctcctcaactagactatatctctaaacaaggaatgtcagtttggttcaccatttgcataagtttgtttcattatcgtatattcaggtcttggcacaggactgacactgaggaggcattggatacgtattttttgagtaagtgaatgctaatttgagttgaatttcctattcataatacaggatcttcacattacaccatattcagaagttcacaaatgactcactgtgcttagcaaaattgtcataccaagaataaatgccgttctaagggttatgcctatagtagaaaatgatgttttctgtctatgttatattattattattaatctcataatggaacttttggagaagccagaaaaatctatttaaagagctgtaatcattgtatcagccttatttatttgtgtatttattgtattccctcagtagtttatccatttaaatccaaacttatatgaccattttgaaaatcttccaaaaaagcaagcacaccattttcaggcgtgctcctcgtttattttttagaaaatatattttaatattttttcatccaggtgctactttgaaagtattgaataaataacttttggcagataaatcattactcaacacaatctgctataataattttgggttgaaagcttatttttaggcttaatggtattgaaccccaatacagatctcaaagccagttagcatgattgaactgaattgcagatggtccaactccaagtgtggtgctttgctaaaattagagtttctattgtttgtaaaaataaatatttgcaagttttataaataccgtctaacacaaactcgtagaaaaattgaaatgtgtaccttctttggattaaaaatatagctcaaatgaactaaaactcagctttcagatagctggcacataagacaaaatcctaggaaagctcccaatttgcactgtaatgttagttctctagatttcacttttgacttatcagcatctccaaaaattgataagaaatagataaatcactttcagatattattttacaactggaatacttcatgtgtatactgaaataatttattcttttctgtattttaaaaagaaaatgatgttaatgaaggtaaacttctttatttcagcatccaaaatatttttaataagagggtaggctccacggtttgtttttgtatcctcggctggcccttcggtctctcgcgcgctcgaacttccggccattggagcggatgtagggtttgcagggtttccggggcgtacacccctcggccctttggaggaccggagagccggacgacgccgcagcccttgggggagtccagcgccagctggcgaaaagtgaggctcttgccccgcgccccgctccgctccgccccacccccaccccaccccactccctagaagatgtggctgcgggcccggctggtcatgcgcagcgcacacacctttagtttgggcacctcctgaacccgcacgtcatccgttatggcccccacaaccacggctgttttgttttcccggccaggaagcttcatcttccagatcatccgggaaaggggcagaggtggccggttgttgcgactcataaacaacctcttcagcacaacccggttgaatgtggagttggttcctttgctggaaacctgtacagcttgaccgacagacagcctcaggtagatatcctggctcttaggctccttgcgccgaacctttcggtccttgtggcgggtgtcaactcccatgatggcgcctcctgcctggccaggtctggaaagagagagtggtaaactttcttttgatgaggattaaaaaaaattggatatcaatttttttatatattagtttattttggacaacaaacgcataaataatacagaaaagacagaagacagaatttgccacctactcttaagtgtcttgtacattccaacccctcacctcccagtttttgaatgaaatgacaaattttctacaaaatatattttttgttattattatttgaatcaaaatatgaattactaaacaaacagttcttgaacatgtatttacttttaaataccctcatataagaaacataccaaattattaaagatgttttaacatttcatattaaagaaaaaataattattagaaatttgtacatcaatcaaataacttttatgcctcaaaggctatttggaagtatttgtctacttcaggaacctactttttaaatatatatatcctgcctttaaaagtaattaaattttatcttctatgttcaaatgaacaaatttataaatgtccagattcatgaaagacattgagtcatctcattaaaacaatgagctt

SEQ ID NO: 11882 - DNA, 6000 bp, Homo sapiens
ctaagtgatctctgtggtgtcttacactcaaggatacaagaggcaagggagaagtgcttaatggctccaggaaagggggaacaggcatttattgttcctcttttccttactcccacgcttctctcttggtagccttcatgtttgcccacattttataaatacaatattcatgactgaaagcattcagaagcatgctttgcaacttccccaactcttgaggcaggaagtagcaaaaacaatattttgaggatgggctggtgcttgaaagagaggtcagaggggctgctggccttgaagagtggcaggcctcattggttcagcaggactgatttcccgtctccctcagaatgcatttgccactcagactacaaaagtgctcattgtcagctctcacagactcccagggactaaatgggctgccttgaaggctctcttccttatgctattagttaaaacttggtgcatctctattgcttgaatgtctttaaactcatttggctctctttgcagggtaatcaatgagcttattggaaatctggttggacatctttattttttcctaatgttcagatacccaatggacttgggaggaagaaattttctatccacacctcagtttttgtaagtgtttttgtcctgtctcatctaacattttactgcctgtgttcttagtgcatcctaatgagagctccatgaggagtatgatttacccctatgccccatctgctggagaaacctgaggcaacaagtgacttaccctagtcacacagtcacaggaagttagggattaaagcttaggctcagttgccttcctgttactcttttagccagggaccactgacaactagattccaacattacaggaggcatctcagctctctgagcctgctgagggacctgatgcaactccagagtgcgaaacagtaggctggtgaatgggcagagtcacaggttagtggggtgtcttttcttggcccatcagtttttacccatgattttgcccaaggaagggtaagttagcgtgttggtcagcaattttaaacatttttatattaaatactatggagtagacattttacaggactgttcagagttaaaatgagagacttgaggtttgtataggcccaaccccctgggagtttgtgctctttatctgcttttagggtttactgaagtgggctggtaagggcaacagctttgatttttgagacaaacttggatttgaatcccagtcccctcagatagcagtttttatactgggaaagttacttaatcaaacctccaagcttcagtttgcaagcctgtaaattgtgggagaagcccctgtctcacaggactgcatgaggtaagatacactgttgggaagcacagtagcgggttctcggtaagtaaagctagctgccatattcctaaaggtgggggtaggagagcaggattttgacgatctgagaggagacgcgcacacacccagaagcatgtaatagtcgtgtgaccgttctgtcagtgaggcaaaaggctgtcgaagaacgggccagttaaatcaccatctgggtgtcacagcctgcctgacaatcatgcctaatctcatatcagggatatgcagtaatagcttgcatttgaaagctttaaaaaaacaaacaaaccaaacccttccacatcttgctaattttaatgttttgcagttctgtcattcctctaagggatcagtgagggcagtaaaacttgagcaggcctcctctttctccccttccttttatagggtaggggtatgtttttcaaagacttttcaaattgtgaactgtaatatacagagatataccatattggtggttgtggtgtgtgtgtttttctttaagagaataaaaagaaacttgtttctcttctgagccttgaattgccttcaggctaaaaaaacaaatgaccaatctggtttctaattatcaaaggacataataacagcaggtttggctttctgatctaggtttatcaagtaggatggcagatgcatcaattaaaaaaagcttggtgcttttggggggcagccaacagttactttactttaaatggccatattctaacttaacggcttgtagctacttctcagttgtgggcaacacaggatacaagattctagtggcaaaatcagcgagccctggagcctgccttccacttgaactttctctgttgggggaagtccttctgctaaattttgcataaagatcagatgacaaaatacagctccttgcaaaagcagtaactgctttgaaattaccataaatttttgttgattatgtataattgggtatctttttatactaattatttgcatttaatttcactatctacttaagcagtggagatggcttccatattgtcttagagtgagtagcaaagcaagacagccctagcattttctccagcaagtgttctattttattatgtactttggaggaatattattgtaccagaaggcatggatgttgagaaaccagcacttggaaaatacattttgatttaatggtaaagctgtatttgtttaaaatggaggaggtgagtataggaaggtataactgcttttctaaatggaatgctgatacatttgtatcaccattttccattccatttagagtagttatatcttctctgtacacactaaattttgtgtttaaaaggggtttttggccaggcgtggttgctcacgtcggtaatcccagcattttgggaggccgacgggtggatcacgaggtcaggagatcgagaccatcctggctaacatggtgaaaccctggctccactaaaaatacaaaaattagctggacatggtagcgggcgcctgttgtcccagctactcgggaggctgaggcaggagaattgcttgaacccgggaggtggaggttgcagtgagctgagatcatgctactgcactccagcctggtgacagagtgagactccgtctcaaaaaaaaacaaaaaaacaaaaacccgagttgttgtctgttttgggaagaggcatgaaggtatcgagtatgatgtaaacagactccagtcactgactgctgtcccttcccaggcaggatgcatgtagtataacaagtagtgcagggcgcaggctctggaaccaggctgactaggttggaatcctgtcactttcgaagcgcttcactcagtgttggctcaattttcttgtttataaaacaggagtaatagtaatgcctacctcatggggttattgtgaagatcagatgaatttataagcaggcagcacctagtgtaaggcaataatcactgagtaaattcacatagtaactgctctagtataaggtcaagtataaagcctgtcctcttcagggtttctgctgtggacaagtcacctgtcatgacttactcttgctgccaagaagggtttaagcggaggtatcagatcatgctctctgccttcaagcaaaattttaaacattaggatctgctaagtggaataggtttaaacacattctcagtttactaataaaagagtcaaagatgggaaatagttggaaaatactattgagagtgtaggcttgggtttaagttctcttagctgttctgtgaactcttagtttattaattttaaggtgggaaatcatctaaccgtctggggccccagctctcccaccatctgtgagaagggaagaatgtacctggaaggcagattctgaataaattttaaaacatacccatacttccaacatagaaagccttcttcccctgtctcctttgatgggctcagctgagagccttttagaaatgctgtgcaaggctcaaacatgcaggctgtggatttggcctttgaaagtgaatgtattttgtatcctttgatccagtttgagccatatttagatataccaagatgctatcagtcattctttggttgctgggcttgtgggtgtaatatttttgtttccatactgttctgcatggattacttttataagcagagaaaaaaacgttcagagtgtgaatttagctgaaatctgaatacatttaagaaacatgaaaaacgaatgccgtctgtggtcaggtcatggggctgagtacagaaaagacaaagttaaataagacgtccctcgctgccttcaacatgacaagtgccatgggaacagcaggagagggaggtgttctcggaggtcagataactatgtggaagtgactttgttctcttctctccgtttgtgtccccgtctttctgcaccaggtaccgctggctgcccagtaggagaggaggagtatcaggatttggtgtgccccctgctagcatgaggcgagctgctgatcagaatggcggaggcgggagacacaactggggccagggctttcgacttggagaccagtgaaggggcggcctcgggcagccgctcctctcaagccacatttcctcccagtgctgggtgcacttaacaactgcgttctggctaacactgttggacctgacccacactgaatgtagtctttcagtacgagacaaagtttcttaaatcccgaagaaaaatataagtgttccacaagtttcacgattctcattcaagtccttactgctgtgaagaacaaataccaactgtgcaaattgcaaaactgactacattttttggtgtcttctcttctcccctttccgtctgaataatgggttttagcgggtcctagtctgctggcattgagctggggctgggtcaccaaacccttcccaaaaggacccttatctctttcttgcacacatgcctctctcccacttttcccaacccccacatttgcaactagaagaggttgcccataaaattgctctgcccttgacaggttctgttatttattgacttttgccaaggcttggtcacaacaatcatattcacgtaattttccccctttggtggcagaactgtagcaatagggggagaagacaagcagcggatgaagcgttttctcagcttttggaattgcttcgacctgacatccgttgtaaccgtttgccacttcttcagatatttttataaaaaagtaccactgagtcagtgagggccacagattggtattaatgagatacgagggttgttgctgggtgtttgtttcctgagctaagtgatcaagactgtagtggagttgcagctaacatgggttaggtttaaaccatgggggatgcaacccctttgcgtttcatatgtaggcctactggctttgtgtagctggagtagttgggttgctttgtgttaggaggatccagatcatgttggctacagggagatgctctctttgagaggctcctgggcattgattccatttcaatctcattctggatatgtgttcattgagtaaaggaggagagaccctcatacgctatttaaatgtcacttttttgcctatcccccgttttttggtcatgtttcaattaattgtgaggaaggcgcagctcctctctgcacgtagatcattttttaaagctaatgtaagcacatctaagggaataacatgatttaaggttgaaatggctttagaatcatttgggtttgagggtgtgttattttgagtcatgaatgtacaagctctgtgaatcagaccagcttaaatacccacacctttttttcgtaggtgggcttttcctatcagagcttggctcataaccaaataaagttttttgaaggccatggcttttcacacagttattttattttatgacgttatctgaaagcagactgttaggagcagtattgagtggctgtcacactttgaggcaactaaaaaggcttcaaacgttttgatcagtttcttttcaggaaacattgtgctctaacagtatgactattctttcccccactcttaaacagtgtgatgtgtgttatcctaggaaatgagagttggcaaacaacttctcattttgaatagagtttgtgtgtacctctccatatttaatttatatgataaaataggtggggagagtctgaaccttaactgtcatgttttgttgttcatctgtggc

SEQ ID NO: 11883 - DNA, 6000 bp, Homo sapiens
gacttgtggcaggtgaacaccaggcaaggtgaacactcagatgaacgtggacaaagaacatctgaaagctgcatgacaagtggggaaatagatccagattcctgagaaaagaagacaggctctggaggcaggtgaaatatggctgagaatttgaaattaaaataagtatggtcttaaccaagggtgtgcattaaactgtgatcccaaatccagaagacccatgatcaagccctagcagaaagcagtctagatcatttcaaaagacttaaataaataaataagatccttatttatttatttatttaagatcatcttaaataaataagattaggaaatattacttttttttgagacagggtcttgctctgttgcccaggctggagtgcagtggcacaattatggctcactgcagcctcaacctccctggttcaagcaatccttttacctcagacctccaagtaggtgggactacaggcatgtgccatcatgcccagctaatttttttaaagacgggtcatcctatgttgcccaggctggtcccaaactcctgggctcaagcgatcctcccacctcagcctcccaaagttctgggattacaggtgtgagccactgcacttgacctcaggaaatctattatcccagaaagttagtccttcagaatgccactgcaaaagtgtaggaggaagtgaaaagggcctttgatgtcaaagcatgacatgcaccaatgcataccttcttcatttaaagacaagtctctgaagggtagctacattttaggtacaattatgcaatcttggccttttggatattttgtctatggtggatgcaaaaaaaaaaaacaaaccagccattgtaaggaggtggtaagaagtcggcagaggacagatacactgatagaaggaagaacatgttaaatgaaacctcaacacaagaattctagagccgcgggagtctggagccacttggtgcaggggagagaatcctgcatgtcccagcagcgtgagcccacctcccagtgctacagccacagcaacaggaaccaaaactaaaactcccagtggtgatggttgtaactggaagtttaaacgagatcttctgaaatgttaatgataataactgacatttataaagtgcttactagactgtgggctgttttgagggtgtgaacagtgaccctggaagtttgagtccttcacgccaccaagcacttcacatgtgttacgtcatttggtcttcacaacaatcctatcagggagatactattattagtccccttttaaatatggggaaagtaaggcaaagagagtttaggtaaattgttcctagttggacagctagtaagaggtcaagcacagatttggatttaggcacaaatttttaacactatgccttgggttcaataaagcttctttttacgccaaatagaagattaacctattgggatttctgaaactgttgaactgaatcatcacctcgtcatctctttagccccttccctgagctttctccatcccctgccccccaagctggattggatgctcttccttaaggcttccatagttctctctgcataactattactccactcccatgtggttttagaaccatctgggttttttgtttttgttttgtgttttgagacaggatctcgctctgtggcaaaggctggagtgcagtgtcacaatcactgctcactgcagcctcagcctctcggggttctcctacctcagcacccccatacccccaagtagctgggaccacaggcgagcatgacaacgcccagctactttttaattttttgtagagatggggggtcttcctatgttgctcaggctggtctagaactccggggctcaagaatcctccaacctcagcctcccaaagtgctgggattgattacaggtgcgagccactgtgcccaacagaaccacctgttttgtatacctgcctcacactggactgatggtttcctgaaggtagaattgtattttgttcacctatatatccccatcaccaacacaatgcctgcagcatggtagatgcttaataaaatttggataaattcatcaatgcattcattgcattttctaaataaatcttaaacaaatcagtgttttgcccagttggagttcaaattcttatatctatttacattcccagaccaattcatgcgcaaggccctggcgtctgtatatttttaaactccccaaatgattctaatgtatccaaagttgagagccacgagtctaacgtcaggtattctagtgcagtagttttcaaatgaggtctcccaggcccgcatcattggtataatccaggatcttgttaggaatgcaaattctggagccccaccccagatctacagaatcaaaaactctggagatgggatccagcaatctgcatctgaacaagccttccacgtgaaactgatatgtgctcaagtttgagaatgacagttgaagcataagcctttcccatgcccaggctggggctgtgcctcagcattgactatggggaactcccaccattcaacctacagagatgcccagatgatggcattgaaacccgggttagcaccacacctgcctcctcaggcttctcacccggaatgcagcccggagaactcccccattctgctcatttccccaccccacccagggttccctctctccctgctgccatgtaagatgtgactttgctcctccttcaccttctgccacaactgtgaagcctccccaaccatgtggaactgtgagtccatgaaacttctttcctttataaattacccagtctggggtaagtctttattagcagcttgaaaatgagctaatacagacagcaataattggatttaggaaatactctaaatccaggatgatttcattttgagatccttaactaattacatctacaaagactctctttccaaataaggtgaattctgcggctgtgagtagacatgagttgggtgagggggtgggggtgatactgttcaacctacgacactaaggaaattagattttatttccttaggccagcagtgattttaaacttcagcacattagagttccttggaaggctttcttaaatggagagttgggtccaacccccagaatgttgattcagtaaatctaaggtggagcccgagagtctgcatttctgagttccctggtgatgttggtactgctggtctaggaactacactttgagaactgctgccttaggcatagggaagcccaagtcagaatcagacaagggagtaacaacttgagtgctgcttttagctagaccatgctggaagctagtggagaagggcttggagagaaacatgactagaggcaagtcaagcacttcggaagcagtggccctggagagaaatgaagaccctctgccaccctccaccctcatcggctaaaatagcaacaatggaactggggagaaggtagatctgagtcaaacgaacataacttgctaagtggatgtgggaggtgagggaaaggaagacgacagagtgactccaggtgtcttgtctagtttgtgtgcacaggtggatggtggcacatcccagggatgtaaggcagtgacagattgaatttggtttggggatctatagagtttgagatatctttgcgaagtatgagttcacagttgtttttgtttgtttgttggacaattagtatgtgtttgatcgaaagtagcacaccacaggactcactttggcttaaataacaaagacatttaattgtcaattctaacaggagctctgaattaagctgattccagtgttggttcagcagttcagtacatcattagggacccaagctatgtctgcctttctgtcagacatactctggatgtattagcaatgtctccccacctaggtgcaagataactgtcatgtgttcaagttaatgatctctcaagatagtcacaagcaagaaggaagcagatagagggaaaaaataccttcttgcttatgtacatctcccctatcagggaggaaaatctttctgcaaagctccaagcagcagacatccctttctatctcactggccagaactggtcaaaagcccaacccaagactggcaaagaggaagaggagagccttgaatcataattcatccctgaggctgaacaaatcatcttctcagttctctctctcttctttctatgtgttggcctctttctctcctactgaaaataagctttttgttttcctcgtatgggaagcaaaaggggctggtgagagggaggcatggccatagatagttcaggcaccaagagaactccatggcctcacatagctccagattagcagcctcaaggaaaatctcttctttctctaagtatctgtaagatgtcagggaagaattccagttggcttgggtcatggacctaccctgtgaataatcatagtaagtaaggttggccttatctttatcatcaccgctttcttataactattatatttattaatatactactgctattactactaccactactgatactaatactactagatggactgaaatagaaggaggatgcaaacttgaaaatcagatagaaagggagaaaataattctctttccaaataatggggacttggatggttgtagtaggaatgaaaaggaagataaaatgttaaagataattttaaagaaataatagactaaaaattaattaattaactaaaagaattaatttttttggatccaatgcataaactcttctaccaagggaaagaataacattcattgttttgatactgattgagacagaaatttgctcaaagcaaatttagctattttaccttgtttccttttcagcaaatcagaacttgtccacatactgttgactgcatcctgctacacagcacatttgatgccatgaaggccccgctcagcccccaatattctcacttttcaattccatctgcccacttatcattgactcttgaggattccagagtacacttgctaccttttttcctgcaagtaatgaatcccatgttcatactctcattgaattggcaaaagacgacctttggcaatataagaaggaaatggatcattcttttctaatgagaaacgtgcttcatttttcataactcctgaaagcatggttcctttcacggttgagaaatatccatcatctccacacaaccactttatcctccaagttctcttttgttgatgcaatacagtggtaattggatatctggaagtttagcactcttcagaggtctccaactccccaaacaatctgtggacaacctcaaagcagacagtcattttccccaggacacaaaatcttgtttccacataatgaatgttattctgcctctactagaaactccaagttctccagcccaacacagcactcaagggcccctaagaatgagtcaacagagagatgtcacttgggcacgttgccctgccggtataggctgggatgttcacaacaatcttgatgcagacaaagaagcaggaggtgacaacaggtttctcactttgaactgatctcagctcacaccttcctcctagttaccttatctcagcactcatctttcagatttgtcatctgggtttctttgcaaaaaaattaaagaatgtaagacatcatggtccatttctattcttcccttttaagttaccacagcaatttgcccttggtgactggaggccttgctttagtcagcacctgtgtgccgtttaccaccagaggcttggccttctccacactttttaaagagacccgttgacagaatcgttacaaccattcagccagggttgtggacccttggcacattcgtccttggcactgctgacatttgggaccaggtaattatttgtgtgtgtgtgggcggggggaggggggctgtctgttctgtgcattactgaaggatgtttagcagaatcctggcctctatcactagatattccagtaatactcccctactcgtgccaactgaaaatgtctccagacattgccaattgt

SEQ ID NO: 11884 - DNA, 6000 bp, Homo sapiens
tatcaatgcgactatataaatgtatttgcattataatgtctaaaaagtgctagcttagtcaacataaacatcaatagcccacatggagaaaacagtaatagagtgaaatatttttaaaaataagtctgtgatattaaaatagccatcagatagatttttttaagaggataagggaaaattatctgctttatttcccaatgggtctgctcattttttgccccaagacttcatataggtaccaaattaaaatgcatagccaaaagaagatttagtgacacgactgcactagctggaaacccactttttctttgctttcattactgcttttcattaccttatgttactaatcatttctctcatggtgtgtgtgagtgtgtgtgtgtgtgtgtgtgtgtatgtgttctttttattttaggacttcagtaagtaaagtcttaattactgatgtcatagttagctcatcctctagttaaaccagcatcaagagaatcatcttttaagaagaaaatatttaagtctatctcccttgcagttttcttcttctgactgcctgatggatgagctatgcctttcttgtctcagaattgttttcccactgatgagacactcttctccttccaggcaccagaatctaatttaaactagttcctgtgaagatccaaaatgtctacaaacattttttcctgtatttttcaaggcagagaaaatataagataaaagtaacatagacatcttctgtattctattgtgtattgtactgcattccagatgaaatgtgagtgcaaagtttttaattcatagaacttttcaaagatgatccctatgtatctaagacattgacatttcctggagtgctgtcaaagcagctgatacttttgatatttcctaagagtaattcttccaggcaaggcaggcatgtaatattcctttaaggattttctactttggaagctgctttgtcacaaacaccctccttccctttggaaacaggatctctctggtttcatgtccccttcctgaactgagtccatcttttcttttacatgtgaatattttatatgtcttcagtaagtgtcagagtttctatgcgtacttagcaaaggttatggctcttaaaaaatttaaattcatatattaatataatcaacctaggaagtcaaaggtacatcaagggagaaaacaaatttccttttcttaaacatatctactgtaaatgtggccaatggtatgtagcaacatcactaaacaaataagttattttccagtgaaacaataggatatttcccccaccaccacaactacctaaatgaaataaattacaccaagttaagtattttcgttaaactcaattgtgaaagtctggtttttttctataaattatagaaatagtgtctaagttttgaacagaaacagaattagtaggccctccattcaaacaataaagagttctactaccttcatctgcgattcaggctcatcctaacagatttctcaaagtctaaatgtctcagaagtttcttatttactttgcctttgaaaactcaaaaaagtgacatttttatttctatcagttactgactgcttatgacagcatttttattgagcatgtggatgtcagattcctgcaatacaactttaagcattggatttaaccacgagatcctgggcaaggtacttagccacatgaagcctcggtactcagtatcctagtcagtaagatggaaataataaaatagagaaggacctaattcacataattactagaatgattaaatgggacatttgtaaaaaatcttaagaaagagctgacacctagtaggtgctaaatcgtggctaacattattattatcttattatctctatgtaaattatagttgctagaagttgggggatatgggcccaaggaaaatcagtttttcgcttcagggagctcactgtttcatggggaggagtgacagatacatacgccaatggctagtccctgtataagggaccataccaaaagtacccataacagactattaaacagagaaggaagtcattagttctcaatggggatatcaggaaagttctcatgcagagacaacattgctcaaactttgaaggatgaggtaagcaagtatattcagggaggaatacaggggaagaggaggaagttgtgtgcaaaaagacactgaattgttaaaacgctgtcctcagatcacagtagagaccctgccttaataaatatgcagaggataaatgaaagcattatgaaagatctatcatagcttcaaaagaatgtgtggacttctcttgattttttccctttcactctctttctttctttctttcttcttctttctttctttgacggagtttcactcttgtcgcccacgctggagtgcaatggcgtgatctcggttcactgcaacctctgcctcccgagttgaggtgattctcttacctcagcctcccgagtagctgggattacaggcatgcgccaccacacctagctagtttttgtatttttaggagatagggggtttcaccatgttggccaggatggtctcattctcttgacctcgtgatccgccggcctcggcctcccgaagtgctgggattacaggcgtgagccaccgcccccagccgacttctcttgttttaagtggctcttaatcatttggtggtttgcatattccaaaaagcttctaaatatttgtgttgaaccaatgctttcattcaaaaacagaatgcttcttgggctgaatggcactatgtcatcccaacaagaagaacatcggaatctaattgtgtcatccatgttcttattttaaaacaatctacggtaacacccttccagccatgaagcgttcagtcagttgaacagatgtgatgtgttctccctgatgcattagcttcaacctctgagttcatgaaattgagtttctttctgtagcatgctgtgttcattcatcagcctgagtcattttatctgattgggtccaatctccccctccttggcccgcctccttttgctgctgaataaatcatcctgggagctgtccaggttggagaaagattttcataggaaagttccaactgcatccagcccctcatttattcaggctgagtccttagggccccaaggagaaagaagtgagaaaataaagtgatgccttccattgccaagtttgctaatatggtcattagcacagatgccttcgggcaatgcccgcagagagaggacacagctacccacacattctggcatagggtctataggacagccttcccagctgtgctccgtctgggttcccatctcaagttaagagactcattacccacccgagttccagtagggtgaggctgatgagtccaagaaattcaggaaggaagaagcaagaagcatttctttgacaggaatgtaattgcaggggttatttcattaagggctagataactgtaacacagagttgtttgaggtacttttacccttaacttccaggcccatgggataggccaactattctgggagatctttaatgttaacagattaattcatctacaagcagagttaaaaatagaatcagccgtctatctatttaaagttgagcgtttcattttggctttcttgggggatggtagaatacaacttaaaaggattgaaattaaagaagtcttttccagggagtgaacgaaattctagaaatctactggttagggattggggggaatattagaggattcttttctcttccttctggaattctgtgtgcaaggcaggtggcccgttttgggtttaacccgaagccgaaatgcgtggggagaaaaacaggaattaaaaagcaaagaattaaaccccgcgtttctgggacacggccgacagaaataaccctggagacagtgtatgtggttgggggtgggggtatcgaaattatttttccttaggacaggcaggagggaagggagcttctcttcttgctcaggagggactgagggggcggcaaggcaaggcggtcatttgggctttcatgggacgccacggggagccgcgaacgcgcccagggcctgacgtcattggccatcagctgactgtgctctgggcccgggctccactggctgcagccgcagtcttggtggaggaggtggtgaccaccaccgctcctccacctgcatccggctgcgggactgcggcggccgcgtttgccctgcagaccctgcaccccgggacgcggctcatctgtcattagcaccggcactaagctcccaccgctcagcgacttggtccgccgcaagctccgccgcaggctttgtccgctagcgctcggctgagtctgggcgggcgggaaacctgggctagggcgaggcggggcccctggacatgcctttctccacgtccgcctcctcgaccctattgtaagcggagaaacttagtgtgcgaggcaggcaggggacgtccccattttgatgtcccgtaccctccacccccttcggatcgaggtagtaaagaggctcctgtaggaaactgactgcctctatgattgcggcctcttgggggattttgcgtttagcccgaaagttggctttgccaaaagacgcacgggtaggaagggcgaaaaggaaaccctgtattccgtcgcgctgggctctccgagtccgtgcgcaaagcggcctacgagtcctggctccgcacctgcagaggacaagagccaatgcctaaaaaagaacagcggaggaaccggctggcgcggccagctggaacgctggatcgcagtgcgcccagggaaggccgggggcgcccgccggccctagccctcagtggtcctctcccacgccggcccgcgcgtgcctctgcctacaagacctggggcgtcctggccagatctggatggcaggtccctccgccacccccggcccggttccgggggcgtggcttggcgcgggggcgggtttaagtcaccgcgggtgtctgaccactctgacaggtctccaaatttctcccagtcgcctggcgcccgcggtgcgtttcagagctccagggtggcacgcggcggcgcttccctagatccagaggcgtctctgtcgacttccacgcggcctcgggcctcccttctcctccaaaccttcgcctcatccgccaagcttcggttctcagcctcagatatccgcaccggcggcttctcttcgttctcggagctcttggctttggagccctcaccactttttccttcccccgcctctcctgatcctcctagctccgagccaaatggactccaaagaacgaaataaaggggatgagaactgtgtgctgcgacccttcgaaagcacagctgaaagcgttgacctcgtcttatagctcaggctgggaccctggagcgagagtccccacaccccctccgggagggatgcttctggccagagccagcgctgcgctgtcagtccttgctcccgaactaggaaagagcctaggagggagcctcagcataccccttcctccaaattaactatttggtgaattgttagcgccgaggctaccacctctccaaccctgtcgcggggcgccccgccacctcaccgtgaccccctcctcctccttctttgcccccgcccccagctccgcccctgctccccatcccggcgcaatggagttctccgaagggcgatgattccagccacatctgctaacttcgcacccatcgctgccgccggtcaccgccggccaggccccctgcagccgcggagcagtgggcgtccaaagcccagtgcagcagccaggacccgcccgacgcgcagcagaagcacggcgcccaggcgcttaggcgtctcttggagagcaaaggctgcgccaaaacgctgagcctagaatcaaccaaggagcctgagcccaggaaggggctgcgtggctcacagcgctgcggctcctgaggacaaatagccactgccgctgcgtacccaagctgcgccggctggcgggagagcagcacgcaaggacgccgaggtccgccgcgatcttccagg

SEQ ID NO: 11885 - DNA, 6000 bp, Homo sapiens
tttgaaggttaatgtaaaaattgcaaatgtgaggcaggaaaagaaacacttttccaactgagaacaatctaagttaagccccttaatcattcccatctggagagaaggtgagcgccgtttggcttggagctcattcattccccatcatgcctgacttgagtgccttccacgatgctgtgtcagatgcctttcagtaatgtagtcaatgtgcacagtacatcacaggctgcaaagccctaccttaacgtggatcctgggaggaatgatactcagaccaagtctaaggcagggaggataagaaacattgtcccattgaacagctgaggaagcaggctagaaataagtctggcaacttttttcaggtcactaagtgcaaagtcacagagccaggacgatctaaatgctgaactctattctgccctcctctgctgagtgacatgtacaagggtgttccttagcttcttctcgttccttcccaggaaggcttctcacctgtaagggaacaagagttcctctgtcctagtgtacagtgatatgaagtctaggaaagggaaagacaaaaagaagacctggaggaagagaagagggggcagtaaatttgaggatttgctgagattgggttttcaagaataaaaaacgcatatagggtagtaatgggatccattgttcccaaacatatttccttttggcccgggttgttcctagacccagaattagagcttgtcgtgtctcctccaaacaagcaaagagtgctctttttggctacaaagatctgtctcactggctcctctgagaggtagatttatacccaggtccagagtaagcatttaggggacaaatgatttcatcagaagtagtttcatgtggaattctttgacggtgaatgaggcattcctaaatgcatggatggtgttgttggcagaatcattgaggactggagaggcaattctgtacccaggatacgtgtctattccagtaatggcatatgtccgcccccgcccatgtttggaaggtccagtgtaatcaacttgccaccaagtggctgactggtcccctagggaaggtgccccactgggggctgagcatctccattgcttgcaggtcaggcatgcttcagtcctgttggcagtagtcatgatcagaatattcacagagggtgtttctgggtaacaagatgattactgttgccttctggctgatttacatttcataatttcctaacaactactttgcatttcttgtgtaacaaataataaaagtaaatttaaaattggcctaaagcaattatttaatgtgtttagggaacagagtgagaggggcaggcaggaccaccatttgcatatgcctgtgaacctgagactgtcctactcattcaatgacagtcataataaccatcactggaatatcacctcatcatgagatgcttacaaccctggatttacagaggcagaaatgtaggctcagagaaagccctttgtctctctctttttactcattcccaggaagtgcctcacctgcaagggagagagagtttacctgaacatctcgcctatacattgagatgaagaccagctaaagagaaaagcaaaaatgaaagctaaggcatggaggaggggaagcaggtgggtgggttttcaatgttacactttgagctggggctcaaagccaggagaggaatgcctcattgttgtccttgttgatagtgtgtcgctaactctttgctttggtgccatgttcagctggaacctgaggctcttagggactttaggcctctgagaagtttccttccagtgggatataggatgtttgattttctttagctgaaacctgtgctgtggagcgctgtgattacacagttcctccaatgacactcagtgcacaccctgcttttgatgacatttccaaagcccctattagaagcctaaacactgcttgccattggattataaaaccatcaaagcaactccatttactagactcaactacctggcagtttccctatcattgggtttaattggctcagttatgaatttgttattgacttaacctcatcttttatgggaggcatgcaaatagcccctgcaccttatcttaaattgtaatacttgacagtctgaagctcccatcaaaatagaagtcttttcatgtatctgaggatccaaactgtcattctgggaatctgaacttttgattaattgcacaataataaattctcacatcttctttccacattccttgactcgtcttctttttatgtttatctagtgagcctttttattttaaatactgtcaaaatgtttttatcatgtttcttaagttgcaaggagcataaaggagcagcaagacttcctaagtatgaagactttcacaatggtaaaacgaaaccaaacaaaaatctcacccacaaacatacatggaatgcttgtgtgccaggcattgtgctgagagctttacactcttcattcgcttattcatcatttattcatgctgccaacacagattgagagcctgtgatatgacagacacacttccaggattcaaaactaggatgcttagtccctgctcttgtttagtaagataacagtaaacaagtaaacagaatgtaaatgcgatcatttttggcagtgataaatgtaatgaatgaacaaaacaggaagagactgagggagaacagcgactttggaaaaggtgctcagagataaagggcaagattgtttcctggttagttgggatgggagtaggacaggaagaatacacgtgagtttggtgtgttgggcatggcagggctaacacatgggcaggaggaggctttgcagtgcccagctcccatttggagatattctgatccaagcaattccctttccttgggctttttctcctttccagagcctgctggactggttacttactccaactcactgctgagcatttatctattcacggatgtacaggggtcctactgggcactgccacgtttccatatgctatttcctataattcctcacaaaacccatcaaccagtgaacagccttttcccctggggttcttgtcatgaactcttcccgtttaatattaagttcccatgctagagtctgtttctggacaaagaattctgttgcactgagagtttatttttgtaccgatcccacactgttttaatgatttcagtcttacagtttaacttcctctggaaactcctcccttcttgatttggagacctcttttgaggttctcccctttgatagtcattctatagggtggtggttctctgacccttcccctgccccagcccatacattcctactcccttcccttccttcttcccttccctgtctcctatgctctccttggccaacttctccaggcaaatccagagctggtgttcttgcaggtctgattcctcttttcttatacactagggatagatcctcggccttgttcacagggtctcccctcaccccatgtctctcaccccagctgacagacatgaggtgagagagtgggaaggaaaggaggccacagatgccatggggcagcaggaatggaggcttccccgatggcggtgggcatggaagaagtgcaggatgctcctgtcctttgtcagtgtcttacaagatctagcctttgcctgtggcctactctcattaagctcaagccacccttcccctccgcacccgctgttctgctgtttggagggctctctggacatttacatagttgctcccagcttgtcattagggtctcacctcgaagcatcacctccacaataaggccttccacgaccagccggtttagagtgactcccccagtcactatagcgcagcactctaatttgttaccacatactatttaccaatatcggaaattctactgttaaaatttgtcttttcattgtcttccaccggctaggacggaggtcttaggagtgcagagacctcatatcttcaggacagagatcactaccctttgccagggaagctcacgaggggttacagattggttgattgaattgaaatttggaccagagagggaatgactggcttgggtgcaagtcgggagcaaagcaggaatcaaagattctgactgcatttcttcagtcctttgcccacccagacaggtgaaggtgctattcaaagattgggggaggagagggccgcggcatccaccatgaaccacgaactagagggaagagggaagagggaagagggaagagggagtcacgagcttcgctaccacagagcaggtgcgttcgcggtgcgcccggccttgaccaacccgacaacttggcttttacctctgaagccgaggagcaggggtagggggtgagggaaattcacaaagctgcaaccacagagccaatgtttggtgggcgacaaccccccagtccctcctcccttcctcttcttcccccaactgcccgccgtcacgccccatccaggggaagccccaacgcccacgggagctccaggagccgggctctgcagccgcctggcgcactgcctggttgcaacgggggcggcggtagcccaggcgatcctgggtccccagacaatcagcggtgggggtcggcgggaagaggcggggcgccgccgcccgggcctcccgccgcgacggggcgggacaatggggccccaccccggggaaggagggagggagggacgcggcgtgctctcggcccgcggcgcgctcgctgctgctgctgctgacaggctgaggctggaacgggcggggaggggcgcgggtgggagcgcggaggagggaggaggcggcggcggcggcgcgtgtggctggcgggcgggagggcggctggcaccgggcttgtaaataaactgcgatgctgtcttgggctcgccggcctgggtgccgccgccgccgccgccgccccggagcgccggttccaggctcccgccgccgcgcgccctagcgcctccgcgccagcctcgcgcgccctcccagcttctccgcagcccccggcccgcgaccctcggggtcctgcggctgacccgcgcgggatgtgaccccctgaccccctgcctggcctcccctgccccccagggggcccgcctttgcctgcttttgggggggggtggggaggggcgcgcggatcatggcattggagttcccgggcttgcagccgccgccgccgcctcgttcacgcaccccgagcgccccttcttcccagagcagcagcggagaaggcgaagcggccggcgggggcgaggcagatggggctcaaggcgcgcagggcggcgggggcggctggcggcggcggcgacgggggcggcggaggcggcggggcggctaacccagccggaggggacgcggcggcggccggcgacgaggagcggaaagtggggctggcgcccggcgacgtggagcaagtcaccttggcgctcggggccggagccgacaaagacgggaccctgctgctggagggcggcggccgcgacgaggggcagcggaggaccccgcagggcatcgggctcctggccaagaccccgctgagccgcccagtcaagagaaacaacgccaagtaccggcgcatccaaactttgatctacgacgccctggagagaccgcggggctgggcgctgctttaccacgcgttggtgtgagtacccggccgctcggggcgccctcggcggcggcgcgcttggggacttggggtcggggctggagctgagaagtctctggggctttaagacccatggatgctttcccgctgaaggggagaccagcccgtcctcagcacgcgtttccctgggtgtgtgtgtgtgtgtgtgtgtgtgtgtgtgtgtgtgtgtgtgttgccgctctccgggtgttccacactaggggcttaaaaaacgaagcgtggttcccctgctgatttgggcggatgtgtgcgcgcgcgggtgcacatttatgacatcttctaggggtgttggtttggaagcttaaaataattatgtgggtttttccaattaatgtgagggttgaagaggataaagcgggtcctcc

SEQ ID NO: 11886 - DNA, 6000 bp, Homo sapiens
ggcagagctctgctctgacccaggtgaggcctgagacttcccatgccgggggcgtggggtcagcctgcaggagcctctggccctctccagaaggggaagggccccttgctggggcatctgccgggggcctcatctcactccacgtcacagcctcatccccgaaataccagaacccacgcagtgggtgcggaaccctccctgcctctgggcgacctcacctggcccatattccctgcgtcatgctccccgccccctccagtccagcttcaccctggtgaggtctggccaaggggctgctgggttcccatggatggggatgggcccaggcagctggacttgccctgggtggtggctgtgggtagtcagtgtccacatggctccgaggctggggttgggcctggggtgttccaagccggcctctctggaggctcttgaaccccagtctcagggacatgacccagggtgaaggggtgagggcgccccttctcccctgagtgctggcatgtgggaggggcctgcgagtgctcctggaggtctgagtatgagcgccctctggtggccaccggagagccgggtgccggggctcctgcacagggaaaatccgccttcgcccaggccagtgccgctcatggccccatctgtgcccttttccactccactctggacaggtggcctgaggcctgccaagcgcccagggcagggtgtgcgaaggcacctgggcatgggagtcgggcagagagcagaggggtaggagtgcctaggccgcaggcccacccatccccacttccgtatggggaaactaaggctgggcaagggaaagtgactcctgccacttcacggcaggctggctgcaggaatcctcatccagggcccagggaacgggagtgctctgtgtccagtgcagcctggaggcaggcgggaatgccacctcccctaccactcccacccctgaaaggcaggaaacgggggctgtggccaccaaactccaggaatgaaggaagagggagttctgctggtgggtcagggaagactgcaaagcagcagcaggtacagggacaacgaaggcagcatggatgaggctgcgtgcgggccctgggcaaaggcccaggagtgggagcgaacctgcaggatccagagagggctaggctgcccatgtggctgcaatggggcctgggagctggcaggactccagaccaagcccaaggacagtcacagctcatagcccatcactgccctctgccctgtgcctccaggggtccctagctcagtctcccagcctccaggctgcttctctgtgaccctgctggacagctcctcaactgtcctggacacaacctgaccccagccccagccccagccaagactctgtcaggcatcttcagtcccacacagggcctgcaaccttgtaggtgtggacagcgcagctggccagagggggccgacagccctgcccccatgtcctgagtgcccctgaaggaggagctccctctgccagagcccaagctcagaacttgcagggagatgcttaggcataggattgagtggtggggccccaaggcacagccactgaggtttggccagcacccaggggtggggcactgtccctgtcatggggtgcatggctgactctcctggcccatcaccggatgcaattttctctatgccttaaaaatggaaatgctaaaagcagtcaaagcacaatgtccagacagagggcagctgtcagggagactgtgcaaaagcaactgaccaggtcctctgaaaagggatcctccctccacctgctcggaacttctgctctcctcaccgtccagtcgggcctgagctcccacccggccccctctggccagctgcgctgtccccacctacaaggttgcaggccctgtgtggggctgatgacgcctgacagcatcttggctgaaaggccaggtgggagaaagaaaggagcattattcagtcagatcaggggggcccaagagcctcccttaacgcccagtctcgacagccagatcccacggagggctggaggggcagccccagccgcccactccactggccagcccccaactcagaggcagctagctttggtttgcaagaggtcctttctctggtcctgccatggacaagccggactggggagggttgttgaggtcctcctcctggaggggcattctcaaacattgctctcattgatttttctctatcttctttttctacctcacttttttttttttttttttttgcttttatttttgctattttcttcattttgcttaccttgggtttgatttgctctttttgttctggtttccgagggtgaaagtttaggtggttttttttggagaacttctttctcttccaaaagaagttttagctcttttttttctaaaagaagcattagtgcaaaatttccctccagggcccacttcagctgcatcctttgactttgatgaattgtgtttgcattttcattcagttggaaatattttctgatttcctttttggtttctcctttgacctataagttgtttagaaatatgttattactcagtttctaaatatttgatgatcttttagatatatttctgttattgatttctaatttagctccattgtagtccaagcaaataatctgcatgattttaatccgtataaatttactgagatttgttctatggcccagaatacagtctgccttggaggacattattggtaaataaaggtgtgttccccttctgtgaggtggagtgtcctacaaacatcaagttggtcatgttgactggtaatgtgatccacgtcttcatccttacagactttttgtctattttttatcagttctcgaaagaggagtgttgaaatctctgttattgtggattttctttttctcctttcagttctatcagatgttgtttgttttgctttgtgtattttgaagcttaattgttaggtgcatacatatttagaactgctgagtcctcttcatgaactgatcaatttatcatttggtaatgtccctctttttaaattttttttctttctttctagtacagatagtgttttgctgttttgccctggctggtctcaaactcctggcctcaagcaatcctcccacctcagcctcccaaagtgctgggattgcagatgagagccactacacctggccagtaatgctcctctttatttctgattatagtctttgctttaaacctactttgatattgacgtagtcatgtctgtgttcttttaattggtgttagcatagtatatctctctccatctttttacttttatcttatttgtgtttttacatgtctggtgagtttcccactgacagcatatacttggctgtttctatttttatccaatctgacaacctctgtttttaattgagatgtttttgtttgtttttgaggcagagtctcactcactctgtcgctcaggctggagtgcagtggcaccatctcagcttactgcaacctctgcctcccaggttcaagcaattctcctgcctcagcctcccaagtagctgggattacaggcacccaccgccatgcccagctaatttttgtattttttagtagagagggagtttcaccatgttggccaggctggtctggaactcctgacttcaagtgatccaccttcctcagcctttcaaagtgttgggattacaggttaggattacaggtgtgagccaccgtgctcagcctgattgaagtgtttagatgacatagtgtcattattgctgtggctgggtttaaatatatgtcatcttgctatttgttttctatttgtctcattgttttttcctttctcctcttctgcagtctctgtaacatgtgcttttataaataaataattctgtatcatcacttttgttgatttattaactacagtgctttgacttttgcttttttctttgtctttttttagtgacactttagcgtcttagcatacacctttgacttactagtctacctccaagaaatagtaggccacttcacatagagtagaataaatctacaacagtgaacttccattgtccctctcctggtctatttgtattactatttttttttaaatttatttgacacagcgtcttgctctatcacccaggcttcagtgcagtagcgtgatcacagctcactgcaacctccacctcctgggttcaagtgattctcccacctcagcctcctgggtgcaacctcaggtgtgcaccaccacacccagctaattttttggtatttttttttttttagagatgaggtctctctacgttgcccagccaagcctggtcttgaactcctgggctcaagcgatccactcgcctcagcctcccaaagtgctgggattacaggcgtgagccgcggtgcccagcctgcactactattatcatacaatttacttctacatttgctataaattccttaatacattgttattatttttgctttaggtaatcaactatcttttaacttgattcaaaaataagaaaaaaattaccttctatttcctatttctggtgtcatttattcctttgtgtagatccgtatttctgcctgaagaacttcctttaacataaaggtccccaacccctgggtcacagaccggttaggaaccacgccacacagcaggaggcgagcgctggcgggcgggcaagggaagtttcatccgtattaattcatcgtggtctgaggctgaagaccgcgacatactctggttctgacctatgcgttccttccacgccccttatcccaccagagtgtgagctccatggggtgggaatattctggaacgtctgctggttttattctttgccttctccccaactaggacctggcacaggagggtgcgcattacctctcggcaaacagaacaactaactggcctagtttgctggggaccgaaggatttcctggaaccggagcccgcttgcccagcaggcatggtgtattctgtacctcaggcccgcaaaaatgttttaaagaaaaaaatgagctttagggtagaagaaaaggttttatttttctttctcacattggaaaaaatgaaaactttcggacccatgaaattttattacattttgccaaaaacagaaccaataacataagtattcaaagttatgtaaagataattatttaatatgaacattatgatggtgagagggaccacggagcaaggggctgccttgcaggcctgccttccagctttgctacagggaccagaagcgggagctgagcgcaggggaggcaggcggaggccatgggcagcgaggcgggtgcgccaaagggcgccagttccggagctgctgggcctgggctgcaggagggcggagctggggccgcaaggctggtgccggccgacaaacgacgcggcgcgggcgagtgggcggaggcggctgcggggaaggctgggctgccgcgggacgcggtgaagatagcctgcggagtgtccgggctgaacacgtgagtctgagggtcgccagggaatcactgcgtggctgcctctgtgtcggagatccagatgcctggactggcctcggggtcccagcgcttgcccggcgagccggcggtccggggacgggtccgggccgaggcctgcggtgaactcggctcggcgggtgcccaggaggcgggtccggggcggggcctgcggtgaactcggctcggcgggtgcccaggaggcgggtccggggcggggcctgcggtgaactcggctcggcgggtgcccaggaggcgggtccggggcggggcctgcggtgaactcggctcggcgggtgcccaggaggcggggcaggggcggggcctgcagtgagcgcggcttggtgagtagcccaggaggcgggtccggggcggggcctgcggtgagctcggctcggggggttgctcaggaggtggggccggggcaggcctggggcggggcctgcggtgagctcgcgctgggcgggctgttccgggggcgggactgggctgggcctgcggtgagcatcaggcgatgcgg

SEQ ID NO: 11887 - DNA, 6000 bp, Homo sapiens
atgctcacttcttccggggctcatgtccttagtcagggctagaggggggcagtgcagcccacgtgctggggaccttgctcccctggccggccctgcccgccagctctggacgagcgcagcagagcgccaggcgtggtggggccagtggtgtgggcacccacccgggaccgcccctggggaggcctccatctgctctgagggcccaccttaaaactaatcggccaggtaactgcggagggcagccggccagggcgggtagctgccagcaccaggcccgtctgcgcccacgccacctgcacgcacggggtgtgcccacggcctccagccccgtcagtctccaggctgcctggctcttgggttggggtcaggcccctgaggagagaggggtcctaactcatggccccatcagaccctggagggaggatggttggatggggtgggggtggggggacccaagcgagcaagggaagggcaagcagggccttgtgcctggctgtcagcaaggggcagaggccacgcagccagggcggaggaggcaggggccatggctatggccttggctgtggtgggcagaggagtgtgggaaggaggtgtccctcccttcccccagaggcaggctcaggaggaggccaggtcccatctcggggatcctgaggggaagatgtggacccttctctgggagcctctgttcagaggggtcatccctgtgtgtggctcccatggggcaacacacgccttgttctctctgggaagcatctgaatgggagcccgggctgggggtctggtcagggagagagctcttggcctgcctgggggtggggccccacactgaaaaggagacatggccctgtcttgggggaaccatgacctgagggacaggcctggtctcgtgtctggggagcctgctgagtgagggggatgtgattccacctttgggggggtcttgctctgagtggggagcctgaggtctgtcagggggcccagtgtgaggagaacacagtctcgttttcagggaatgcctggtttgaaggaagatatctcaccttgggaagtcccttgatgtggagagatgcttccaggcccctctccacgggatggggaggttcggcctgcattaggccagctgatgtctaaagagggaaactggtctctggccacaaggccttttgtggagaggggcagggcctggctccagctgtctgctttgcctgccctggcccacaggctccctgtggcccactgcgtgtggctctggaagtcccctgtctggcatgcctcctgtgaggtgacaggggcgagaacccgtccctgagggtgtggggaggtccctcagcgcaatagccaagctcacagccaaggccctggaccggccaggcctgtcaccagctctaaggagcctgggggcttctcgtagggtctctgctacctcatggtgcccccgggggccaggccagtggtctcgcctgggcccgctctctcggctgggggcacaggctccaggcagctcctttgtgaggagttgcagggcactgggaaggcacagcatgagcccccacctgagttggcccagcatgagcagctgctcctcgttctctcttcagggagcccccatctggctcctgagctcctcccctggggtctcttctgggcagtggctgccctgtcttctgacctcctctcttctggccaccaaaccagtgggtccctccagcttggatggttcctccttccctcttctgtcgtggtccttggctgggacagtgggaggatctcccagcccagcctgggatacccagcccccagactggaggggtggtctgggtgggagggcgcacagccctgcctcctgaccatctgtcggctttgctgccgcagtctgcctgggaccttggcgggctggggtgcgtcctgtcctgccgctgggcctggccttccttctttgggtggcggggtcctgcgacccccacactatgactgcagggatggagcccgcacctccctgtcatgtggggagccctccccacagcagggctgggtgggtgggccaggaggggagtgggctgcccagcttcctgccgcccctgacgagccagcggttctctcccctctgtcctgctgcagatggcggctcagcggcagcgggcgctggccatcatgtgccgcgtctacgtgggctctatctactatgagctgggggaggacaccatccgccaggcctttgccccctttggccccatcaagagcatcgacatgtcctgggactccgtcaccatgaagcacaaggtcagcaggcttggtccgccccggccacttcgggctcgcccccacccctgggctcgcgcagcctgacaggtgtgtccctgtgtctagggctttgccttcgtggagtatgaggtccccgaagctgcacagctggccttggagcagatgaactcggtgatgctggggggcaggaacatcaaggtgaggcagggagccaaggcctcgatcccgcaggcgtgcagggctgcccctccacggaagccttttgtggccgggcctgggttgaccggtctttccatctcaccgcctcttccccaggtgggcagacccagcaacatagggcaggcccagcccatcatagaccagttggctgaggaggcacgggccttcaaccgcatctacgtggcctctgtgcaccaggacctctcagacgatgacatcaagagcgtgtttgaggcctttggcaagatcaagtcctgcacactggcccgggaccccacaactggcaagcacaagggctacggcttcattggtgagctggggtggctgaggcgggatgggggccacctgaggctggggctggccctgctcactgctgctcctgcccacagagtacgagaaggcccagtcgtcccaagatgctgtgtcttccatgaacctctttgacctgggtggccagtacttgcgggtgggcaaggctgtcacaccgcccatgcccctactcacaccagccacgcctggaggcctcccacctgccgctgctgtggcagctgctgcagccactgccaagatcacagctcaggtgagggcccacacagctgtcggcttgagggtgggcgggctggcccctgattccttggagactgattcaaggtggtcttgagtagccagaccagggactgagcacggtgaccttttgggttgcaggaagcagtggccggagcagcggtgctgggtaccctgggcacacctggactggtgtccccagcactgaccctggcccagcccctgggcactttgccccaggctgtcatggctgcccaggcacctggagtcatcacaggtgagtcttaagtggtaccagatcctctcctctcctgtcctggcatctctcggctcgctgccctcagctgcctggccctggtggtctgggcacaaccctctgagcccagggcaggccagctctgtgcctttctgggaaggggggtggtagggagtgactgatggacctggttggttttcctgcaggtgtgaccccagcccgtcctcctatcccggtcaccatcccctcggtgggagtggtgaaccccatcctggccagccctccaacgctgggtctcctggagcccaagaaggagaaggaagaagaggagctgtttcccgagtcagagcggccagagatgctgagcgagcaggagcacatgagcatctcgggcagtagcgcccgacacatggtgatgcagaagctgctccgcaagcaggaggtaggcagaggggcagggtggtggcgggggagagggtaggggggcggggccgcagtgctcagctgtcttcccctcggccctgccccacagtctacagtgatggttctgcgcaacatggtggaccccaaggacatcgatgatgacctggaaggggaggtgacagaggagtgtggcaagttcggggccgtgaaccgcgtcatcatctaccaagagaaacaaggcgaggaggaggatgcagaaatcattgtcaagatctttgtggagttttccatagcctctgagactcataaggccatccaggccctcaatggccgctggtttgctggccgcaaggtggtggctgaagtgtacgaccaggagcgttttgataacagtgacctctctgcgtgacagtggtccctctccccggacttgcacttgttccttgtttcctctgggttttatagtgatacagtggtgtccccggggccaggcgcgctctgcccagcccagcctacagtgcggataaaggtgcggatgctgctggccctgaacgtccgtgtgtctgccgtcggtcctgtcaccgatcctgggcgtgtgtccttagggggtctagggcgaggaggcagggttgggggggtctctggacctgcttcctgttggcaggaggggcctgccgtgggcgagacctgggcagggggttggcgccccgggccccgtcccgcgggtggcggcggctgggtgggcggggctgcctggggcgccaggctctcgcgcgcgggctcgcagccgtccccgcagggtggtgctgagagaaggctgggcaccgggacaccgcgacccgctggacagcgcgcgctgccagtgcttttgtgccgcagagccggccgtccaaggcgggcgggcgggcatggtcgcttcccgggaggaggctgtgcgttaagattcgtggccaaatgccgcggggccaggggccgggctgaagaccggagggcggagggcgccgcctctcgtggattgtagctcccaatatcccgcgcgcggggcgggcccggcttcccggcacgctttgcgcggtgccgctacgggtcctcagaggcggcggcgcgcggggccttctgggggccgcagtccgggcgtgctaggcggcgagggccggactcggcttcccgacgggctgcgcggcggccgggtgggtgtcggcggggcagtccggcgggcagcggcggttccggtgcggcacagcgggcggacgagcgggcgggacgagctgagcaggaccaagcgggatgcggagccgccgccgccgccgctccccgcgcttcctaagagtctgagacccgccgggccgcgccccctgcccaggcccgcagtccgagcgttccgagcgcgggccgggcccagcgccggccgcggccgcgtccccgtccagtctcgggcggcccgccccctgcctgcgccccctccccatgcgcggcgcccatgcggactgagccccgccccccggccccgagcccgccgagcgccgccgccggagcccgcgccgcccacccgcaccatgctcaagtgcatcccgctgtggcgctgcaaccggcacgtggagtcggtggacaagcggcactgttcgctgcaggccgtgccggaggagatctaccgctacagccgcagcctggaggagctgctgctcgacgccaaccagctgcgcgagctgcccaaggtgagcggccgcccgcacctgccgcccaaaggcgcgcccccagcccgtgattcctccggcggcagaatctgcccgggcgagtcaccgcagcctccagccggccctgctggtttgcactggccaggtccccaccccagccagccccacccttctcttccagccgccctggctggcgcaggtggcagcggtcatcaggtgcttgcctggggatagcgattgtcaccgagcctggaggcggagcctcagagtgaaacccgtggggattcagggaggtggatggggttagggtggaacttggattcaggtggctgatgagtactagcttcttgggccgctctggaggtgggtccagacctcctctccttttttgctgggtgcaggggtgagtgggggagccctcttgatgtactctttgctctcggatctgttcgctgtccccctttctttacccttgcttctcgtggtcaggtgctctcctaaggctgctacaagaaaggaggctggagaaagcagattaaaaagtatttcttttctggagatggggtgctgggtgatcag

SEQ ID NO: 11888 - DNA, 6000 bp, Homo sapiens
gggtggggtcacatgaatggagggaatggaggaggcctgtagcccagcactgaggcctactggggaggcagctcaggaaggccacagagtcaggcccaggccaagacctttgcccagaagctaaagtaggcccttgagcctattttagcatgggtggcctccagccagcccattggtcctggggtggtgtgggagggaaagggccagtttgggtccgcagcatcttcaggctgtgtgtagagcagccccctcatggtcctgggacccagaaatcatctgcacccccagcaggctctgcacccccggcaggatctgcacccccggcaggctcccctaagggcccccagaaggataccactgcgggtgggcccagccagaggagcaccatgagatccgcttggtggggtgaggccggcaggggaagcaccctgaccccaggacactgggctcaatgcccgccctgccccgtcccaccctgtgtatggcgggacagagtccttgggcctcaggcacccagctccccaccccagccccacccacaatgctcagggtcaggctggctggaccgggcgggaggtggcatctggactcccccttcagaaggcaaagctgccctgagatctgccttccccttcccccagacttcctgccatcaccaccacggtagagataaggcctctaggctcaaaggccagagagggagcccacagagagggcagggctgggagccacagcctccctgcccccggggctagagctggggtcttgccccaatcttatcctgacccaagctcggccaggtggctgccagggcccagctccgtcttcctgtttgtctgtgttggagcttcctggggctgtctccggcctaagggagcatgatgcagcaggcaccttttcagtttctttgactccatcgcagtccccaacagggaccacagcccaggacccaggaggagggaggtccatgtccccacccccaacaggggccaccgagggtgtctgggcagcctctgttgggaggggcagaggcagggacctgggagctctcaggctctgggggcatctgtgcacctctgccctgtgtcccccagcttggaggcagcccccagatggacagccagaaggggacaccccagccctgccccacagcttggggggcagcaggcagaggacagaagcccacccaggctggcctggcgtggtgagccacgccggtaatcccagcactttgggaggccaaggcgggcgaatcacctgaggttgggagttcaagaccagcctgaccaacatggagaaacactgtctctactaaaaatacaaaagtaaccgggcgtggtggcgctgcctgtaatcccagctactcgggaggctgaggcaggagaagcacttgaacccgggaggcggaggttgccgtgagccaagatcacgccattgcactccagcctgggcagcaagagcaaaactccaactcgaaaaaaaaaagaccaccgaggctgcctgtccaggggaaggggcccagccctcgacccccacaggcagtggctccaggctgttggggaggatctgccactggaatggttaacccaggcatctccagcagccaatcacagagctctgcaggaatacctgggagaggtcctcatgcagcccgggcgggtcctagcccagccccagtctggccctggacaaccccagcaaagccgccctcagccagcccagaagcactgggccttggccacagcaacacccactgagcacgctgggagctgagtatggcgtccctggtctcgctggagctggggctgcttctggctgtgctggtggtgacggcgacggcgtccccgcctgctggtctgctgagcctgctcacctctggccagggcgctctggatcaagaggctctgggcggcctgttaaatacgctggcggaccgtgtgcactgcgccaacgggccgtgtggaaaggtaacagccccacccgacgggtcccccagccctggcctcttcccgccagctccgccctgccagccggcagcaaagggccctgggcaaactccaggaggcggaggaggctagtggcagtacctgggcaccctgaccctccccacaggccagagcccaccctcctgctcatgagggcagacaggcctttccagggacacagtccctcttctccccaggaccccagggccaactccccctgccggccctctgccatcaaattggcagtggctccaggggagtcccctggggatgggggaccactgttggggacccctctgcgtgcacccctgtagttggggaagcaggacaggggcctggggagacggaagggcgccaggggttgagagaggatggtggacgttgttggacttgaaagggaaacaggccctcggggaagcccctggccaggcctgcctctcccctccctggtgggcccagcgcccctgctcacttgtctctgcccacagtgcctgtctgtggaggacgccctgggcctgggcgagcctgaggggtcagggctgcccccgggcccggtcctggaggccaggtacgtcgcccgcctcagtgccgccgccgtcctgtacctcagcaaccccgagggcacctgtgaggacgctcgggctggcctctgggcctctcatgcagaccacctcctggccctgctcgagagccccaaggccctgaccccgggcctgagctggctgctgcagaggatgcaggcccgggctgccggccagacccccaagacggtgagggagagtccaggcagaccaggggagtgggtgaggagggtcccacggcccatgggacccggcctggctgcaaagccttcggggagcctgggggcctggggagacgcccaggagtcggcctgcggctggggattcacaacgtggggctcactactgggcagttgggagcctgtaggagccccgggagggacctcatgagggaggaacccagaggcctgagtgggagcctgaagcagctgggcccggcagggagggctgtggctccagggaggggcggggctggtgggggcagatcctgtagttggggtgggagatgcatccaggggcagcggggtggatggcagaaggtcacaccaaaggctgaggcggaggccccctcttccccaggcctgcgtagatatccctcagctgctggaggaggcggtgggggcgggggctccgggcagtgctggcggcgtcctggctgccctgctggaccatgtcaggagcgggtcttgcttccacgccttgccgagccctcagtacttcgtggactttgtgttccagcagcacagcagcgaggtccctatgacgctggccggtgaggcctgggctgggctgtggaggggggcacccccgagtccccagcctccacgtccctggggggcagggccggagcccacacagactcgcggtgccaactcttctccctgccagagctgtcagccttgatgcagcgcctgggggtgggcagggaggcccacagtgaccacagtcatcggcacaggggagccagcagctgggaccctgtgcccctcatcagctccagcaacagctccagtgtgtgggacacggtgagctgcgccctggggtaagatggggcctcaccggggtctgcttgggcccctgagcctgtcctgccaccccccaggtatgcctgagtgccagggacgtgatggctgcatatggactgtcggaacaggctggggtgaccccggaggcctgggcccaactgagccctgccctgctccaacagcagctgagtggagcctgcacctcccagtccaggccccccgtccaggaccagctcagccagtcagagagtgagtgcccacgccgacattgtgctggcagcacagaggtggagcccgtgtaggaaggaaggagtggctgcccaggatgagggatggagagagtgagcaggggctggaagtagaaacaacagacacaggggaaggtggcgtcgccaggagagtggggctttgaggcaggagggtcagcctgagtgagggcctggcccacactgacggcctgcagctctggtgagcagcgcccgggaagcaggggctgagtctggaagaaaagctctcacagccgcctcacccgcccccagggtatctgtacggctccctggccacgctgctcatctgcctctgcgcggtctttggcctcctgctgctgacctgcactggctgcaggggggtcacccactacatcctgcagaccttcctgagcctggcagtgggtgcactcactggggacgctgtcctgcatctgacgcccaaggtctgcccccacaaacccgcgaccctggccctccgttccccaccatggactcccaggccatgccctcccagggaccttacccaccccacctcctgacccctctccctgggtcttggtgggaggcaccctgggacctcccccccagcccagcgcccctactccccaggtgctggggctgcatacacacagcgaagagggcctcagcccacagcccacctggcgcctcctggctatgctggccgggctctacgccttcttcctgtttgagaacctcttcaatctcctgctgcccagggacccggaggtcaggcttcttgggaaggtacccggcgggtgggtgtgctgggggcctggtggacactgagcacctaccctcacaggacctggaggacgggccctgcggccacagcagccatagccacgggggccacagccacggtgtgtccctgcagctggcacccagcgagctccggcagcccaagcccccccacgagggctcccgcgcagacctggtgagtgggcgccagatgccccatcccgcgcggagcccctcccaccgaccccttcccacgcccacactcccagccccaccccaggcctgcggctccgcctcccgcggtgatctggggccccgccccgccccaccgcgttcctcctccacttccgggcgggacttactcaaggctcctcccaggtggcggaggagagcccggagctgctgaaccctgagcccaggagactgagcccaggtgagcccagggggcgaccccggaagggctgggggatctggggtttgtgtggagcgcgggtggggcccaaggcttggcggtaggcgacaggccacgcgaacccacgggcctctgcgcccgcagagttgaggctactgccctatatgatcactctgggcgacgccgtgcacaacttcgccgacgggctggccgtgggcgccgccttcgcgtcctcctggaagaccgggctggccacctcgctggccgtgttctgccacgagttgccacacgagctgggtgagcgcaggcggggcctggaaggagatgggcggggccgcacggggctgggcggggagacctggaacaggtgggcggggcctggaagatgggcggggccgcacctggctgggtggggagaccggaaacaggtggggcggggcctggaaggtgatgggcgggatctgacggctgggcggggagaccgggaacaggtgggcggggcctggtggtaagagggcgggaccgaaaggaggtgggcggggcatgtagctaggagggcggagctgttaatgtggactcgcccgcaggggacttcgccgccttgctgcacgcggggctgtccgtgcgccaagcactgctgctgaacctggcctccgcgctcacggccttcgctggtctctacgtggcactcgcggttggagtcagcgaggagagcgaggcctggatcctggcagtggccaccggcctgttcctctacgtagcactctgcgacatggtcaggatggcgaggggaggggctgctctgggccgggagctgagcagaggagctgagcaggggcgctgacccggtgcccacttgctcctcagctcccggcgatgttgaaagtacgggacccgcggccctggctcctcttcctgctgcacaacgtgggcctgctgggcggctggaccgtcctgctgctgctgtcc

SEQ ID NO: 11889 - DNA, 6000 bp, Homo sapiens
ttttgcagcaagtagacctgtgacctgtacgaatagttggaagactttctctattacccaagtgtatcagtatactttagtgcctactagaaatttatgggtagaaaaacaataatatcttagagtattttttcctagattccctaaggtgctatagggtgatttttactcatgtaacatgaactatccttcaactaagatagtttttgcaaatgtggatatataagtactttattaaacctataggaagtatttataccacttatttcctcccttcagtgttagaacctcctaaatggcatttgacattgaactgctttccactttgtcgcatgctcctctcattgtccctacctgggtcctgaaccttagggacttggctgttatagccccaccatggctacgctgggccttggtcgtctctgagacttagtttcttcatcttacaaggagataataacagcccctgcctgcgtagaattgcagagatcaaatgaaataattaacatactcaaaagcatgccgtaaacacattctgagcacatgtacgttttaggaaaaacaaaaggacccatgcacatttcggagtgcttttgtctcagcagcactgcctcttcttccaaagctgacgtcttagtagaggccctgccacgtcctgagcactgtactccacgaagcattctatttctgacattcgaaatgcagtctgttccatcttccttacaatctgtatgccagcacttgaaataccgggtatctgcagtgttgaccaggtgattacttaattatggaaatgttgaggtggagatctagataattcagtgaaggcaggaaaattggtgtcggaatctgtctttttatgtgtcagaaatagaaataagatagggtgagaagtaatttgtggctaaaacactataatagctaacacatagtgcatactgtgtgccaagcactcctgtaggtgcttgaaatcttctattattattatccctactttatagacttgcacccttaggcacagagaggcggacagttgtccaaggttaccccagaggtggagatccaggctacctgactccaccatgtgtgctcttccctagggcacagttgtgctgctaaaaatactttttaagcagttctttgattattcagatgatagtactgtaggaaaattaagacaaaaataatgaaaaattaaaatctttattttagtgttttgcacatgtattattaaagccagtttactcctggaagtgtgtaagaatacagggtatttttgatcacctaaatgctgcatgttactaagagctcgacactgaagtcaagaagagcagttgcagagagtacttagcaaaaacgggaagtgtgtggggttgaaggagcaaagacaagtcttcctcggacggtggagtgtagaattcatcatttctcagaacacgtctttgaacgcattttcaatttgaggccaaaggtctcagcctcccactcggcatacctccctaccttagtcagctcttaaatcttaggaatatttctttgttcttcaaggaacttaaatatgttaacattcttacctgtccacagggagccccctacaaagaagggagtttctagtctccgttctttcttggaataaataatagcctcataccttgtgcaatcgaggctgaaaaagactgtctccttttttcaaataagcaagtcttagaaactacagttgtttacagggctcatggctattccacagtaataattttggttcttttaccaattatataatatgttaaaatatggcaagtatcaggaaagcaaggagtggcaatgattagaaaccaatggccaagttagagaggaggggcaattgctcccccaagtttgttgtggctgtgtagcagtcagtgacgagaagctgtgtgtcaggcgacaagcaaagttgaggattatcaggcgcctgtgagtgcccagctgtgtgccaggtcaggaggtgccatcgtgagccagaccagcttcctctcggcccctgtggagctcgcagtctggtggggaggcagcagtcaccatggtgacaggtgacacactaggatggggctggtggtggtaggcatttgcgggtcccttcagagaggtgagtatggacttagaggaggctccagcttcctattcctgggctgtctatagcactaaaagttgtcacatgaaaaataacatttggtactattgatttaacttaatgacttatgtaattgtagttgacttagaaattataacatgctcttctacttcagcttgaaacccccaaccaccagtttataatcctttttttttaacttttgtttatttttcctaaggaatctgtactttttcttcattttacaactttttttgtcctgttaccttattttcatttttactttatatgaccatgagttctaaaatagtaaaaaaaaagaattatttttgttctttgttagaatttctctgcaaagaatgtccaaaaattcatattcacattgatcgtatcgacaaaaaagatgtcccagaagaacaagaacatatgagaagatggctgcatgaacgtttcgaaatcaaagataagtgagtaacaacagttccagcacttccggaacttcggttcaactagatttcagtatagtcaacaatttgaaaccaatgtaaatggttatattgtctcaagaatacattttataaattcaaatcaaattttatgcatgtctgatcgtgttttaaactttacttgtacaaatcagtctaaaagaacttgttacagtgggcccatctacttgcattgatagtatttcttggacaatactacgtgataacatagcaaattaaattaaaaacaacaacaaacacacaaaaaaactttccagtgtcagatgcccggacctacctgtcaggtcacataaagtggtgttactgtgtgaggtctggctgttgggccagtgtgcgcagaaaagcaagggaggggtagaggactatgcggacgtgcaggtggacatgatgctgttatatttgttggaaatagaagggggcagttgacagcgttatatccaaagtgtcttctgtggttaattatattcagaaattttagccaattgttttattctctaaatatgtactttctgctcaagaaactatcattgttcttcttttccttgttttacagtacagtgtttttaattaaccctcctgggttaactttaccaggtgaaaatgattaaaagtgtaataggttaacaatgaaactttaagcttctatttttcattgactcttaactgtacatgatgtaatgtattcagcgagccattcaggaccactttggcccatggaagaaatttaaaagtaagatctacatgtattgacatgaaaatatgttctcagaaaaaagactaatgtatttaatgtcctacttattttataagtatttagaatacctctggacattttaaaacaatgattattgctagggtgtgtgatttataaagcaatagaagcgctttccctttctgtttgtgttttagattattatatcgggtatgttctgctatcataactttacaaatcttatgtaatatgggaaaatgagttaactatgctgttttccttcttttacctgcctttctaattctgtgggaataaaggcgtttttgagacagcccaggtgcagtgagcagtccatatccatggattccacattcatggattccaccaagcacagaccaaaaatactcagaaaaaaagggggctggctgtggtggctcatgcatgtaatcccagcactttgggaggctaaggcaggcaaattgcttgagcccagaagttcaagacagcctgggcaacatggcaaaaccctgtctctacagaaaatacaaaaattagccaggcgtgcacctgtagtcccagctactcaggaggccgaggtgcgaggatcacctgagcctggaaggttgagactgcagtgagctatcattgtgccaactccagcctggtaacagagtgccttttttcaaaaaaaaaaaaaaaaaaggatttgggaggatatgcatatgttatattcaaatacatgccattttattcatatatcagggacttgagcatcctttgatcttggtctctgccgggtatcctgggaccagccccctgtcgatacagagggaccgctgtctaagaaccgctggtcctatctttgacttctggcggaataggagctccatgtaaaaaggaggagaagctgcagcgggttattagccatttgtgagtcaggtcactgtaaaactttatcaaaagtttaaaagacaaaaagcatcctcataaaatgccttaaaaccacctgttgaaatattacatatacaattcatgtatactaatcatagagcatattaaagatattttagaagactagaaacttctattaaaccaagtttctggatgtttccgtattcatccttattttccagggacctgcataacttttccagcgtgtaatagctacctgattgatattttttgaattgaaatactgaagtgactaaaatctaaactttttccattctggccataggatgcttatagaattttatgagtcaccagatccagaaagaagaaaaagatttcctgggaaaagtgttaattccaaattaagtatcaagaagactttaccatcaatgttgatcttaagtggtttgactgcaggcatgcttatgaccgatgctggaaggaagctgtatgtgaacacctggatatatggaaccctacttggctgcctgtgggttactattaaagcatagacaagtagctgtctccagacagtgggatgtgctacattgtctatttttggcggctgcacatgacatcaaattgtttcctgaatttattaaggagtgtaaataaagccttgttgattgaagattggataatagaatttgtgacgaaagctgatatgcaatggtcttgggcaaacatacctggttgtacaactttagcatcggggctgctggaagggtaaaagctaaatggagtttctcctgctctgtccatttcctatgaactaatgacaacttgagaaggctgggaggattgtgtattttgcaagtcagatggctgcatttttgagcattaatttgcagcgtatttcactttttctgttattttcaatttattacaacttgacagctccaagctcttattactaaagtatttagtatcttgcagctagttaatatttcatcttttgcttatttctacaagtcagtgaaataaattgtatttaggaagtgtcaggatgttcaaaggaaagggtaaaaagtgttcatggggaaaaagctctgtttagcacatgattttattgtattgcgttattagctgattttactcattttatatttgcaaaataaatttctaatatttattgaaattgcttaatttgcacaccctgtacacacagaaaatggtataaaatatgagaacgaagtttaaaattgtgactctgattcattatagcagaactttaaatttcccagctttttgaagatttaagctacactattagtacttccctttgtctgtgccataagtgcttgaaaacgttaaggttttctgttttgttttgtttttttaatatcaaaagagtcggtgtgaaccttggttggaccccaagttcacaagatttttaaggtgatgagagcctgcagacattctgcctagatttactagcgtgtgccttttgcctgcttctctttgatttcacagaatattcattcagaagtcgcgtttctgtagtgtggtggattcccactgggctctggtccttcccttggatcccgtcagtggtgctgctcagcggcttgcacgcagacttgctaggaagaaatgcagagccagcctgtgctgcccactttcagagttgaactctttaagcccttgtgagtgggcttcaccagctactgcagaggcattttgcatttgtctgtgtcaagaag

SEQ ID NO: 11890 - DNA, 6000 bp, Homo sapiens
gaaataagccagtcacaagataacaaatattgtatgaatccatttacataagctatctagagtagtcaaattcagagtgacaggaaatagaggggtgattgctaggggcttgggggatagcaaggatggagaattgatgaatggggatagaattccagtcgtgcaaaatggaaagagttctgccagttggttgcacaacaaggtgaatgaacctaagactactgacctttacctaggtgacctgtacatgtaacatgtttaagatggtaaactttatgtggatgttactataattttttaaaaagcgatgtatgctacattcttctattgtgttactatgcaggaactttacaaaaattctttcatttatttaatagatttgtactgagtaccactaagagctaggcactattccagcagctgagatatagccacaagcaacatctctagtctttgaaacttacaatgcggtgtaggaaacaatatagataagtcagtacacacatattagaaaacacgtggcagtgataaattctataaacagaacaaattagagggaagtgatactgagctaacaagagggctatttcacactcgatgtgaaaagttattgatttattttctacaatattaggcactcacagttggtaaaacagctgttggactactggccaaaaagaaaaactaatacaatattgaaggggctttgttcaattcaggctgttttaatgctatttaaaaataaagatcatagtttaagttttttcatagtctaatttttattctataactcactgaagtagatttaccataggatgattatcagtggagttcatttctcactcctattcagaattctcatagtataacattgtgaacaaaattgtcttatcgcttagcaaacacaggaaagggtgttcagagttccaggaagaaaaagagaaaatagcctttggagaaagtaaaataaagacctggcagagggaatctgaggacatcttattatggcaaagtgatctagtgcaggggtccccaacccctgggccaccaaccagtaccagtctgtggcctgtcaggaactgggccacacagtaggagatgagccatgggcgagcaagcattactgcctgagctccacctcctgtcagatcagtggtggctttagattctcatgggagtgtgaaccccattgtaacccgcacatgcgagggatctaggttgcctgatcatccaagatggaacagtttcatcccgaaaccatctttacccccacaaccccatggaaaaattaccttccatgaaacctgtccctggtgccaaagagtttgaggactgatgatctagtggaccctctgtcctagccaaagttggtaatgtgactttccaagatgaagctgttgcaggttgcacctttgtgcgaggtggtagcagaggcctagagtgcaggcaaacaggggactcagcatcagtcccttcagaattcactgctgggggctcactattcatttcaaaagctgcagcatagtgaacagattcttgcattactaccgggcccttcttcagaaaagaaatctgtggtagaacctgggtatccacttacacagccaggtcctaatgtcagcaatcattcattcattcctaccacagagtgactcatgctttatttctccctcagacttcagatgaactcagaaggccagggaacagaggtcagctctatccccagatgctatgcttaacacagtcacttctttctctattgtcgcagaaagtgagccccacaggcctacgcttatttgtcgtaaatatctggagctatcccatactcgtatgggatagattgttttctatgctaaggaaaaagaaacattcaaacaaatcaacctgcttactgagatgtatgtcacaatctgttttggccagacggtcatttgttggaaaattcagtaggtactatgtggaagaactcagggcagaaagacataatattgatttgttgagtggctgcggtggcccaggcaccaagatgtgtttggaggacagaacagaacaagatctatgtggtccctgccctcagagaactcccagaccagctagaaaacaaaatgattcaaggactaaggaactgtggtaagtggtgtgacagaaggggtgtcacggaagtatatgaaaggaaaaattaattaacttcatctaggggatgaggaaaccctcccagagaaaatggcacttaagcaaagatctaaggatgcactggagtggggaagtgataggcagggcactaggaaaagagaagggcatttgcaaaggtctggaagcaaaagggcacacaatgttcggggaaaatgtggggggaaatccagtttctttgggttataatgtgaggagatgaggcggcagggagggagagacagggctggaatgcagggctgggtgggactgggaatggtcttgtaaagggttgatgcaggccagctgtgaggttcgtgtggctaataaaaagggagccacaaagcccggtgtaggagaccagttagcagcttaaggagaaagatgggagaatggcctgtactgggaagaggcagtagagaagaaagagacatggaaggacgaaagacagatttaggaggtagaacccccaggatgcccttcctccccacaggtaaataacacctgggcttcactcattccacagagatctaagcaaaaacgaaactatgttggaagaggattcaaatcacatgaagcatttatgaagtggcagtgtcacacatgataccttctgacatgtatgagagggatggcagactgattcctgctttagatagttaatcaccacacagttaatgaaacaagacaaattttaaatgatgcataggccaggcacagtggctcacacctgtaatctcagcactttgggaagccaaggttggcagatgagttgaggtcaggagttcgagaccagcctgagcaacaaggtaaaatcccgtctctactaaaaatacaaaaattatctgggcatggtggtgggtgcctataatcccagctactaggtaggctgaggcaggagaactgcttgcttgaacccaggaaccagaggttgcagtgggccgagattttgccgtcacactctaggctgggcagcagagcaagactccatctcaaaaaaaatttttttaattaaaaaaaattaaaagtgatgtatatatcactattacataaatgatgcaacagcattattcacaatagccaaaaggtaaaagcaatctaagtgtctatggatggaagactggataaacaaaatgtggtatttatgcacaatagaatatcattcaaccttcaaaaggaaggacattctgacacatgctacaatatggatgaacctggaggacattaagctcagtgaaataagccagtcacgaaaggacaaatacggtccgattccagttctatgaggtacctaaagtagttaaatttatagagagaaaaaagtagaatggtgatcaccagggcctgtgagggagggaggaaaggagagttagtgtttagtgggtacagtgtcagtttgggaagaggaaaaaatcccaggagtggatggtggtgagggtatcacaacaatgtgaatgtatgtcataccaatgagctgtacacttaaagatggttacaacggtcaactgtatgttacatatatgttaccacaggttttttttttaatttaaaaatattcttttaaaaaaagcagtcactgtcattcctagtgttgtccactctggaatattcaaaattatttcaaaccaatgctaaattaacttgaattttaaaaatagttttaattttaaacaattataaaggcaatacgttttcattgtaaaaatctagaaaatacaaaaaagtgttattaaaggataatttttagaaaaaatgtaaacatcgtgactttcacacaaatataaaatgaatatgtgtgaaagaggttatttaactcattattgaataaggaaaccagtatgatgttaaaaccaaagaagctggccacttgcctgcagtcctagctactccagaggctgaggcgggagactcacctgagcccaggagtttgcaaccagcctgggcaacacagcgaaactccccaaccctgtttaaaataaataaataaataaataaataaataaataaataaaagaaaaaggaaaaaaaaaaagcaaagaacaaaaggacacacatatacagacaaacaggaatgctaaaatgaatttacaaatcaatgccatactggtcagtatccattggacaataatcattccactgggacgaactcattagccttgatgttggcaaaagtcatttgcaatactacaggctttctataatttatagagttgtaaaataacctacagacgagaaaggccacagtacactgtaaaattaaataaacctgcaaaaaacgctaagcaggacatccgggaacactggtccctctttctagtccccttgaaagtctcacaaggctgaaaaaggaaagtaaaatccttgtgtaacccttctgcccagaagtacactggcacagattctttagagacgaatttaatccagagtgtggagcctttattaaggaaataatccggtgcaacgttctgggacacgctcctggactgggtgggcttctgcacactcacccagcgcacctccaatccccgggagcgctcggcaccgcccacttctctgcgagtggctgcaagttgcagagcaaaccagggggcgatctggaaccctctgggagtaaagggctaagctataagcgcagggtcgacgggcagggaccggaaacaaattctaggaaccgagatccgctgagcagcagggaagctgcgcagccaccgcgtcccgccagcgccgcctctttccctccccgcccaccgcccgcctggcccggcggggcggcgcgaggacccaggggcggggcgacctttgctccggccgtgagcagtccaggccaggcgtggcccagccgcccggctgcaaggtggggtgtccccgccgctcggatccccatctcacctgccgcgggcgaggtggccccgccgcttcctgcgctcacctcgggtccctccctcccgggccaggtttggccgcggcagccgcccctgggcgcccgcgcccggacccgcggtttcggtcagacccgcccgcgggctggtttcgattagggccagtaggagggcggagcggccgggacgccaggagggaactagcctaagtggggacggtccccgtgcaggagacaaagagcgtccctggagcgatcagggctcaggagcccgacccggagcccggggcgtccgcgctgacttcgggtccccggagcctggggcacggcagggagaagacgacggcggagaaggcgacagcggagaaggaaggcaggctgcaggggcgccgtcggcgcggcgggccgggatgcggacgccggtggtgatgacgctgggcatggtgttggcgccctgcgggctcctgctcaacctgaccggcaccctggcgcccggctggcggctggtgaagggcttcctgaaccagccagtggacgtggagttgtaccagggcctgtgggacatgtgtcgcgagcagagcagccgcgagcgcgagtgcggccagacggaccagtggggctacttcgaggcccagcccgtgctggtggcgcgggcactcatggtcacctcgctggccgccacggtcctggggcttctgctggcgtcgctgggcgtgcgctgctggcaggacgagcccaacttcgtgctggcagggctctcgggcgtcgtgctcttcgtcgctggcctcctcggcctcatcccggtgtcctggtacaaccacttcttgggggaccgcgacgtgctgcccgccccggccagcccggtcacggtgcaggtcagctacagcctggtcctgggctacctgggcagctgcctcctgctgctgggcggcttctcgctggcgctcagcttc

SEQ ID NO: 11891 - DNA, 6000 bp, Homo sapiens
tccccagtagactacaccctcatttggtgttatttttcacgtgctatctttaatacaggtacatccttcagtctatttgtagaacattcagttttcttcatcttttctttgccggtgctacattatttgaattattttgctacagaataacttctattatttgatatggcagatgtcactttttatatttagatatagcattcatttatttaacaaatatttgacgaccagttgtatatcagatagtgttctaggtgctggaggtacaacagtgaacaagctaggtgaagaccttgattttataaaacttactttttagtggaagagagacaatttaagaaagcgaatgtacagtttttcacgtggagaaaagcactgcagaggaagatactagcagggcaagggatctgagtgcagtcagacctcatttgggtccagacttcattcctctatgtctctttcctttctacagaaagactgttagagaaaatggtagcattggtttcctgttgggagggaaagtgggtggtcatggtaagtgggtagagaaagacttcacagtatactgtttttgtacattttgagtttttttaaaagcgagacttgagctattctagctctgataatatggtgcagtatttgttatgttagttgtagtctttctgggcagtttttacatccccatgagccgttaaaaaaatacctgaacctttaattaggggaaataaattggaaaaatacatttcccttcacttaacattatcttagtttctctttttttttttttttttttttgagatggagtcttgctctgttacccaggctggagtgcagtggtggcgggacctcagctagatgcagcctccgcctcctgggttcaagcaattctcctgcctcagcctgctgagtagctgggattacaggcacctgccactacgcccggctgattttttggtatttttagtagagacggggtttcaccatgttggtgaggctggttttgaactcttgacctcaagtgatctgctcgccttggtctcccaaagtgctaggattacaggcgtgagccactgcacccggcctttttttttttttttttgaggggggggtctcactccatcgtccaggctagaatgctgtggcctgaacatgactcactccagttttgacttccttggctgaagccatcctcccacctcggcttcctgatcccgagtagctgggactccaggcacgtgtcaccaatgcatggctaatttttaaatttttttgtagacacaatgtctcgctgcattgcccaggctggtcttgaactcctgagctcaagcgattttcccacctcagccttcaaagtgctgggattacaggtgtgagccactgcacccaaccagtttctctctgcaaactagggaaaaaatttacgcttagcagatactgagggctgattatttctatcacagaagcatttggctatagaatttcagggtttagtaaacttgatttacactgaatttttaggtgcatatcagtaaatctacgggcatatgccgcctgcaagttgtgtggcatcacccaaaagccgagagtaatggaaagagcaggctgttagtaatcaggcagatctggctcctgtccaatctaaatcctgttatttagactaatatcttaagtctgttattaagtccgatttctgacgctattaagttaggtgaacaaccttggtaacttaacctctgaaccacagttacttcatctgtaaaatagggatgtatgtatggtaacgattttttaaccacaacttcccaactctaagatggtctgaaaagaattttttgagtgtttggctcagaatcacttggcagcaaaacctgacttgaagttgaggcttcattcatcccacttagtatattcaaatgttttgctaaagaaataattatgaggtgctacttcacactgactagggttgtatatgcattttattgcctattttctaaaacactaaaaatgctaaattctgccccaggtcttgccacagatgtttcagtggactatgggcctgtgagaccttaaagggttgattgagtaaggatcacaggtgatgtccgcattgtgcttggcatggagttaagtgcttgataaatggtggttatcaatctgattatgtaaatttatgtaaattcagttctcaagtttgtggtttttttcccctcctggagaaatctattctattttaaagtgaggaaggctccgtggagggctggtagctggtagctgttcacttgtggaactttcagcctgaggctggagccccttcctgggagtctggtcttgtcgtcttcctgaccacccccacacccttcctctaaattccctccatccctgtttttctcccgcttgcgagcttttgggagtgtgctgaatctcagactgcaatagataaacccaagagggacaggcaccagtagcctgagcttgctttctcccctggctcatgggaatcaagcagtagaaatttttagtgagtgttgttttccatagtatgcttactagttgtgtcttcctgttttgttcttggtgatttgaagaaacctgtttacaaggtaagggactgaaacaaataggtgacaggaaaaagagcagcaggggtacgagctggaggagtaagtggcttggcttgctctctttcagaatggagggctgtatggaaaggaggggtagtgttcttgaagagtgttggggtttaaatctagggggaccgtgtcttggcattgattgaaactcctggcttaacatcaccccgaaactgttagttggactgaacatgacatttggcagtgcagttaaaaacacttcctgctgtagcctggtaatggtcaggctatgtgaagagctgctctggagctcagtccagagcgggtattctgtttctttcactctgaaatcctgcctctcgatattttgagaaggaaggagttggtgaattgttttaaaatcctcgatgaatgtcttcatttattcatgacaccacttctgaatatatttatgtgccagacgctgaagtttactaatattatggtgcccagtaaatacttgtttttactaatattttttatggcaataaaatgactttttcaggattatgtgatttaaaagattgacccttttggcaaaatacgtattcatgataggaaatatatacaaataaaaacaacatagttcacttaaacctcccaccagagcccagggttcactgttaccattctgaagtgactatggaatttcctagaagtggatatgccatatttttttaaccactcctattggatatttgttttttatttttttgagatggggtcccactctgcagtgtacaatatcatagttcactgtaacgtgtatctcctgggctcaagcgatcctcccacctcagcctcctgagtagctagtcttcagtagctagactataggtgggcgccaccacacctggctttttaaaaaattttttaaaaacttttttatgaacacgaggtctcactatgttgcccaggctgccctcaaattcctgggctcaagtgattctcccaccttggccttccgaagtgcagggattataggcgtgcgccactgcacccggccctgttggataaatgattccagtctctcccaaaaagaactgttgtaagactgtggggtgaggggagggaagggacaaataggaacccgccgtattttccactccctgtgggcctaaaactgctctaaaaaatagtccatgaaaaaatacatagtacaaacagcaactctttctgatatgcttgcatttaaaatcaggctttttctcccttttggaaaaacacagtccttgtttgctttagggaagagtaaaggtcagtgcgctgcattgcattaatttcgaagggaaagatgagaagacatcttgaaaggaatggctggctttctagagaatagtagaggcttaataggtgtcatagaaaaaccagggttggacagtggtagtaaaacggcaaaacagattttattcagaaaaactactgcagtaagaggagagagacctcggtacagaactgctccactgcgaatacaaagaaaagtaggaattgatggcgggggagccggatgtcagtggatggaaaattattacgaggaaacacaggggtgtgcattcttgctgaaggcaggccagagttatcagacatcacctgagggatggagggggatgtggaacctaatcggctgtctagggtgatcagatactgaagttgggggattctggtcaaatcaatttagcaggattcttggtaaaactgggcgatgcaaagacagatgcgttgagtacaaagtccaggccttattgggaagaggatttcagcggagcccgagtagagtttggtctagggagactctgtcactgggaggacgagcgagccgctcggaagtgcgctgggttcccttagcggccagtgggttctggtgagaagggcaacagcgggaggaggcgccggtgcggagcgggaggccgggggcggggctgcggggctgcggggcgggcccgttgtgggtcggcccagcgcgtattcgagtagagggcgagcccgtcccgcccctcgtcgggcgcttcccagatctgcttgagtctatggaggaaaaactccgcggggtccgcgattcccatggccgcagccgcctgcggcaccaaggccatggccctcttcaagcgcaccttggtgctgagtcccgccgcggcgcccaggggcccgggcgcaggcaccgccccgcggggctgctgcttgcctcctgccgcctggccctgcaaggactggcctcggggagagggcggcaggctgtggagccgcctgccccagtcccactcccactcccactcccactcccactcccactcctgctcctcgacgtctcccaccgccgtgtgtgttgtctgcccgcaggactcgctcagcagcagcctgaaaacttgctacaagtatctcaatcagaccagtcgcagtttcgcagctgttatccaggcgctggatggggaaatgcggtgagtgatggaggcagcgcctctggcttggaggaaagcttgtccgggacctttgagtgtgttggaagctaccttttgatatagcgctcagcgttgcagcctcgttgctgtggcttatccagaacatagcccggccctacgtgtttactttagaaagcccttccaggctctttgccatctagtagagtccctgcgggcccagcctttcagagaagaggggggagggggtgatgtttattaactttttttagtcttggcagctgaacctgcctgtgagcaggtcgtgtatttctcggcttcccttatccaactttgcatttctatttctagcatattgggttgattcttttgaagctgcctctgtgcacattacacccatgaacttagaccagttgcctttatgtatgatcgtatttatactgagaagttactgtgttttttgactttcttttctatttgctacatattagttcggtctaaacgtttggtcttctggtctccatagttctacattggttaaatgcaactcacttctgggagtagtggtgacattcaactagtaggctttttaataaactacagaagttcattactctcatgtaaggaaggaaaactaatgtaactttcgttaagtatgaaaagcgttggatatccttatagttctttagagttaagggtgagatgggtttagaaagtggccaggcacaagttattttaaaataaaaaatctttggctgtttgttccaatatattaatagttttcccttttttacagcaacgcagtgtgcatattttatctggttctccgagctctggacacactggaagatgacatgaccatcagtgtggaaaagaaggtcccgctgttacacaactttcactctttcctttaccaaccagactggcggttcatggagagcaaggagaaggatcgc

SEQ ID NO: 11892 - DNA, 6000 bp, Homo sapiens
aaacggtaacattttcacatgagtacaacagtacctcccctcccttacccacggtttagctttctgtgttttcagttatccacagtaaatcatagttatttttgttaatatcaggtattttgagagagtcaccatattcgtgtaactttcattagagtatattgttataattattctattttatcattagttattgttgttatctcttactgtgtctagtttataaattaaactttatcacagtacgtatgcatagaaaaaaaattgtacatatagggtttggtactatccgtgatttcaggcatccactgaggctcttggaacatatacccccccgcggataaaaggggattacccccttaccccctccttttttttttttttagaggcagagtctctctctttcgcccaggctggagtgcagtggcacgatctctgtcgttctctgccccagcatgatgagtggtttctaatttttttcttttgtagaaaaggaggtaaaaattactctctcagccgggtgtggaggctcacgcctgtaatcccagcactttgggagtccgaggcgggcagatcacgaggtcaggagatcgagaccatgctgcctaacacggtgaaacccctgtctgtactaaaaatccaaataattatccggatgtggtggaccatgcctgtaaaaccaactcttcggatgaatacgtcaggagaatcgcataaactcatgatactgagattgcagtgagttgagattgcctcaatgcattccagcctgggtgacagaatgtgactccgtctctaataataaaaataaaaaaaaaaaaaaagcataacaacctagattgtgaagattgatggagttaagaatgattcaataatttaatcttaagagtgccttagttagcaagcaagacaaaaggttattcaggatagtaggaggaaaactaagagaccgtggaagccaaggaggagatagtttcgagaaagaaagaaagcaggagcgagtttgaggcacaagagaactgcgaaaggtccattgcatatgattaggaagagatttctggagcaattaggaccctcatcaaggttaaagaaaagagaggatttagattatctgagctccctcctaaatccctggttttcagtccttagagcaacaggctaactgatgtttagattaagaaaactgactttttccagcagataagagtcccagcaggaatcctggcagaaggaattagagactagcacggggcgggtggagctcagggccattcctgatgaatggccaatgtaaagaaaccccagaaagacaccaagtgacaggaggcagggaaatttgtaggaagagcaatgtagaatgaaaatcattgcaaaacggtgatttggtcttagttgaaagacaagtagaagaagatgaatttgaaagacgacttgtcatttatatggacttgttgtattttttttccaaccattttttcaatattttgttgcttgccttaagggatggcagatatggactctgtccagtggaaagtcacctctaggtttttacacatttttgaaaggcgagtggagaacagcggtggcctgaaagctcttaaaactagtgctctgggtcggggcggtggctcacgcctttaatcccagcactttgggaggtcgaggtgggcgggatcacctgacgtcaggagtttgagaccagcctgggcaacgtggtaaaaccccgtctctactgaaaatacaaaaaaattagccaggcgtggtggtgagcgcctgtaatctcagctactccggaggctgaggcaggagaatcgcttgaacccgggaggcagaggttgctgtgatctgagatcgtgcccttgcactccagcctggtgacagagggaaactccgtctcaaaaaacaaacaaatagctagtgctctgactctggtccaactctttttcccttttgagttgattcagtgacagcacaagcattagtatccagtatccaaccatctgaaaaaaattggaggattttagcttgtcttcgctaaaatagtttggggaataatagagtcacaaattagaactagtaagaatccattccttcagtcttgctagttgaagtaaatcccttatttgtggacatgagatttactttaggttgtatttggcaagtgtgggagtacagggtgtggaatttattcagctacaaaagtcccttaaaattccccgcaatttcataaacccttaagagttcagacatgcaagaatgtttgtgaaatctttggaagatgacaacctaggctactctctctgctgaaaatgactaagttggattttctgcttcattcctaaggaggaaacttgacggctgaaagtgaaaagtgatggcaataaaccagggagcgtgaaatagaaggtgggtgcaaattttactcaactgggaaaaagatgctaattcaaccccgggcagcaagagaaaatgcaaatgaagatgaagtcaaaagagcttaacctgtttcaaatatttcatttctaaaaattcgattctattttctcttgtctcatagtctgtcttaagagactcatactaaatccgtgggcatcctattctttcctcatctaaacacatttttaaaggtgagaaataaccaaagttatgaggcaggattcagggttaatcaataatttcaaacacgaaatggaatatgttaagtcaagaactagtgtgtaaagatattcagcaatcttgttagaaagttgtttgaaagaatttgctctttttttgcttagagatgaagttgttgttcttattcacacacatgaacacagcacgttcttgcttcaggaagtgcgccggcgggcagattggataaattcaaagatcggtattctgacaaaattggcagtttccaaattccagataaatttgtttatcccaaatcattgtgttgtaacttaatcacaaattaaacagatttaaacacagagcctttaagtaaaaatatgtggggaaataattgcttaagtttaaaaataggaatctctatttttttattttttctttctttattttaatcaatgttgaccaggttggcctcgaacgtgtagcctcgcctcctcgagtgccagggcaaccgccctgagccaccgcgactcccaggaatctctattttttttaaaccaggtgaaaaatgttagaccagattactcacccttaaaaattagacaaagtatctgagtcatcgctcccttgaacaacgcctcctagccgtgggattgaggaggaatctggtgttaaaagtccacacgcatcatttcccttaatgttattaatgataatttgcataaggaatctttttttgactgtaaaaataagtttactttgacagtctctattacttaagacatttggtctatcagataatatcttcgtaatcatagtgctgtttaaactttcagtttttttgttcgtttgcttttgtttttgagacggaatctcactctgtcgcccaggctggactgtagtggcactatctcggctcactgcaacctccgcctcctgggctcaagcgattctcctgcctcaacctcccgagtagctggggttacaggcgcccgccaccgcgcccggctaatttttgtatttttagtagagacggagtttcaccctgttggccagactggtctcgaactcctgacctcaggtgatcggcgcgcctcggcgtcccaaagtgctgggattaaaggcgtgagccaccacccccagcctacactttcactttttgatgaaatccatggatggcttcctgagatacattgagattttgtgtgtgtgctatcttctggaatgaagccccacaccgtttattagatgatcttggggatatatgtcttgaagggaagaatgatttagaatatcacattaaaattgtatatgtactgtgaggcagcaatacaaatctggcactttgccaaagttattactagtaggtgggttaaagggacgtttactccaatactatgcaaagtaaagtggacctttctgtcaaacaaaaatagtaataggccgggcatggtggctcaagcctgtaattctcagcctggtggctcaagcctgtaattgtcagcactttgggaggctgaggcgggaggatagcttgagcccaggaggtcgaggctgcagtgagccacgattgtgtcactgccctccagcctgggcgacagagtgagaccctgtctctaaagacaaaccacacacacatatacacacacacactgacacacacttattgttcaattcagtgcgtgttttgcttcgttttggatgaaaattaacaggctttcacattgtgacttaatcttatcagagactcctaaagtaaacaatagcgcagtaggagaaaccctgattgtgtaacttctgctcttgctcccctggaaataatgtcatttcctataaacccacccccaaacaatcgtgactacgtattcataccactggagtcttccaaaatagcaactgcacattatttatcaacgtttagtttgcatttgacaaagcacatccacctgggcttccatttatcattgctattattatattttattattattttcttatttccaaaatctttctagaatggaaagtaaacggggggaccaaaaccccacttagaactctgcttagaagattcggaaatgcccttgaggtttggtcctcccaggagagcacgaagtttatcctcgcgcgcagcctctcttccccggcccgcgcccaccggcctagcccggggctagcgcccgcccacgtgtgctcggctccaggcaaaccccgctgagcagcggccgcacaccgcccaccccggggattggccagcgcggccggggcccggcgggaggcgggctcggggtcgcgttccgggagcgcggaggaggcggtgccgcccggccccgcgccccgcccccgccccgggtggctacacagaggggcgcccacgtgcccagccctccttctgcagcgcggccggcgggcgctcctcttcccgggaccagcgaggcggcggccgctgctccagcgtcccccagccgcgggcccccgacgcgctgcagccggcagcccaccgccgccttcttggcgcgaccccaacccagccccagtaagttgctaggtctccagccccgccgagagtccgcgggcgaggggcagcccggacgctggggccggcggggaaggagcggggcgagggcgccctggggccggcggggaactagagggtcgagggctcccggggacgagtccagctgcgcgcagctgccctgaggccgcgctccagcgagtcttcgtcagggagtcggggccgtgggctggggctgaagccgtggaccttcgtcctcggggctgcgccccggaatgcgcctcgcctcgtccggtccctgtgcagccggctctgcccggggacttcggggaccgctggaactgggagaggggctggcacggcgacttcgcggggacccttcagtcactatttccagaggagctcggcgcacccctctccgggtgggcaggctgaacctcctggccctgcacgctgccggggtccccgaagccgccttcgctccttttcggttcttggcttaaattagaaagccggcttggagcgctggaagccccttcacattctgcaggggacctggtaaaatagcccgtcttggtgtttgtattgggtattttaaagtaactgggtgccttttaaaatccgtttgagatgggctgtattttataagcccgtttcatgaaacgctgttcttgaggcttagagaatctcccaacccatcaccccagagtacctgtccgttcagaaagtaccttttcatcctcttttgacgcttacatccagtctatggagtaaggtattgagagattgtcatcttcaactcgtcgaaaagaaatatgctcagcaaaagccacaatcatatgtggcttttgaagtggatatagtgcctggatttc

SEQ ID NO: 11893 - DNA, 6000 bp, Homo sapiens; identical to SEQ ID NO: 3775

SEQ ID NO: 11894 - DNA, 6000 bp, Homo sapiens
tttcaggacatattccagaagaaggcattgttatcagaggaggcggcagctgtatgtatgtaattgcccctaaagaccttcagtgggacaagatatggaggtgaagacaatgatagtgatggtcctgattttgtgtaggtttaggctaatgtgtgtggtttttgtcttagcttttaacaaaaaaagtttgaaaagtaaaaataaattaaaaaacagaaaaaagcttacagaatagagatataaagaaaaaatatttttgtacagctatagaatgtgtttgattttaaactgatgtctaaaaaaatcaaaagtttaaaaatttttaaagtttataaagtaaaaatgttacagtacgctaaggttaatttattattcaataaataaaaatatacttgtgtaaatatagtgtagccaagtatagagtgtttacaaagtccaccgtagggtacagtaatgtcctaggcctttatgttcactcaccattcattctttgactcgtccagagaaacctccaggcctacaagctccattcatggtaagttccctaaggaagtgtaccaggttttttttttttgtcatttataccattttttattgtactttttctatgtttgcatacacaaaaagcattatgttacaattgcctacaatattcagtatagtaacatgctctacaggtttgcagcctaggaacaataggctataccatatggtttaactgtgttgtaggttataacatttaggtttgtgtacgtatgctttatgatgtttgcacaaagaagaaatcacctaagaattcatttctcagaatatattcccattgtcaagcaatgtataactatattacatatatacatacacacagaatagtaaatacaaaaacagaaaaaaatatgtgaaggtaattccaaatgtgtcagaaattagagtaaatataacaattacatctgcctgttagaagttagaaagtctcaaattgaatataggaaaaggacattatgacatttataagaaatatacctaaacttctcaagagacctaaaaaatctcaaaactagtttcttctctccaaaaatatatcttatgattttaatagtatataaaagagaatttatgatttaaaaagttatttgagataaattggggaattaatcagaaaaagagcaccaaaaggatacaaaatatgaaaatacctaacaacaaagtataaaaagataacaaaaaaaaaaaaaaaacaggtttgccagaaaagtagggtattttttagctcctctccatcagaaaatgtaaggtcaagaggaaaagcttcagcaaaaatggacaagatttgaaccacataaatgcaagtttcatttaaccaactgatatactaccttgcatttaaaaaaaaagaatatgtatttttttcatgtacaaataacatatttgaaaaaattaagtgggtatctggccacaaagaaaatacatagaaatagcaaagagatatcataagatcactgttttcttttttaccacaacccaattagaagttataacagaaattgttaaattaaaccactaaaagactattggtttggaaactgaaagtacaatatatttccaaatattaattgtctaaaaaatcaaatctgaaattatggactatttataactgaccataaaaaatagtaaagtaaaatttattagatacaggtagcataccagtatttagaaagacatttgtcaatttaaacagttttattaagaaaaaagaaagaaaataaatggactaagagtccaactagagagattagaaaacaaaacaatataaatccaaagaaggtataaagaagaaagtaattttagcaatgagaaaaatcaataaaaccaccaagcaaaacaaaaaataccacaatggagtagttcaacagagccaagtactaattctttgaaaacattaatgaaatagacaagcttctgacaatgctgattaaaaaatatagaaatatatgtaaaattagaagacaaaatataaataaaagttacactttattaaaaatatatgaagaactatgtgccaataaatttataaacagatgtagtaaaatgctatcaagctgactcaacaataggaaaccccaaaaagatttacagcagatttgaaaaattacataagtagtccacaacctatcagcaaataaagacaccaggagcctcagattcgtttagtggcaaattttaccaaagttttttataaacaaacaacctttgtttaacaaagataaataaccttatcttttacaaactgttccacagaataggaaaagaggaaaaaaccccacattttataagtttattataacctttgtattatttatctaccactgtgtaatcaactactcaaaacctggtgggtaatcaatgactcatgcagctgcagtaatctattgtgtccaatggctggctagtctaagatggcctcagtcatttgcctggtacgtgatattgggtttcagctggccatgtatctccaataggctagctagttgtgctttcttgcatcatagctgggcatcaaagcaccaaaagagaggtgaggctgcaatgtgcaagaacttttcaaccttctgtttgtacatgttttcatgtctcaagcaaagtaagtcatatgtccaagactagaatcaacattggaggaaacttataaaaagatatagatacctgtaagagtgattccttgagtcattacagtaacaatctatgacaactgataatattggtaacagatctagacatgatcttatgagaaagtaaaattataagctaatgtcccttataaatgcaatttcaaatgtccaaaaaatatttgcaaacccaagccaagatatatccataaaaatttacatgagagtgacggtttcctccggtaatgtgaatattgctttgctttgacatgaatagatttttaaaaagtgataatttcaaatatctcaaatttatatatatagtatatatttgtgtatgtatacacatacatataattcaacactcattcataataaaactcttaggatataaaaagtggaagaaaataaagtatatttaccaaactcctattcagtataaacattaaacttattaataaaatgttggcagttttcctccaaaattgggaataaggtacatttgttcattgtcaccagatttctttcaacatttttactgaaattcccagccaatgtaataaaaaaggtaagacccatcttaattgaaaagatgtaacagtttttacacattaaagatagaagaaactataattaacctatgaacaaaattttaaatcaaaattagtaagttctaagcactaaacagataggcttacactggcatgttgctgagaaattttataaagaatgctgagacactttgctcttaataataatatatgtgttattaaagaccaagaataggttattaaaatttttactcatatactaggtgaagggttgcttggtgtgattttagttgcattaaactgggctttagtgtatagctcttgctcatgctgctttaatagtatcttaaaatatttaaggttttctttatttagagaagttcctaaggtaaatcatccattttcattagacaaatagttaatgagcattcaatatgctaggttctgagtattaatgatatatatgatagccaaataaaaaaagcagcagaggtcaggtgcagtggctcacacctgtaaacccagcactttgagaagccgaggtgggaggactgcttgagaccaggagtttgagaccagcctgggcaacacagcaagacctcatcatgacaaaaagaaaagaaaaaaaatagctgggtgtggtggtgtacacctgcaatcccaactacatgggaggctgagacaagaggatcacttgagcccaggaggtcgaggctgcaatgagccatgttcacgccactgcactccagcctgggtgacagagcaagaccttgtctcaaggaacaacaacaacaaaaagagcaagaaagcaagagaaggatagaaaatttgagcattgcagtcagataaaataaggaaaccaaaggcagtctttggaaacctgttgagaagtttatatatctccacaataatgaggaattctcagcaggaaagtgaagtgaggatatggatgaaacactgacagctagcaagttgaaaaagaagagcagaacacaaatgtctgaatcctgggaaacacccatcattaaataaagatttggcaataaaagtgcaaagctcatacctaaccattcctcctccctcccctctgattgaaactcactgattgataaagcatctaatctttgtgatccctaaaatagcttcagaatattctccacagtgaattttaggcagtgaattttgggtaatttttatcaatcaatcaatggaaatcctgttgtgaaacacatttgtcatccagcatttaagggataatgggaatgcacaataaaatagtaggagtgtccggggtaatagaaaccaagaagaaatttcttgaaacagaaaatagtcaacattaaatgtggagaagatgaccagaaaggaaaatatgttcacaatgtatttgataattaagagaatatttgtgggttattaagaatagtttcaatggaatagtggcagttataatcagagtgtagtaggttgaatacgtggaagatgaagattgaagagattctaatgctatatcttagcagtattttgatctttaaggtaacaggacagcaatggcatggtaacaagcagatacttgcgggattcaggaaaggcaggttaatttcttatttttattatgaaagaagtttgaccatttgcatttatccctacaggacaccttatgttattattaagtacatttgatcaggtctaaattgataattgatacaagatcccgatagtacaaaaagggaatgcagttataaggagacaacaaaagtcagagtagactggacatgaaaagtctggtttgccctcgtagctatttcctggagggaaggggtagctacagtttcctgtccctcttcagcacttctccagctccagtgggtttttaaattacatattccttattttgtgaacaccaaggacacagaaggactaataaagttgctgttcttcgccatatagattgctttgtagctttaataggtttgtttcatcaatgtgataaaaatggactctaaagaacactaatcagttggtttaataaattaatgcaatgtagtacaatgtaatgtgaaaaggaaacagagttagaaagaaaagcttgaagtaatactacacctaagaatgtctttaggagggctgtatttagttattttatatcaaaaatgtatttaagttgtctagtttttagctgaatgaaaggagttctctttcttcattaggccaatgatttttttctttgtaatagctgatgaatgaagtattttgttgagcttttatgcaactcctattattaatgaatattaatatgatatttatatttccagtatcgcagaaatggtcatcctcacaataaactaaggaaccgaatttggggaatggtcaattttgtcaacatggtaagatttgatacagtttttgaatcaagccaataatacgaatgcaaagaacctttcagcgcagttctctgctggactattgtagttacctgatattaagggagtacaaagcacaaagactaataagcaaaaatccacgggaaaaaataataacaacaaaccacagctctgaattttcaattttcgatgtaagtgacatttaatattgaaataagtttcaaaatttggtctctaatcacaaaatttatgaaccaatgtacaaagaatatgaaaatcaatcactgtaaaccaaatcacactactttaaatcactgctctgtgacgttgtataacaaaaagtcttaagttataatttgttgtccatggtttggcatagaaagtggagtaactgtttcagta

SEQ ID NO: 11895 - DNA, 6000 bp, Homo sapiens; identical to SEQ ID NO: 1289

SEQ ID NO: 11896 - DNA, 6000 bp, Homo sapiens
gtcttggttctctggggtgatataggttcttggcagctatcaaggattttcctcattgttactaagcataaaacgaatatttttcttagattgagttacctggaatcttccatgtaaactgtgatccacgatattggttaaataagtaaatgtccagacttcagttaatattatagttgcttcattctttttaaattttttgcatgttttattatgtaacacagttatatatttacaaatatattggggatgcagtcttaaatggttttttgtttcttttttgagatggagtctcgctcttttgctaggctggagtgcagtggtgcaatctcggctcactgcaacctctgcctcccgggttcaagcgattttcctgcctcagtcttctgagtagctgggactataggcgtgtgccaccacgccccgctaatttttatatttttagtagagaaggggtttcaccatgttggccaggctggtctcgatctcttgacctcgtgatctgcccgccttggcctcccaaagtgctgggattacaggtgtgagccaccgcacccagcttaaatgttttttttactgatggattacatgattaaaacatttggaaaccactgcttccgtgaaaacaacagttataaagtcaccttttgtgtcacatggaataatgtgcaggttaaagggcatttctcctggggttggattctggtgtctggaatgatgagaaaggtttttagatccagtgagagccccatggaatactggacatagatgctgtttgagaacatccttccccagattcctgacccctacatcctgctccagtgggaaccgtggaagagcaataactcagtgctgacgtgatcccgaagggttctaagagagcagcagtgagtgaggggagaagtgaggagacaggtgggaccctggagggggacctgtggaggtcatgactgtccagagactcggttctgaggggagccaccctttgagcactggcctgtgtctcctcccagtttaaactctgggacctgggctctgacggcgcatactggctgtacacaatgattactcttccactattaagttatgggatgtgtctttcaattaaaaaatttccccttaatttataatggaaatttaaaaattatttgagaaaagatagacatgcagaaagaaatcaaaagtaccaaaacttttggcttatttcttttggttctctggtatcctgtctatcgtggtgacttatttatttatacatacatatatatatacacatatgtgtgtaaaaatacgtatatatgtattttttctttttcttttttttttttttttttgagatggagcctcgctctgtcacccaggctgcagtgcagtggcacgatctcaggtcactgcaacctctgcctcccgggttcaagtgattttcctgcttaagcctccacagcagctgggattacaggcatgtgtcgccatgcccagctaatttttttgtatttttagtagaaacagggtcttgccatgttggccaggctggcctcaaactgagctcaagtgatccgcccaccttggcctcccaaagtgctgggattacaggtgggaaccaccacatctggccttatttttatattttaaatttatatacttgatttgcagtctgctttttaaaaacttgacagtaggctgggcgctgtggctcatgcctgtaatcccaacacttggggaggctgaggcgggcagatcacgaggtcaggagatcgagaccatcctggctaacacagcaaaaccaatctctactaaaaatacaaaaaattagccaggtgtggtggcaggcgcctgtagtcccagctactcgggaggctgaggcaggagaatggcataaacctgggaggcggagttcgtagtgagccgagatcaccgcactgcactccagcctgggagacagagtgagactgtctcaaaaaaaaaaaaaacttgacagtaaatttttgggttttgtactatagtggattaggtagtttgaaaacctgatcactataagtaacaaacttattttttcagtgtatagttgagctaataaaaaggtaagagaattgccagaaaggaagcaggtgggaggactaaaacttagggtggcaagcgtggtggcatcactgaggccaccatggggggctgctctcaccttagttgtctagaggcttggattttatcactcatgtgaaggagtgtagagcctgttaagggtggagaattagaatggagatctcctacccgttgccccggggagatgacacataccttgtttattttaaccttgactctgacaggttgttggggaagtgtaggttgagaatgttaaatagtcttttgagcctccatgggcttagggactcattctgtatgaaatctagacccagggccacatgagatggctcaagtctgtaatcccaacatgttgagaggctgaggcaggaggatttcttgaggccaggagttccagaccagcctgggcaatatggggagtccccagggaaaaaacaaaaaagaaaactagacccagtcgtcgatacccttggactgtttgacaaaataaaaccaaaaatctgttataaggagaaattactctcagcagaggaagttcccacttaagaaaaagagaaatttcttcacctcaggtcacataggacacgcacaggtaaagcctcattgaagatgagcttgaaatgtaaagtcaacagtcagccaccaagaaaacagctgatcatgagcaggagtgaacacatataacaaacaggttatagttctccaaggatttcaaataataaagccattagatagactataaaacaagtaggcttaaaattagtaacctgaaaacataaaaaagcaacaaatcactccaaaaagaacaaacagattggaaagccctaaatggaactattgaaaatgagaatcatagttattaaatttcagtgaaatgggataaaaagatcagacttaggtgaaaagaaaaggaagtagaagataaatttaaagacacttcttccccatctttctttgtgaggcgtccacccctccctgctcccctccatggagccagtgtttccaaaggcccccagcccgctttgcaggtgtcacttctccagcccatttaaaacccaagttcatggctatcttgcaggatttgctttttcattgtttggcctctgaggatttcattcattcattcattcattcattcattcattcattcattattcattgtttattcatgcatgcatgtatgtatgtgagtgagtgacagggtctcactgtcacccaggctggagtgcagtggtaccatcatagctcattgcagcctcaaactcgtgggctcaagcagcctcccatctcagcctcccaagtagctgggactacaccagatagctggcctgctgccacacgcagctaatatttttatctcttgtggagatgaggttttgctttgttgcccaggctggttttgtactcctgggctcaagcgatcttcctgccttggcctcccaaagtgctggaattaatcaccaggtaatttcatttcttattacaggctctgccctgtatttaaagagatggtttatgtatttcttcttgcatgttcaggtgttctgaggggtttttatgccattcggcctgccacattgtaatgaagctgtccctcttcatacttttttagttagacattttctaattaataataatatgactagactgtagtatggccactttcccatggctttaaatgtagttaagcatcttttttatggacagtattcaagaatgatagcccctctttgactagcccctctttgggtagtcttcaatacccaaagcccctctttgggtagtcttcaatattttgattcaaaacattgatgaaacaaacaactcggtacctacctatggctctgcaaccaagtacatactaggagtagacttactgagacagctgacactacacacgttaaggcttttggcatctgagaagcgtaggccatctcaacagaatacctgacaatgttctggagacatctggtaggcaggaggcctggggccgggctctggttcctgccatgctctgcagggatgttgcccctgaggggatcagcgtcttcaccatggacatgggagtgtgggatcggctcagctgcaagggttctgtcagtattagctgggattcccactctgtctctctctcccgtttccaggtgacctcacggtggacattccgatgcccaggatgccctcaggccctgtctcatgatgactcccacttccacgagcggcacaagtgcatcaacttcttcgtgaaggtgtacggctacatgcccctcctgtacacgcagttcagggtggattctgtgctcttcaagacacgcctgccccatgacaagaccaagtgcttcaagttcatctaggggcagcgcacggtctggggaagaggatgagcagagggaggaagatggctcccaaggttcctaggcattgcaggaccttgggcacatctgctggtgggtggcccagagcctctgctggaaggggcagcaggaggagtggaaggaaaccgctgcctttatcttgaagtcagccacactgggcctggagccctgggcggagtccccggggttccccacacagggcactgactgatagcttacactgaggactgtggcgactctgcagagtcactcacaccgttcgtacgcccaggacagctggttcgtggtttttacattcaataacaactattatgattatttaaaaagagaaagtttcagatttgccattcaaggcttatttatatatatgtgtgtgtatataaatacatgcacacacttgcatacatatatatttttggctgggggagtgtgagttttgcctttctaagggagggaccgcgcaggctcctttgttctgtattctggcggagatgggtcctggccttgtgtcactggcttatccttaaagatcatctcccatcctccccagcgccatctgtgtgcagcaaccagaaagggatgaacttggccctcttgcgggcctggacaaggtctcttccttaccctttctgttgccagtcagcaacctgtaactcacattctcttcccagtgaatccctgggagcgcctgaccctggtgggctgttcagcttcctgctgctggggccagcgatttttgaggatttatctttaggccaggcttgcctccgtacttatccctgctctcccatttctctcttgtttgagagagaatgaggaagcaaagagtgagaaagaataggggctgaagacgccactcccagatggctctttctatcctgctcttctgttgaaacacacgtgctgtgggcctcaggcgtttctgaagtgctctttcttggattggacaggagatcagcagcgtgcacatctgctgtggtctgaagtggtttgcaggtcagcctcctctccctagtgtagagcaagccagtgtccttcgaggaacccacccggctggccgggaagttttacagcaaggcgcctgccttgggataattccttggtgaaattcaccttccccccgcctctgtctggagccccatcctgtgttatctgtggtttttggacccctaatgtcagcttggctgtaggactccccgaggtttggtatgtgctagaacaatgggaggctgtgatttgctgtgtaagctcacatccagccttggaatctaacgggcattcacaacccgagttaccactttccactccctgcttaggattctgttccctgggctgaaactgaaataagctaattttttgggtcacggtggcagtaggggaacctaggagggtgtgagtggcatttgtcagggatttagcccatgacgtgtttcttgaaccctactttctggaagtggagttgactctggaagttttctagcaactgaacaaaagctcaggtttgtcctggtcatgcacatgcctt

SEQ ID NO: 11897 - DNA, 6000 bp, Homo sapiens; identical to SEQ ID NO: 1305

SEQ ID NO: 11898 - DNA, 6000 bp, Homo sapiens
attcaatttttaatgtctgaccataaggtaagatatttataggctctttttaaccttttataattttttgttaaagagcaggttagtgctttaagaaaaacccattgtgtttttattttaatgttcagtttacagaaaaactggatgatacctctttaactttagccaatatgtttacacacagaattttctttacaattaacgttttaaaacttgcgtaaacctttaaaacaatttttttaaccttttaatgtaggtaaaaatttacattcctatgcctgcttataatccatttaccaaaggtatattttactttcctaatataccttgcacataaactgtttttttaaatagttttacattcaggaggcctatattatacaacatttcttgcataaattcctttttttaataacttctttttctcacaactttcgcagacaattcttcgatatgtctcaactttctgacttattacaaactttttttttttttttttgagatggagtctcgctctgtcgctcaggctggagtgcagtggtccgatctcggctcactgcaagctccgcctcccgggttcacgccattctcctgcctcagcctcccaagtagctgggactacaggcgcccgccaccacacctggctaattttttgtatttttagtagagacggggtttcaccgtgttagccaggatggtctccatctcctgaccttgtgatctgcccgcctcggcctcccaaagtgctgagatttcaggcgtaagccaccgtgcccggcccaaactttttttttaaacgaccagttattttatttcagggcaagaatttaccatatagctttttttttacataaattctgtcccccctttttttctgaagatgataaccattcttttccaaagtgaacttcctttatgtctgtggactagactgtctaaggcgacaagattagaagttactataatatatgttacacttttaacttttagcagacttcagttttgttgaaaaccttgtaagtttgggattttaattatcctttgctattaataagaccttgtttagtccaaattaacttagaattggtatagtttttttttttttttttttaattacctgggaggaaccatctattgtcctgtcctgaagggagttcctcctaggtctggttggacctttgtatggtaattaagatttagatctcctgttaggaaacctgctgggttaagggaattttcagtggttaatgttaaatcttccttttttttttttttttttttttttttttacttaggatatttctgaactggtgaggtatgctcacaatgaggtttcctctaaaagttatttttctactttcttctgttagcaaagcagttgccactacagattgaatgcttttgggccatctgcagattactaggttaaggatggttgataggaaggctacaggttgttagtggcctcagtgctttcgggctaagcccttgtttacacttacaacaaggtggtattggagtgttgtagggtcacggagaagaccttcaattatcaattataggttttaaatttaccctggcttttaaaggaatagggtacactttttttcttaactacttgtatatctctttctttctctctttaactttctctctctttgacttttccttttgcctctgcctcttcctctctctctgcctctctccctccttgactccgtctttgtctctccccctcttcctgtctctcttttcctcttttcctctctgtctcttttctctgtctctctctgctggtctttccttgcctctgccagccacttatgctgctgttctctcaaccactgtggcggggcaggggtgggggggtgtgatctaaaaccagctgtaaccaagtgtctatgaacaggaactggtctaggcgccctggctttcaggttaccttgtgccgtacctttgaaacaagggacctgtccaggcttcttttctgatggccaacggccacctctaatgttggccagtctatttctggccaaacttagaacacaaagttctaagttttcctggtatcatagtaatgccgtaatctcccttcagtcctttcttgaaaattttcaacgtagttcctagtggggtgggcttattttgtgcctgacccatgcttccttgagacaaaacaccacgctcaccccacacacacaccacaaaacaaagaacgggtaaaaagggcacacacacacttttacagtttacaccaaaccagaatcaaaaccaaaatcagagtatcaagagatccaagccaggtcaaaaccaaagtatcaagcaatccaagttaagtcaaaaacaaaagccaaagtacccgtacagccatgctgtgggtgatcaggccacgcttccactcaaatggagtgggcaagttccaaagaccagtcttaccaagtttcagatgtctggactcccaagtgccagttccttcccggtgttcagccactgcgttgatcctctgggagcctgccacatgctgctctggcgacatgtcccatggggcaattgcctacccaggagcgctctttggatccacattgctcaggctggtctgagtcccccgcagggatgctccacagggcaggcctaagtcacctaaggggctgccttggccttcctctaatcaccttgtttccagtcagggaaccaagaaatgcaacaggactagccgcggacaagaacacctcagacaccaagttgtagaaggaaagggctttattcagctgggagcatcagtggactcacgtcttcaaaaaccgagctccccgagtaagcaattcctgtcccttttaagggcttacaactccaagggggtccgcatgagagggtcatgatcgattgagcaagcagggagtacgtgactgggagctgcatgcaccggtaatcagaatggaacagaacaggacaggggttttcacgatgcttttccatacagtgtctgaaatctatagataacacaaaaagttaggtcaggggttgatttttaactactaggcccatggcacgatgctgggctatctgcctgtggattccatttctgccttttagattttatttcttctttctttggaggcagaaattgggcataagacaatatgaagggtggtctcctcccttaaaacattgcgcagattttaaggcgaagtcagtacttgttcatttgttcaatttcttgtacttctaagtgtttggaatagcctgaaggtgattagtgtgaagccaaaatatttgccagagagacttgataggatactcccaagttcagggatttggaatgtgcgatgtaaaattggaatacttttgtgagatatttgaaatagtggaatttcacaatgagtggccagtgtggggagaggctggaggagtttaatctctatgtggaaaatatggcaaggtcttgcaaatttaaaaatgtgtattttcttttcctctgcaattccatttctaggaatttaccccgaaaatatatttgctaagcacattttgtgtactaagtcatgcatgtacctggttattcgttacaacattatacaaaaaaaaaagtaaaaatatcagtgtttagccttaggagactggtgaactaagttgtggcacattcttaagttgaaaactttgcacctgcagagtgaaggagctctatgtgtattgatgggacattcttctaagatgtgttaaactaaaaacaaaaacaaaaagcaaggtgaagaataatacgtccttgttgcctggcctgggggccattggtgacggagaaccattgtgatttccttgtttaagcatagaatgtcttgggaagaatacaaaggtggttacaacctttggctgcatctgtgcggaaccactctgagtatctgggggacaggaaggagatgtactttccatagcacacgctttttatcttttaaatgtgtcttatatacatgtattttatattcagaaagtttgaccaccgatcatatcatttgggttgaaaactgtgaaacctctatgtttccctcccacattcatgtctgccacctgttgggtctgcctggtctctttgaccttgatgacttgagaagcagtcattgaccacactgacagttttaggcttaccctaaaacagtccgcctggcccccagcatattgacatttttcctcttgatttgtgtgactgacaatgtttctgtttccctcccccagctttggcagcatgtaagcagctgtttgccaagaacccaggtcactgctaagaaagggtgccttcgggagaagagtgtccagaggataccaatgccagatgcatctggagttacactcagcactcgcagtatgagacattgtgtgccagcatctctttccttctggcaaagactgtagctctccaggtaggaggatcctggaagctgtgagcaccaggagccttgccagaggaggatggggccagatatgaactctctaccatgaacatggttctcggcttatgaaggaattttaagtaaaacagttatttaatttccacatattcaagtcaaaagccttctgtgtgaagtgccagtgattacccctccacaggagttatcaggatttttctggcaccaagtttaattcttcttcgtacttctggtagtgacagatctgcaggacagatttatctgttgaatgctcttgggcaggaaaaccatgtaaaacctctggaagcagcatcaggacagcagagcagagcccccgtcctcactgctcacttgcacagaaactccatctggactcggatgcttttactgaagacccatctagcttcaatcatctttagagtccatccattctggagagacctggcgtttgcagttgcctcctgtggccgtgtttttctgtcattctgttcccaggccttctattcaggcggttgaagggtgtggactttggaatggggtttgctgttcttcgggaacttgcttcctttccctggctggtgctgtcaggaaggaccatctgaaggctgcaatttgttcttagggaggcaggtgctggcctggcctggatcttccaccatgttcctgttgctgccttttgatagcctgattgtcaaccttctgggcatctccctgactgtcctcttcaccctccttctcgttttcatcatagtgccagccatttttggagtctcctttggtatccgcaaactctacatgaaaagtctgttaaaaatctttgcggtaagttatgctgttacaaaaggttgcttcacagaggagggtagaagtgcatttagcaaaaagttattcttacaggcctattatctctttattagatagggagaaagttgggagaatgggaagtggctttttgagtaagaagaataactaaacgtctacttttgaaaggtacttgtgtgtttgatttatgccgagccgagggacctataccatgactccacatgttgcctgtttatttcaaagagaatggggcttagaattaaagaaaagcactgccaatctctgtctcttcttgcataactgatgccatagctcgaagctgctgcaggcatattccctcactgagaagcatgggagagcctcttctcttccaggcatttattctaagtaggtccttgcatttcagactaaaagaatggacagaaaagggcatttgaattgttttattaaaggtagaggcaaaggatacatttctgaacatatgtcagaacttacctgactgttgaattataccaaactggtcacattgtaaggaaataggtgagaagtgatgttttttggaagttgatctctcccacaagacttaaatacctctgcacagatttggtgatttcattgtaatgtctgtttttagtagtcaccaaatctttagggattcatgtataatttgagaagtgcacttatagtagtaaaaataatacagcattgttcatattttatctttttcttttcttttttttttttttttttcgagacaaga

SEQ ID NO: 11899 - DNA, 6000 bp, Homo sapiens
cgaggctgcttagacactaatgatatctgcaaattggtctaagtgtggattcaaacataatacctatagtcatgctattacatggcagaaatacgtgtttaaacatctggcatttttcagaaagttcatactcagaataagaactgttaaaaaaatacaaatacagtcagtctggagcttatctcttactttaaatcatcaaaggacagccaaatctcaactaactatgaaagaatcaatgagatagtacttacctcctcaaggaagaacacacagacagctcatttatttttcaaaccttcacaacaatgtgctagtgtaggatttcagtggctaagattctgtgagttgctcaaacttgctcaagctttcctatatttttatttagaagaagaaaagaaggcatattacatttaacaatatgacaaattctgtgtacccttcagtggtcactttcttgtatgacaataagtaccatagtaatatttgcccttataaaaaaataaatttaaaaagtacagtcccattctgtgtatatacgtggtttatgattaagaatgaaagtagtgtcttcatggttctgatagttgaagattaatatctacccttttttgtataaccagtttataccaaataaaacaaaacctgcctctcaactcagagataactcttttagcttgttaatatacatccttctagaatatacacacatacccactcacaacacatttacatatatgtttatgtttctccctttaatgggattcacgttattttttaatttttttttttactttaatagctttagaagtataagtggtttttggttacacggatgaattgtatagtggtgaagtctaagattttagtacacccatcaccggagtactgcactttgtacccaatgagtagttttctattccttacttccttcttacccttcccccttctgagtctccaatgtccattattccattctgtatgcctttgtgtacccatagcttagctcccacttataagtgagaacatacagtattttgctttccattactgagttacttcacttagaaaaatggcctccagctccacccaaattactgcaaaagacaatatttcattcttttttatggctgagtagtattccatgttatatttatagcacatttgctttatccactgattggtttatgggcacttaggttggctccatatctttgcaattgtgaattgtgctgtgataaacatgttgttgcaggtgtatctttttttttattggttttgctcagatacttcattcagccaaaaaataccaagaatctattatgtttggtattgtgtacaaatacatatatatttttatacaccagcatatgatacatgaggaaacacattcttcctctacattgtatctaatgatacgcataaggctatttcaggttaaatttatactacagttatttattttaccaagcattatgaagaaagcattttgacatcccaaacagatatttctctcctttactgtaatataatttagtcataactcaaggtaattctgagaaattgaaatacaagcaaaaggaacagttccgtaaatatcaataaacaaaagacttaaagggagcaatgtgaaaacatgtctgacttttcagctagatcatttaaattttttctttggcaaacaactgaacaaaaccccaaattacccaaatttactaaggaagtggagccacatgatgataatcaacacaagagtctctgcagccatccggaattcaagctgtgcatacggagaactctgctattccaaacaacttgtataccaggggtgattctctataatccatttgagctatgagtcatttaggaagcaaaattagacttattttccccccaaagattgtttttacttgtcattgcatgctcatatacagggctcagagctgatggataacttactcctagtaccctgcttcccagaaatggagatagcagcattgtgttttacccaatggataatttactctcttgactaatgaccacttagatagtaggcaaaaggattcagatttctaaaatctaatggaaatttaaggtaaaaacttaaacaaatatttgtcaaattattaaattcttagcgaggcgatcactaatgttgatacagagctactaaagaaagatttttggcacccctaaatttataaaaagtcatgttaagtttaggcacactcaaaattaatttgaggaattctagcctaaaactattttgtaaatttcattcaattaacaaatattgagggactgataaaaactacaaaataaatctttgttagatgaataggtatctctcacatgtgtggctttgggttagacgtaaagaatgcaaaccataaagggacatggaattgtttctggaggaacccagaatttaaaatgttaagaaatgtacacagtaaatacatggtataggaagtggaaggtgatatatgtcttaaaaagattgctgggacattgtgcgacggacaccaaaagggagaagtcatggaagaggcagagtttgaagtgactcttccaggactgtaatgctttggacgtaagacctggagaagggtatcccagatactcgcatgcaatggcacagaggtaggcagatgctgtctggtaggaaatgggacaccagggaatatttgtgagtagggaaatgatatggtcagggttttgcgtgaggaaaagcaattggcagaaagtatttaaactgtgtgggagggtggaaaggatgggcgggagggaatggactgcctgcaggtccctggaaatgcagagctggagcttgggaccaggccagagttggggataagagtttgggaatctgggtgtcctcttcctagtgttcataattgagaaaccccaagaagagcaaagggcagggcagtttcttgctggagggtgacaacatcagaagggccaacctccatgctaaatatcccgcccaacatctgacacctcaaaacaacaacaacaaccaaaacaaaacaaaaacccaccacaaaaccaaaaaccctcagtacaaagtaaggccacctccccatagcgaggtgggaagtcaaggtgcagagaattagagaggatagcgcattccagggcatatcagggctaaaactaaggcaaggatgacatggagtatatttaaaacagtgtacttggttccaacaatgatagactggattaagaaaatgtggcacatatacaccatggaatactatgcagccataaaaaatgatgagttcatgtcctttgtagggatatggatgaaactggaaatcatcattctcagcaaactatcgcaaggacagaaaaccaaacaccgcatgttctcactcctaggtgggaattgaacaatgagaacacatggacacaggaaggggaatatcacacaccggggactgttgtggggtggggggaggggggagggatagcattaggagatatacctaatgctaaatgacgagttaatgggtgcagcacaccaacatggcacatgtatacatatgtaacaaacccacatgtaccctaaaacttaaaagtataataataataaaatttaaaaaaacactcaataaacagaagatacaaggaaaaaataaataaataaataaataaataaatataaataaaacagtgtacttggaacttcctcaacagccatccttcttggtctatagaaactcaggagtcccagctttaaatagacttgtcacggcctgcgttcgtttctaaaaggtgttttaagctactttgttttcctgaaagcccctgtaaccgtgccagctgtctctatttcgtgcctgtgaaggagcactggggtcagaaatatgtaaggctcagtgttattattcaagttcattgtctttaccgagccctggaagtgggtacaggtctaagtgttcaccctgcggcctcgccaaggggtaacttggcatagttttccagctggtaagttgataggcaaaggaaagaaagaagggtatgaagagcgcccccgtgagaagcaagggttaaggttgccacggacccggctttaccctcaaacccaggaaagccgggtcacttggggctagggacggcccccgagcgagcggggctgcaggtgccgcgaggaaagtcagatcttatctgcgctcctagttatctccgcagctctttctccaggaaaataatcctggcaccaccactcaggagccatctgtcttcgccccagttccccggggtcgagcagtcagcccagggtcagggtcctgctgtgggcgggcgggaggacagccctgcagttggaagcagaagggccgagggaatcccgcgaagccgccggagcgcgtcgcggcggggcctcccggggctttcccggccccgggtgcgcggcagccgcgggggctgcgtccctctagtccagtgcagccgggtgggagctgcagagcgaagcaggtgggtgtggagccaggcccggggcagcaggagtggctggcgcgcggaagctgagggaggcaccccgccgaggtgtgggcggtgcctgcccgcgccccagccgcgccctgggcaccagagcgctgtccccggccgagcgcacagctccggcgccgcgaggcagagccccggcgtccccggcggtgcgctgccggctcgcgcagcccagccatcccgccccgccgcccaccttgacagccgggagcgctgaggaggaagagggggagggggaggaggaagagaaggcggcggccgctccagcccgcgggtgcgcggagcgcgggaggaggcggagcgggaggctggggtggccgcagccctgtgtgcgcgccgggccggctagctgcggggcgggggagcggcgccccagagcgccccgcctagcctcccgcgcgcagcctctaccctgctccgccacagacacacacccaccaagcacccaccgccctccgccctccgccctccgcccccgcggccgccgccgccgctgcgcctcgggcagccccagcgagcggcaactcccgggctggcgcggctcgctttctggctccttccgcgcggcgagctcagccccgctcgatttttcctcttctgttccagccctctcttgtctgggtggctgtggcggcggcagggggatggggaccccgtgtggggaaggggttgaagatcgatgaagattattgttcttttaaaggatgccttagcttcctcccgccgcctttcctctgagccttcctactagagaccgtgaaccagagtcagggatgtaaagacagggggaaagcacgccgggagctccagccagccggggagaccctcctctctgtggaggggagggggatttccagcgacaggtcattggcgaaggggatcgtcgcggggagaggctccccggagggagcggggaatcccacagccctttgtggtgcccgagcccgtgccgcctgctgagcggggtctgtgggagctaggtaagtggcgggggcattgctgctccccgaagggggtcttcctttaagaatgaatcatcgcggcagcctagccagacttgagttgctaaaggaattggaaactgccatatggcgcccagtggacttacacacaaagctgacttagccctgagagggtttttaatgtcaggctccttcccggtggggaaggcgctcaagtattagcccctgaaaagcttcccagcagcctgactgggaagggatggggatgttatttctaggagccgagctcttgttgccttccgtccatttgttggtaaatgccacactcacatgcacacacttgtgggactggatttagggagtgtgatgtctctgatgtatgaacgatcctcagaacacagagacatgcgtgcattttattcttcaagcggtgcgcggtctccgttctgtagcacgattcctgagagggagaacgggtctctaaggaaagagcttcatggctgtttccaacacactctgctag

SEQ ID NO: 11900 - DNA, 6000 bp, Homo sapiens
acattcatacaagagtgaaggtatttcagattagttccatattaccaaatggtatcttcttagtcaagcctttgcttccatacgataaaacattttgacttaaaaaatgaattttccacccagagccgcttgaggcttgtgcacctccagctgcagggcggctccagttctgtggagtccttcagttcccacactctcagatccctggattgcacgctttgttcagcctgccggatcagaggctgagtcagaggaaactgaaaagatcaactctcttaaatgactttagggactcaatcacatggtgaaaccatatgatttgtaataataatgggacaaagatgatatggatatggatgaattaaactcagtctctcatattacagtaactacttaggtccatttcatttctcaccagaacttgtttacctctctccctagtcacaaacctgagtattcacctatttgagatttctcttcccttttctaacttgtaatagtaaagcagtactaatgagcagtgaaaaggtctctagactagaacccagataatccattctctgacctgttgtctgtctttccacaaggcagccaattaatgatgggcttttcatgagaagaatagaaaaatctcagcaaaaatactgccaatgagctgctctcttctgctttactttggtacctgaaggcctgggaaggcctgtcgtatttccttctctcatagtaatagaaaggacggtgacattttcagtgcatattgtgcaccagtgaaatgaaatttctctatggcctctgctttttgtaagtcatggcaggttgaagtttaggtagtacagggtttcttgcaatttgggaatgacagttactctttattatactttattacataccaccttcagtagaagtgtagcgttctgctcactgagacagggacctattgatcttacataccctagagtacaaatggatccacctggtctagcttatggtccttcctagcaatgagggtggccttaaggtgcagaaaagaagtatgatgtggtcagggtcccacaggagctacttgcacagcccaagaaggtgtgaggtcttttcttcttacactctttaagcctctagacttaactagcaggccgccattttggatgaactctagccttcagaaagcaatcatttgctttgctgagccatggtatgttagactctgtggagtcctaatgaagatggtaggaagctctcaggaacttaggaagagtagtagagctgagaaggattattgtctgcagtattttttttgagacagggtctcactctgttacccaggctagaatgcagtggcacaattatagctcaccgcagcctccaactcctgggatcaagagatcctccacaggtacacagcaccatgcctggctaattttaaaaatttttttgtagagacaaggtctcagtatgttgcccaggttggtctcgaatgatcctctcaccttgggctccctacccagccacctttagcctttaaacctcaatgaagttgacagtgttttcatcagtgatgctggccgacaagaacttcagactgttagagaatgaacaactcctttgaatgggacttctctaatccactggttcttaaactatggaattgtctggagaacttaaatagcagtaaaagtcagtgccagctacatagtgccctgtatagctcagaagtgaaggagtaaggagaactggggcagtgctgttgggttggagcagtcagagggagatggtgacctgaagtcagaccaattgaaatggaacctctagtagtaggactgtattttttttaatgcctttcaggtgatgtggatcagcgtaaccttgggtgattcacataagatggccagtgatggtgctgagagttagaaaggcaagagataatttctgtgtaaataatcctgggggtttagtgaggtaaaaggtcagagaaggcttcattaaggacaaacagatagtaaaagaagtgcaacatttggactggggatagaactgcatgaactagagcagagttccccacccgcttctggggccacggaccagtagcggtggcctgttaggaaccaggctgcacagcaggaagtgagtgagcattaccacctgagctccgcctcctgtcagatcagtggaggcgtgccattcccataggatctaggagcgcaaacgcgattgtgaactgtgcctgttgtgctccttatgagagtctgaggtggaatagtttcatccccctccatcccccccaccctcccattcatggaaagattggggaccgctaaactacagcacagatactaagaaccatttttgataatgaagaggtggtggaaatgacctcacagggttttctactgggagtaagtggtgggttgggtgaggactggaagctacccaacacctgcagttctgaggtcgatgcgggatgggagctgggctgtgatgtgctggccacctgaacgaagctgtggaaatgagaacccaagggaagaagttaatgtgagagcaagatgggaggcaaattgacagtgctgtgacatggaaaacatatgatagaaaatgtgccgtaatagataacttggtaacaccccaaaatacagtgccattaatgggaatagaaaaggaggttgatctgattcagcagtgaattaattactacttagacttgacgagtagagttaaaggtggtacagccaacagttaatgtcctgcaggctgctggcttgttgggaataatgctgactagagatgcggctgtgagaggtattcccatagatttctgcttgagcattgtgcagtgtccgagacccagtgagtgtcgttcattagacaggtgaggaaatcaaggtggagaaaagaagtatgatgtgatcagggaggagctacttgcgcaatccaagtccctggaagtcctggtctagggtttgctgaaggtaatataactagggggaagcattaggagtaaggcttggggattgctccccacagagtggggacaggaaaagcccagtcaggcgtgagagaatatctgaaagggaactgttgtcctagtgccctgtgtagttcagaagtgaaggagcagggagaattggggcagtgctgttgggttggagcagtcagagggagatggtgacctgcagttagaagagtggtgagaaagtagaaatcttaggaaatgtccactaaaacaacctcaccatgtccttaggattattatgaactcactagctctccgacttgcctgatcatgcgatgggtgttgtgcaaaccatgaactacatgggtccatcatgacactcacccattgctataaacatcacacaagtgattattccagttatttcctaaactcattctttgggggaaaaaaaaattttggaatatactcatctattatttcttctttccaacacatttccttaaatcaatgtaatctttccctgtttcccataccagtcacctgaagaaactgataaagagaaagttcacctctctgactcagaaaggaaaatggacccagccgaagaggatacaaatgtgtatactgagaaacactcagacagtctgtttaaacggacagaagtcctagcaggtgagtagcctggtgggcctcaggtgggagggtgcctacataggcctctgttagtctaagtgatattcaaaagtgcagcaaagcttgctgtcatctttctgctgaaagcagtcttgtgggtgcttgattccagagcgagaagcaagaggctcagcaaacattgtctttattgtctgccagctccctcaacctacctcttcgccagccatcgggcaggggataggaggtagcctaaaagagggaaagttaacatctgaattgatccagaacaactggatgtagagagatggcagagtgtggagatccatcagtcttgctcacaggcattctacatttcaaaataaagagaacgaaaagttctttaggggaaggcagttcatataagtactgcccaaagtgttaagaacgttgtttctattttaacttaattggatggaagtgcaaatattttaaaggggaaaactttcaagatttaggcacacttggtagtctcaaatccaagaatagaaataaatttgcatgctttttttcatgtatactctttaaaattttaagtcaattatactatgttctctgttgaaaaaaagcagttagaaaattagaatatgaaatgtgagttctgaaaagacaaaagtagttttcaagtatggaattagttaagatcaaggccagatttttcttatcgaggtttttgggtggtattattaacactaaccaaagaaattactgtaccttcctgaggagtttcagatttgcatagttaccaggttgcttcattgaatccagctttttttttattggggttttcaaattaagccttttataaaagtgtaagtagattaggcttgacaataaagctaatgtctgcaacccttgaatctcttctaaagtaatcttccttttggttgtttcagctgtcattgctggtggagttattggctttctctttgcaatttttcttatcctgctgttggtgtatcgcatgagaaagaaggatgaaggaagctatgaccttggagaacgcaaaccatccagtgctgcttatcagaaggcacctactaaggagttttatgcgtaaaactccaacttagtgtctctatttatgagatcactgaacttttcaaaataaagcttttgcatagaataatgaagatctttgttttttgttttcattaaagagccattctggcactttaatgataaaatcccattgtatttaaaacatttcatgtatttctttagaacaacataaaattaaaatttaacatctgcagtgttctgtgaatagcagtggcaaaatattatgttatgaaaaccctcgatgttcatggaattggtttaaacttttatgcgcaaatacaaaatgattgtctttttcctatgactcaaagatgaaagctgtttcatttgtgtcagcatgtctcagattgaccttaccaagttggtcttactttgttaatttatctgttgtccccttcctctcctctgccctcccttcttgtgcccttaaaaccaaaccctatgccttttgtagctgtcatggtgcaatttgtctttggaaaattcagataatggtaatttagtgtatatgtgattttcaaatatgtaaactttaacttccactttgtataaatttttaagtgtcagactatccattttacacttgctttatttttcattacctgtagctttgggcagatttgcaacagcaaattaatgtgtaaaattggattattactacaaaaccgtttagtcatatctatctaatcagatcttcttttgggaggatttgatgtaagttactgacaagcctcagcaaacccaaagatgttaacagtattttaagaagttgctgcagattcctttggccactgtatttgttaatttcttgcaatttgaaggtacgagtagaggtttaaagaaaaatcagtttttgttcttaaaaatgcatttaagttgtaaacgtctttttaagcctttgaagtgcctctgattctatgtaacttgttgcagactggtgttaatgagtatatgtaacagtttaaaaaaaaagttggtattttataagcacagacaattctaatggtaacttttgtagtcttatgaatagacataaattgtaatttgggaacataaaaactactgaataaatcatgtggcctaatattgaaaatgtcactgttataaattttgtacatttttgatcaaatgtacatctcccctttgctaacggccgtctgctctcaaggatgacgtgggtttgatttctaagtgtttcacagtgtctgtaaatcaagaccaaagagcctgtcgatgagactgtttattaccagattcacttctgaattggccagaggaaatctgaatgtattatc

SEQ ID NO: 11901 - DNA, 6000 bp, Homo sapiens
tgcaatccaaaaactgataatcaccacataatttttcatctgaatatgttgcaataggttttaattttattgctttgaaaacaccgtattacagtactgtatttatgacgtaacttatattagcatgatgtggaagggcacaggctttggagccagacagacctagttcctaattatgacttagtttactaacaatatgatgtggtaacaatttagttaatatttaacatctctaagttttcatttcctcatctctaaaatgggactaataccttctccagcaagtttcttttaaggaataaataagaaaatgagtacagaatacttaacacatagtaaccactcactcaatggtaacctcatatgattatttttgccacttaatatgttaagttttttaaatcaaacattaatttttttttagttgtcagcatcatacatttcattatgtattttactgactcctacttattcaaaaacataacaaaatattaagtaacattctattttactttcagtcaaagaaaaataagaagaaatcaaagtcagatgctaaagcagtgcaaaacagttcacgccatgatggaaaggaagttgatgaaggtacttgagcaagggaaaggactgtagaaaattttttaatccttttttatcaaagtgtattatataaaagctgcatttgttttacttaattttgtgtttagctcttcttttttattactgtagaccttaatatatagagctgtgacactgttaggaaacgcttttgttaaggatccagtagtgctttttctgaagggaactgccctgaaatttaaagtcaagctcagtattttgagcaattaaaaagtcattcatcttgtctttgtctcctggaattatggtttgtttgtttttcccccgtggttcttaaatataccatttattatcaccacctaataaacccatttattagtgattatatataatactcctgtcacttctacctagcaagataaaaaaagatagacaagatgacttatatatatcactttttctaaaccatagatgacagatttgataaaaattaccagaataaataataacagttgcctaaaacaacataatgaaattagaaaacattcttaggatgagttaatataatcaacactcttggttttagcttaacatctaaatttatcatgatattttatgtgctccaccccatattctcccccaaaactataacttttttgtcttccccttactgaataacattttttttctggggctatgtcaggagcctgggaaactaaaattagtcacagagagaaacgacagcagcgtaaacgtgataaggtgctgactgattctggttcattggattcaactatccctgggatagaaaataccatcacagttaccaccgagcaacttacaaccgcatcatttcctgttggttccaagaagaataaaggtatattagtggaacataagacagtggtacatcaaatcaaactccttttattcggatgtacaaaatatcattatgtcaaaatctgactattttgaatgctaacatcattgtgctgatatacccttcttcatgagagtattgtgaaccatgtatcggtttaccgaataccagcagtgttacttgttacgtattgcctaatgactggcctattaaattaaaatttgcctttctgccttgagtcatatgagaaaatgatgttgccacttttctagtgcgtatcactttgccccaactcccttgcatctctgttccttagagtggataagacatttattaaatgaaatgatttatcaccattttgcatgttgagagctttcattccaagatgaatcatgcatgttctggtgagtgcaggttgtgtctggatttcttatcaccccacctttttgagaatattatagatgtttgatagagctagaccagaacttcaaagattgagctaatgttctttctctcaagtattaatatttcagatgttcatactatccaatactggtggcttcttggtagcccactctttaaattaccgtcatttttaccctggagacaccagtctgcaaagtgatactgttcaatttgctggaaggcattggcgtatcttccttgtctttttgttaatgaccttcccacctccccacacctcagttgtttccaaaccattttcttagccttgttaccttttattttttgcttgataacttggtggaatttattgccatggtacagcaatgacttctacttacccattttcactgttacatattagctatgctttagtatttttgttgattctttttcgctgtcttgtgcatgccatccttgctagcacaatcctatgtcatgctggtttttttaaacattgtgatcattatgctttttagtgtcagagaaatagtatttttgtgttataatgtgtattctcacctcttgccatatttcctaagtcctggtcccaaatactggcaaagttcttcataaggtgatgtgtttgcttccaggattgttgaaaaggcagcgggtgttgttgagaggtggcaaagttgaatccaattacagagcccaatactgcagttcatacttaaaataatcttgataactgttgtagaatagcaaactctgtctgtacataggcagttttccaggttctttttggcattttagttgactaagaatatggtaaccagaaaactcagttccttaccaacaagtgaaatgtgttgtaaaattgacttttttccagtggaagaatttagcacttgaaggagcaatttataatagataataattaaaaattaatttatgtgttactcctaatttaatgtgcatagtgccctatttagtattaaataaattttatttctattttaaccaggtgattctcatctaaatgttcaagttagcaactttaaatctggaaaaggagattctacacttcagggtgagagaaattacatgtaacttaaattgaaggcccatcaaaatagaaatttatatacatacctctttcctcaaatgaatgacacagaaggaaagaaaaaagtcttaaaatgatttttaattaataaagtaacataatcacagtacagagattttggaaaataaataaaaagaaaaatcacacccacttctaacgatctttgatatgttctagtctttttcccccatatataaaaacattcagtagtcgcttatattgcaactttgaaccttgtcacttaagtcagtagagaagaaagatttttgttgggcttgggtttaatatagcatatatcggataaaatacttgatgcttgtatgttaaaaaaaaaaaaagctttagttcctataatgttttaactgcttccttgacagtcaagtatcaaatatttcacaatggattataggctaaagtttttcattgctttataaatagaaaatatgttttatttactcatttatgataaagattgaattaagtagagtgttatgcctgacctgaaaacaaaagtgttgtagtaaaataaaattggaaatgaaaaaagcaccttcttctttcaggcctttttttttttttttttgggaaatggaatttcacccttgttgcccaggctggagtgtaatggcatggttttggctcactgcaacctccacctcccgggtgcaagcaattctcctgcctcagcctcccgagtagcagggattacaggcgcccaccaccatacctggctaatttttttattttttagtagagatggggtttcaccttgttggccaggctggtctcgaactcctgacctcaggtgatccacccactgcagcctcccaaagtgctggaattacaggcatcaggctttttttttttttttttaaagacagagttttgcttgttgtccaggctggagtgcaatggcacaatctcggctcactgcaacctccgcctcctgggttcaaacaattctgcttcagcctcctgagtagctgggattacaggcacttgcaactacgcctggctaattttgtgtttttagtagaggcagggtttcaccatgttggccaggctagtcttgaacccttgacctcaggtcatctgcctgcccccagcctcccaaagtgctgggattacaagtgtgagccactgcgcccagcctcatttcacacttttcagtgcttgttcttagcactgtcagcttccttcatgcccatgattctcaaccctggctacacattagttatccaggaagctgtaaaaaacaacatgtacacacatatatgtaaaaagaaacaggtacttatctatacacacacctatgtgtatttgtgtgtgtgtacatacatacactctacatatataatgatacctgggctccaccacaaagattcagattttaattggtctgggctgaggctccagggtctattgttaataaatttttcagttaattttaatgtgcagccaggttttagaatcattgcttgatacataatgtaatatatataaataaggaaagaacatgtaactaaggaaatgtcttcatattcttagtgggtgagtattcagaatatgtgtcattttcctctttgctctgttgtactttctttgagcaagttattctgctgtgaacaactttgttagtatatatgttatgttcaagcctcctgtttttaaattaaggcaatccttggtgatcaaaggatagtaggggaagtgagtaataaatataagtcaagcaatcatagaaatgtgaaaatatcccagttttaagaagtcatgtacctgttttttaatattcattttcttttctttaagtttcttcaggattgaatgaaaacctcactgtcaatggaggaggctggaatgaaaagtctgtaaaactctcctcacagatcagtgcaggtgaggagaagtggaactccgtttcacctgcttctgcaggaaagaggaaaactgagccatctgcctggagtcaagacactggagatgctaatacaaatggaaaagactggggaaggagttggagtgaccgttcaatattttctggcattggtaagaagtgttagaaaaatttaactttatttaaaattactaatcttgtacatttttaatttttcagaaatagaaaaaaaaactatgaatagaaaaataagtactgctctgcagaaataatagtaataattaactcatctcacatcctttttgtagagcaaggtgggaattaaataagtaaataacatcatttactctttacatagtgctttcacatactttatcacatttgattatcaacatagctaactggtgtaattatatattcttagtgatgtgatacatgtaatgtgtgggtagactttttgattaatttcaacaattctgttgagtctaaataaaaatagtaaatggaagtacagttgataacatccacttatattttacagtctgcatggtgcctatttataattaaattttcctccggattttaatataaagaccagtagttgagaagtttatttctgttgagagctatcaagttaaaagcagcttaatttgtgtgtgtgtgtgtttgtgtgtgtgtgtgtgtgtattatagaaaagaaatccacattacatgtgggcaattgcaaaatgataaggaaaatcccaaaatgccacctagtgacaactgctgttatttatatttcttctccctccctttctcctgcccgcaactgtatatagtgttttttgttgttttttgtttgtttgtttgtttgtttttttaatggagtcttgctctgtctcccaggctggagtgcagtggcgcgatctcagctcactgcaacctccacctcccgggttcaagcgattctcctacctcagcctcccgagtagctgggattatagacatggcatcaccatacctggctaatttttctatttttagtagggacggggttttgccatgttggcgaggctgatcgtgaactcctgacctcagatgatctgccagcctcggcctcccaaagtgctg

SEQ ID NO: 11902 - DNA, 6000 bp, Homo sapiens
aagtttaaaaagaacttaacgctatacaatttagaatgtaaagaggttttagatgtctagaccaactcccttttttacagatgggaaaactaagagctagtgctgttaaatgacttgcctacataactgtttatctttgttactaagaagttgtttgtaagttgaatttcattttacatgtattaaatgttttagagtgttgtgtagtaaattcagatctttatattttgattttccaacctaaggcatttctatattttgtaccattttaactacttttattaaaatatatacctttttctgtgttagtgaattggttcaatgcattttagtgtctgttgagatctctctgtagtggcgaaccttttaatctaatttaagataaggtatctgagataatgagaataatagtgaaacatgtagaaagtgaattatgcgacttaattcttctatagattcctaataggtagtcacttaaaaaaatatttggtctatctaattgctatttctaagaccaaatttgtggtaattttttttctttttatagggaccacttgtacggtggctgaaagtgaattttagtgaagcatttattgcatggattcacgtgaaagcattacgggttttcgttgagtctgttttaaggtaaagcaagttaattgccaaacttggaactgaagagttcatagattccttacattggacctctttattataacacagtccagcaataggaaattgatttggagaaatcaaagggccaatcatgagacagagattatcagtatcatcatacagcttataaaatgcatattagtcttgttctttagcaccaggtttagaaaaagagatttatgctgccataccctcaggttctttttcttgtgtaggtacttaaaagtagattaaatattaaccaatatttgtttaaaaggaagatccttcaggtgttttatatgtcattggatacatagtatgctaatgacttattgaaatcatttcatattaacctaaagtattttaatattttgagatatttaaaaaatcatattctggtccaatgtatgggttgctcatattagaaatagttttaaaaaacccaaaacttggccgggtgcagtggctcacgcctgtaatcccagcactttgggaggctgaggcaggcagatcacgaggtccgattgagaccatcctggctaacagggtgaaatcctgtctctactaaaaatataaaaaaattagccaagtgtggtggcacgcgcctgtagtgctggctacttgggagactgaggcagagaatcacttgaacccaggaggtggaggttgcagtgagccgagattgtgccactgcactattgcaccactgcactccagcctgggcaacagagcgagactccgcctgaaaaaacaaaacacaaaacaaacaaaaaaacaccccaaaacttacatgtaaccatgctcactatttttaaattttttcaaattttcaaactatatgtgggtaacctcatgctattaccataaaagtatctgctgaccttacttcttcttatttcctgaggatattcatatattaccttaaaaattgaatggtaagccaggcgtggtggctcatgcctgtagtcccagcactttgggaggccaaggcgggcagatcatgaggtcaagagattgagaccatgctggccaacatggtgaaaccccgtctctactaaaaatagaaaaatcagctgggcatggtggtatgtgcctgtaatcccagctactcaggaggctgaggcaggagaatggcttgaacccaggaggcggagattgcagtgagccaggattgcaccactgcactccagcctggcaacagtaagaatccgtctcaaaagaaaaaaaaaatgaatggtaattgaagtaattcctagtaattggcgtagagatttctagtggacagtggggaccaaaggtttgcgtttctgtttatattgaagttttttgtgtatattagtttcagtttctatatatattagttgaacttgtaaaggtaaagggagatattctctccccgttaaccatgattaaagagtatgagaatatttgctttgaaaagaaaatctctttacatgtttgcttgtattgcgtactgtatttctgcttttttgtaaggtatggcttgccagtgaacttccaagcaatgctacttcagcccaataagaaaactttgaagaaactgagagaagtattacatgaattgtataaacatctagacagcagtgcagcagctattattgatgtaagtacttattagcccagtagagtaagaattgaagtgaatttcagaaaaaaaatgattgaaagaagatagacagaaaagggagggtaagtatgaaacttaatcattttttattactttgaggttctcaatttgttatgtaaacatagtaatttacattgtttaccctgttttatactaattatatctgtgttttgcttcttggcatttctacaagctagtaattatcttgctgtgtatcagatgtttatagctgcagaaatacagaaaccagtgatactagttatttacaaaaactataaattgcagagaggaagaaaataagcagttattttaattttatttggtagaagcgatagagtcaatagatgagtattttcaaggtaggttcatttttctaaaatggcgtagctgggcgtggtgggacatgttggtagtcccagcaactgaggaggctgaggcgggaggatcacttgagcccaggccttcgagaccaacctgggtaacatagtaagatcccatctgaaaaaagaaaaaaaaaaacagaccaaaaaatgtattatgtgtttatatcttcttttaaacaaaactgttattttttaaacaaaagaagatataaacagagttacttgtgtttttttgttgttgctgtttaaaattgtagtgggccgctgggcgtggtggctcacgcctgtaatcccagcactttgggaggccgaggcggggggatcaccttaagtcaggagtttgagaccggcctggccaacatggtgaaaccccgtctctactagaaatacaataattagctgggcgtggcagcggtcacctataatcccagctactcgggagcctgaggcaggagaatcgcttgaacctcggggggtggttgcagtgagccaagattgcgccactgcactccagcctgggtgacagagggagactccgtcccaaaaaaaaaaaaaaaaaaaattgtagtgggcttttactttatatttctggttttaaatatcttgctgatttttttttttctctttaaaagtttagggtagatggtagcatctcacataggcattaattagaactatgaaaaatcagtttttcttgatagaaggaaatgcgggaaatgacttgctacactttttttctttttctttttttttttttttttttcgagatggagtttcgctcttttgcccaggctggagtgaagtggcgtgatcttggctcactgcagtctctgcctcctgggttcaggcagttctcctgcctcagcctcctgagtagctgggattatgcctggctaatttttgtatttttagtagagctgcggtttcaccatgttggccaggctggtcttgaactcctgacctcaggtgatccgcccacctcggcctcccaaagtgctaagattacaggcgtgagccaccttgcccccggccaacttgctccactttcatgcaattgtggataaaatgagaggtataattatttgatacataaatgttctagcagtaaattcttataacatgcatttataataagtgttatccttgcttgttttttggctctgttgctcaggctagaatgcagtggcatggttttggctcactgcagcctcaacctctatgctcaagtgatcctcccacctcagccttccaagtagttgggactataggcacgcagtaccactgctggttaatgtttttatttttattttttgtagcgatagagtctcactatgttgcccagactggtcttgaactcctgggctcaaggccttggcctctcaaagtgctgatattacagaataagtattacttataaatcatacttgctttatttttactccatattttgtaagtcttgtatcccatcaactcagtattctaagtccaagatttaaaaagttaatttttacagtatacataaaaaaggttggtgggatcatgctaaatacatatgcagtcagaatgcttgaacctggctttaccactcactgtctgtgtttcctaggagaagtcagtctttcagagattgttttctcatttgcaaaatgggaataatgtctaactcagataaattagccttaagtgcatacatttagcccagagtagatgttcaataaaaaggtaaatgttaatacttgctttctttttttgagttctgtaaatacaaaattgaataattgtctgttttttccataggctcctatggatattccaggtttaaacctgagtcaacaagaatactacccctatgtgtactacaagattgattgcaacttgctggaattcaagtgaaaatgggctcctcccccgacaatcctgtccttgtgtttgtgtgtgctaacagaaataagttgcagtatggtcgtacttttaactctagtatcctttgcttgcttcttacgccctttcctaggtgaattctcccacagtggtctgtatctcaacattttctttttaaaggaaaaaatatatatatatagtttctttttattgatcaggtctgtaaatgtgtactaaaaaaatcagagtttatttataaacaaaatagtttatttaaagagaaggtctcttccttattgatatcatggtatgcattaattccatttgttactattgtgcacaaaagccctgttcacaggggaatggtgtaaacatttatactgttttgttcactgtatttagtagacataactgttgaatagttactgaatcatgatgtaaagaatatgtgaccatcttcaggtatgggatttctgaacgtttcaaatttcaatcaatgagcactgtcaacacccacaggagagaataaaattacctgtgcaaaggtgtattgtggtgtgtgtaacttaagattacagttctgtttgagagttaaatgatgtcatagctcacttgctatgctgcttccaggattttgttatatgctgaggtgtaaccatttgtgttgtctgactttcgtatgatttaattgagccaaatttgggtcagaacacaaatttgaagatgacttttcagtatatgatgggtatttacatttgaacactagaattttaggtctctcaaataattaagaatagagccagttttgaataaagtctagcagaactatgcagctttagtcatttgttttgtctaagtctgtattttatgtgttgtcttcttaagatctataattttggcatttatgtcatttgtgacatagtctgaaaatagagacattgttggcctttaaaatctcagaaatgaatgacttaatttagtgtcctgaaagagcttttaaaagaggattttgtggcaatgtttctcttactacgtactcacaggtttgcaaatgggaaaaaagtttacatttcagtttaggggcatatctaagctatgctattccctttagaaaattagcctccaaaatcttttgtttcaaaatattatattatttcataaataatttcaagcaaatacagacatccacaatgtagaacatgagagaccccctccctcaatttccacctcccaagggaagtttatgtatttttctaggcccttttctatgtctttacatctctgtctcacacacacacacgtatacacacacacagtttatttttaataaaataggattataccacacacatcctgtcacttgcttttttgcttaagagtatatctaagagaatcctttgtgtcagtgaagctggagctacctcattcttt

SEQ ID NO: 11903 - DNA, 6000 bp, Homo sapiens
tcaaaaagtgggtgaaggatatgaacagacacttctcaaaagaagacatttatgcagccaaaaaacacatgaaaaaatgctcaccatcactgaccatcagagaaatgcaaatcaaaaccacaatgagatatcatctcataccagttagaatggcaatcattaaaaagtcaggaaacaacaggtgctggagaggatgtggagaaataggaacacctttacactgttggtgggactgtaaactagttcaaccattgtggaagtcagtgtggcgattcctcagggatctagaactagaaataccatttgacccagccatcccattactgggtcccaaaggactacagatcatgctgctataaagacacatgcacatgtatgtttattgcggcattattcacagtagcaaagacttggaaccaacccaaatgtccaacaatgatagactggattaagaaaatgtggcacatatacaccatggaatactatgcagccataaaaaatgatgagttcatggcctttgtagggacatggatgaaattggaaatcatcattctcagtaaactatcgcaagaacaaaaaaccaaacaccacatattctcactcataggtgggaattgaacaatgagaacacatggacacaggaaggggaacatcacactctggggactgttgtggggagggatagcattaggagatatacctaatgctaaatgatgagttaatgagtgcagcacactagcatggcacatgtatacatatgtaactaacctgcacattgtgcacatgtaccctaaaacttaaagtataataataaaaaaataaaattacatattataaaattcagtatatggaaaggtttaccaatgtgccaattaagatgggtcagttgattttcgcttgggttctgatagtctaacatttctaaagcagctaagcttaacagtgaatatagttaagattgtttaattaaatgttttgatcttgctaaacctaaacttcattatttaaaataaggaacagaaaaatatttttttttaattgcagatgtcttttctctcctcttttaggattttgcctaccattttacagtatttgtcttctattttggagcctttttattggaagcagcagccacatccctgcatgatttgcattgcaatacaaccataaccgggcagccactcctgagtgataaccagtataacataaacgtagcagcctcagtaagtattcatattcaatgagtaccattcaccagcacttccgctccactgtcaaggcctccaagaaactcctcaggcaacaatagttttcttcaatgctagccattggcattaaatatgtaatagctatttatctgtacaataaccttgtaagcaaagtgccatgatcacccccagtgttgtggatgattaaactgtagcacgaagaggttgatgttcatgtaagatcatagcaagccagtaggactgcttggctttgcacagcagtgtctactttgcaaaaagagttgtgttttttgcttctgataactttcagagatggtaaaggagatttccagttttgttctttagtattcaatagctgcttgcaatttatttctattgaatgaatagttactgtgggcctaccatttatcaagtaattttgctgggtgttgaggatggggtgaataagttgcagttcctgccattaaggaaagtgcaggtgagaaagggaggcaaatatgccagccattgcagtagatgataggcagatgaaatatattccttggggtatttattaaattttttaaatcatctttaattcgtatactggagtgaatttgtcattttgtgtagataatttgaggaaataatatattatttttgttgttagagatcattgttaagatgtcagaagtccaaattagtttctgaaatattgtgatatttaatataagtatatggcaagttagtgaccctaatgttttattatgttccccaggtagcctataaataacccagtactcatatagtcattgaaatctgtctggagcagcactgtctagtagaactttctataatgacaggaatatttcatgtaagtgctgtccaaaatggtggccactggcttcatgtggctattgagcagttgaaaattaactaggccaaggaatcatagctcatgcctgtaatcccagcacattggtaggccgaggtgggaggactgcttgaggccaagagtttgagaccagcctggtcaacatagcaaaaccttgtctctgaaaaaggaaaaaaaacagaataaagaattggccaggcctggtggcttgtgcctgtagtgctacctactcaggaggcggaggttgcagtgagcagagcagtctgagcgacagaccaagactctggtcgggggagagaaagataactagtatgactaaggaacttgaatttttagtgttatttaattttaataatcacatgtgcctagtggctatcatgttagataatacatgtctagagtgagttttgaggggtacaagacaaatgatttcaagacctattgtaagtttcccaagtctctggtaggatttgtcaaaatttattgagtgcctgcaatgaattaggctgaaggtgggattacaacaaaaaggagtcatggttttagctttgaaaggtttatagtgtagattcatgactttaacacttgcttataaaagaaataaaggttttatttaatcaattcttacctaaaaccccaataaatctagaagataaaagtgtaagtgctctagttgaagtggaggaagagggccttgaatgatgctcattctcttttcataaagctgcctctacccacccatatcatccctgaggatgatagaatccttgtgatccacattagaaaacccttggttttaacagctttacaaagcaaagttcagggactttcctatgctattagtcatcaattcccattgtatttgcctttatgtgtttcttacttccagtcccttcattttaacggtgcaggctagattcttgtatcttggatcattgaagtagccccaaatctattgacagtcaccctagaacctactttcacaagaatagtagctgctgaaatacgtgatggttgtctgaggtctttaatttgtcacctttgtcctaagggcctagttttccgtgttctccataatgtagttctgttctggctgcttctcttttgtgactttgtccctgttgtccttccctttctaagtgaagctgtctcagtaaacctctacatgcttcaagttcaacattacatcccatttcatccatatgctcactccagtctaagtaaatctctagtttgagttttattgtaactaaaatgtattagccatccatttgggaaattagagaggaaaattccttttccctaataataggtatcaaataataggtatcaaaaaataggtatcaaaagctattgctgtcattcagaaaacaatgtctagattagaaatgtatcagagaaaaaatcagcagaagaagggtggaaagaaaagcagaatagtaaactgtgaaaatggtctataggtgaatctggtattccttcccagaactggtttcctggttaagaatccctgtgctaaacccacaacatttatcaaacatttatcatgttgaactgcttttgctttgtcttttagtcttctatggatcataagccccaaaagggtgaggacattatctactgtttgtttatatgtaccaagtatagtgatatacacacagttggtgctgaagaaattctcattaattccaagtagagtgcagatttgtacacaggactgtctcccatacaagagcaagccaacctgataattcatttccacttgtcttagttgagttttaaagttaccttccatcatcatagaaattatttgatgcatcctcaggttctgatagttgctggcttccttggctgtgaagccactacatgaacagaacttcatgctgaatttttaaatacagtgcttagggattcacaaatacttaagtgagcccagaatgtgaacagattgaacaaatgttcagtgtaaagttgtccacaaatgagaaaattattaggagctaaaatgtttaaaggaaggggggagggtaattgtatgagggaataaaacagttgtacaaatcatcaaaaaaaaaaaaacaatgtaaaatatttttgtaagtgtcgaagtatctttaggtagattgttggtcaaacttcatatggttgttctttaggacactgtttataagtcggtgttgtaaatctgatgtgaatttttgtttcttttttcttagatttttgcctttatgacgacagcttgttatggttgcagtttgggtctggctttacgaagatggcgaccgtaacactccttagaaactggcagtcgtatgttagtttcacttgtctactttatatgtctgatcaatttggataccattttgtccagatgcaaaaacattccaaaagtaatgtgtttagtagagagagactctaagctcaagttctggtttatttcatggatggaatgttaattttattatgatattaaagaaatggccttttattttacatctctcccctttttccctttccccctttattttcctccttttctttctgaaagtttccttttatgtccataaaatacaaatatattgttcataaaaaattagtatcccttttgtttggttgctgagtcacctgaaccttaattttaattggtaattacagcccctaaaaaaaacacatttcaaataggcttcccactaaactctatattttagtgtaaaccaggaattggcacactttttttagaatgggccagatggtaaatatttatgcttcacggtccatacagtctctgtcacaactattcagttctgctagtatagcgtgaaagcagctatacacaatacagaaatgaatgagtgtggttatgttctaataaaacttatttataaaaacaaggggaggctgggtttagcctgtgggccatagtttgtcaaccactggtgtaaaaccttagttatatatgatctgcattttcttgaactgatcattgaaaacttataaacctaacagaaaagccacataatatttagtgtcattatgcaataatcacattgcctttgtgttaatagtcaaatacttacctttggagaatacttacctttggaggaatgtataaaatttctcaggcagagtcctggatataggaaaaagtaatttatgaagtaaacttcagttgcttaatcaaactaatgatagtctaacaactgagcaagatcctcatctgagagtgcttaaaatgggatccccagagaccattaaccaatactggaactggtatctagctactgatgtcttactttgagtttatttatgcttcagaatacagttgtttgccctgtgcatgaatatacccatatttgtgtgtggatatgtgaagcttttccaaatagagctctcagaagaattaagtttttacttctaattattttgcattactttgagttaaatttgaatagagtattaaatataaagttgtagattcttatgtgtttttgtattagcccagacatctgtaatgtttttgcactggtgacagacaaaatctgttttaaaatcatatccagcacaaaaactatttctggctgaatagcacagaaaagtattttaacctacctgtagagatcctcgtcatggaaaggtgccaaactgttttgaatggaaggacaagtaagagtgaggccacagttcccaccacacgagggcttttgtattgttctactttttcagccctttactttctggctgaagcatccccttggagtgccatgtataagttgggctattagagttcatggaacatagaacaaccatgaatgagtggcatgatccgtgcttaatgatcaagtgttacttatctaataatcctctagaaagaaccctgttagatcttggtttgtgata

SEQ ID NO: 11904 - DNA, 6000 bp, Homo sapiens
tttccaaaagagggtaagggtatgaatagactttacacataaaagagtgaaacactttgttatgtaacatgtatagtaagtttttattttttcttttgtttttatttgcctgtttttggtaatccaaattgaaaaggcctgaactctttcatgagttgagttcatatatagtttcaaagttcctgaattgatttggatacctgcctctttttggctaccttgaaaactctagtgaactctcttaatcactggagaattggactgagatctctgagttgtgatttcagtaaattctgttctcaaaattttttataaagcagcatttatatacagtcttgattacttgtgcaagtcacttccaaatcctaatgagaaactgtctctggacttttatattttcttagacctacagtttaaataccaagaaaggctttcatgtctaatgtaaaaatgcagtgaaactttgatattattctgcaaaggccatgagaaagatgattactttggagacttgttacttaggatattggtttttaaaatgagagcagattcttcccaaattccataggtaggaacgtgactataaaaggaaaatctatgaaccccatatacctacaaactttgggtaggaattaaaacaaacatatactattcttgaaatgttaactcactattacatcttggggggtgtgattttaatcaggatagagtattgtcagattgttacttgctgggatacatccaaattttgaggttgtagtcttactacattatttgtctatctgatgccttcccctttttttctttgatacatttgcataaagcaaaatggcactttttcactagaaatgtttctaaaacccaaataatttcttcatttgtgtgtagtaaaaacaagcttcaggaaaaaagttattagaattttaaaaattagttataaaattatggcaaagctcatgaatagttactgaagattaatttactactttgtgaatagcaagttgacaaaaataatttacagttcctgcttgactttctcccctctaagtggcataaagtagaactagagttattttgttttggttttgacccaacttagaagatttgttttaaagtttctgaagttttgtctcaggaaaataaggtggttttccatgtagagaatgtaagattacatatggcatctggtaggctgaattaattccattttcttgttaccttccatggaagaagtttctaataaaaaaatcttttcagggccgagcgcagtggctcacgcctataatcgcagtagtttgggaggccgaagcgggtggatcacctgaggtcaggagtttgagaccagcctgaccaacgtggaaaaaccctgtctctactgaaaatgcaaaattagctgggagtggtggtacatacctgtaatcccagcttcttgggaggctgaagcagaagaatcgcttgaacctgggaggcagaggttgcagtgagccaagatcacgccattgcactccagcctgggcaacaggagcgaaactccattaaaaaaaatataaaaaaaaatatatatatatataatatatatatattatttaaatatatatatatttaaaaatatatatattaaaaatatatatatatatttaaatatatatatatttaaaaatatatctattaaaaatatatatatattatttaaatatatatatatttaaaaatatatatattaaaaatatatatatttaaaagagcctgttctgagctcacaactctttgggggattattagtggcccattttcttggggaatcaggtggtttgtatttagaggtttatatgtcttctactttattgtgtccttttgttttccttttcacagatgacttgacattttggcacagaatacattttaaatccctggacagagtcatcacttaaatgaactagcccttgcttatatgtgcagtggattgtgaaatgcgtctactgtaataatatgcaatgtcttgattacctgctgaaataaggtggatagatggatttttattttatttaatatttatttatttatgtattttgagacagggtctcactgtcacccaggctggcatgcagtggtgcgatctcagctaactgcaatgcctcccgggttcaagcgattctcccacctcaaccccctgagtagctgggagtacaggcacgtgctaccaccctggcatatttttatatttttggtagagacagggtttcaccatgttgacatggtcttgaactcctggcctcaagtgatccacccgcctcagcctcccaaagtgctgggattaccattgtgagccaccacacccagccaagatggatttttaatttggagtttgtcactttttctgtactccagggtatggtttctcattgtctgaaacatagattttatttttcaagcaggctatattttgtggttgcctttaaaaacatccagatgtgacagacatttcctaatgaatactaattgtacttattttgtacaaaatattgtagaatccatagatggacagggtaggatctttgctttctgttatagatacatgtgtaatagggtagattatacttagataactgcagactacaatatcaggtgatatatgagtgttaaatgtttcactaagttctgcaggtatgctgaaagaacagtttctatcaaagaaagtaggtttctaggataggtaggatttgaatagtcagggattgggaggttggggacatcattccaagcaaaaagaatgtaaacactgctgtagctatagtggagaaaggaatgtgtttggggaatccaagtctggagcactgatgtgtgtgtgttaggaggaatattactgtaaagcaaattgggttcttgaatgccaggagcaagaatgtagattttagttgatagtaatttcagagccgctgaagtattttgagcagggaatgaagaaaggcaatttggtgatggcttgtaaatggatttggacaagatgagggttttttgagacagactgattgattggtgtcacagaaaagggagatagaggtgttagaagaatttggcaactaattggcaaagtttgagcatgtggggctgggttgggagtatctctaaaagaacaataatggtaccttcaactgaaatagcaaatcacaaggaaaagctgattctagtttaaggcaagtcgagtttcagaactttggagatttgcagttgtaggagtgaaagtaggtgagtattcagatgtcattcccattgttgaaaccttggataataatgtgtttattgtaatcctacttaaaatatgcatttctgtcagagtacaaagaaagatggtgtctatggagtgggggaaggagaattaccattttctaaaaacatgtcttggttttctgagtgttacttttgtaatgtgaagaacaataaaaagagttgactattttaagaaacagattcagcattatacaggaaaaagggaacttggaagatgtttctaagtccgaaggaaactaggaggaaaaaaaatggaattttggaccctttggagaatgctcagagttaaggagtaggaaataagagctggcatgagttcacagtttgaagaaaaggaggaattaagtggaagtataaaacttgaacttgatttcctaaagaatcctttaaaaaaaaatctaaaacttggctgggtgcggtggctcacgcctgtaatcccagcactttgggaggcaaggcgggcggatcacttgacgtcaggagttagagaccagtctggccaacatggtgaaaccccgtctctactaaaaatacaaaaattagctgggcatggtggcaggtgcctgtaatcccagttacttgggaggctggggcaggagaattgcttgagcctgggaggcagaatttgcagtgagctgagattgcaccagtgcactccatcctgggcaacagagtgagactcttgtctcagtcagtcaataataaatgaatctaaaacttaataggaataaatgttttccatttgggttatttttaacccaatttttaaaattaattttaatgattatgaaatgataaaagacatattcttttgagttttaaaacttgttaaaatgtatgtaccactacaaattcatcttgaaaataatttagtaatttggtgccttggacagctacagtgttacttgaaatactttggaaattagaaagtaaggaatgaaattttaaagaataatttagtatgtttggtctgttctcctgaactctgactttacaaaacctttattaccctttaagccttagttgtcttgaggcttaatgttcataactgaaaatattcatatttcctaattaaaggaagaatatcataactcttagtggggaaacattcttacaaatacttcattcaaatgactttttctttctttcttttaggtgtatttgcatccagtattgttctgatcttgtcacaacgatcacttttcaagttttacacgtacagctcagcctttctgttagctgcaacttcagtgttggtgaattattatgcttctttgcacattgacttctatggtgcctacaacacgtcagcttttggaattgagctgcttcctcgaaaaggtccctcgctgtggatggcacttatcgttctacagctaacatttggaattggatacgttacactactccagattcattccatctattcacaattaattattttggatctcttggttcctgtaataggcttaatcacagagctaccattacacatcagagagactttactgtttacttcttccttgattctcacattaaatacagtgtttgtcctggcagtgaaactgaagtggttttattattccacacgatatgtttatcttttggtgaggcacatgtatcgaatttacggattacagttattgatggaggacacatggaagaggattcgtttcccagacatactacgagtcttttggctaacaagagttacagctcaggctacagtgttaatgtacatcttaaggatggcaaatgaaactgattccttctttatttcttgggatgatttttgggacctcatttgcaatcttataattagtgggtgcgattctacactaactgtactgggcatgagtgctgtaatttcctcagtagcccattatttggggcttggaatattggcctttattggatcaactgaggaagatgacaggcgtcttggctttgttgcacctgttttattttttattttggctcttcagactgggttaagtgggctaagaccagaagagagacttattcgcttaagtagaaacatgtgccttttattaactgcagtcctgcattttatccatggaatgacagaccctgtattaatgtctctcagtgcctctcatgtgtcatcttttcgtagacattttcctgtgctgtttgtctctgcttgcctgtttattcttcctgtcttactcagttatgttctttggcatcactatgcactaaatacatggttgtttgcagttacagcattttgtgtggaactgtgcttaaaagtaattgtttctctcactgtttatacgttattcatgattgatggctactataatgtcctctgggaaaagcttgacgattatgtctactacgttcgttcaacaggcagtattattgaatttatatttggagttgtaatgtttggaaatggggcttacactatgatgtttgagtcgggaagtaaaattcgggcttttatgatgtgcctacatgcatattttaacatctacttacaagccaaaaatggctggaagacatttatgaatcgtaggactgctgtgaagaaaattaattcacttcctgaaataaaagggagccgcttacaagaaataaatgatgtatgtgcaatctgctatcatgagtttacaacatctgctcgtattacaccgtgtaatcattatttccatgcactttgccttcggaaatggctgtacattcaag

SEQ ID NO: 11905 - DNA, 6000 bp, Homo sapiens
cacccttgccgctccaccctgctctgagggccctgggtggccagggcgggcacagagtgggtggtgatgccagctgcatccctggggttcatagtctggggagcacatgagttcccggcacaatgctcccaggaggcagagccaggagtcgcagggaggcgtttgcttgagagggtctgggagggcttcctggaagagggggcatcagtgccgagcctcagagtttgtggagcccgccgcctggctgaatcctgcctgccggtgttacctcagggtgttcctcgttgcagtgcctcagtttcctcaccagtacgctaggagagaccagcgtagccagccacagcggggtcgtgaggattaagtgaggggacagcagtgtctggcacggtgggtgctgagtaaattcatggaggagtgcccgggcggtggggctggtgggctgggcagggggtctgaactggagggactcgggcgccctcctcctcagggtgcaggacagcacctgcacggcggggccgcatttccatttccaaagctgggcgcgctctgtccaggcctccccaccaggagcgcggcccggcggctcctgccctccggacccccagcccacaggcccgtgcagccccatgagggggccagggggagctccgaggttctagggagggcgcgcaccgggagagggcgccgggccggccggcgggaggaaggaggggtcccgggcggcagcgcccccggccctcgccgcgccccgcacttccctttcctggctgggcttcctcttccccgcgcccgccctgcgcggcccctttgtttcccgggcagggcgcggctatatttaggcggcaggtgtgggagcccccggcagccgggtcgcccgccggtcacgccccccacgtgacgcccgggcgctataaatagccgcaggcggcggtggcggcagcgcctggagccggctccgcggcggaggggcggcgccccgacccagggccagcaccgtgggcaccgccaggccggcgcgtatggaggcggtgggacgcctgcggcgcgggtgagcctggcaggtggggacgcggcggacccaggccttccgggaccccagccccgccggggaggaggtggcgccctccggagggctgggcgggagccccgctggcacccagggagggggccgcgccccttaccacgaccccacccgcgactggttccccgggactccccagagcgcccgcctcagccctgaccgcggcgcagcttacttctcctgagacccgctgagccccgggcctccagcctcctcccccaaaatcacagggggcgccctgtctgaagcgggggctggattcaaacttcttaagctgctgtgccatcgggaaggagggcggtagcctccctgaacctcgatttcctcttctgtgcagggcgctgcgtgttgttcctgcctcctagatttgagccagagagaacccagttaactggacgcctggtgtggccctggtggagaatgttctcccctctccctggcttgtttcctcatctcgcaaacagggacaaggatggactctcccttaaagggtcttgagaaatagctgagggctctgggcctgctggcccgaggaggctgagccagatcttgggaagggttctgcagggcttggtagcaggagggaaggaggtagcaggagggaaagaggggccacggctgccagtgggtccccgtgctgtgggccgcgggcctggtgggggtggtagcgactcaggacacatggaggcaggggcaacctgtccccatttcgcagatgggaagcctgaggctttggcttcagggagttctcagtgcccatccctggggatccttaacccttgctctcagggccctacctggtgacctcactgggggcgtgtggttatggaggggttttctcccttgggggacagccaccaggcagggcagagccacatagtggtgccagggcatcattgctttgctctcacctggggcaggggtaggggccctaggctgcagagacaagtgggatgtgtggcaagaccctggtccagcctctccctggacccctaaccccattctagcctgggctgtgacccctgagcgtagcccaggctaaccccctgattccggcagatgtgtggcatccttaggccttcagtggggggtagtgtggggtggttcggagcctcctccctcccagtagcctgcagccctgaggacctgtgcagggccactaggcagcaggtccaggccacgtgctggtgcctgtggggtcttcctgggtccctggcagctgtaggtgtgaggggttggtcagcccctcagggagaggcccaatactgtggtttctctggtgcttttcttcctttctttctgtaaacatgagctcggctcccgtgtgcacacacacagggacatcctgctgccccaagagggacccaggtgtttgtgtgctgttagcacgtggtggcttccctcacccacactcagagcctgtgctccctccagtcgggcaaggtggggactggcgggaccagggacagtatccttgtctccacctttacctccttctgggggtcccaccccaccaccggtttttttttttttttttgagacggagttttgctcttgttgcccaggctagagggcaatggagcgatctcggctcactgcaacctctgcctccagggttcaagcgattctcctgcctcagcctcccgagtagctgggattacaggcatgcacttccatgcctggctcattttttatttttttatttttagtagagatggggtttctccatgttggtcaggctggtcttgaactcctgacctcaggtgatccgcccgccttggcctcccaaaatgctgggattacaggagtgagccactgcgcctgacacccaccgcccattttaaccttcccagaaccatgcagtggacagagcctgaggtgtggcggctgctctgagcccatgagcactggctgccacccagggtgtggagggcaggcagggaggagcccactgtcccaggtagccaccctctgagtccaggggcccaggcctcaagccctacctgcacctgggctgaagctccaagggcccagcctgcctggtgggcagctgggaagggggtgctggggctggggcaggggcacaggtgagagggggtgggttggggaatggagggctctgctgggcgaggggccctgaagtgcctttccttgggtagcaggcagtagtgacagggccgggcttgggttgagtctagggggctggagagtctgctaacagctgggtcacagccagggccagcagtgcggggacccctcagcagcagtgcccaaatacagcttgggtcacttgtgtcacccctcatcgtgctcatggggtaacaaagaggccggcaccttgctcaaggcctcccagcccttccgtagagagggaagggggctgcgtgctcctggaacccctttgcctgggagctttggggtcatgagacccagaaagggagagaggcaggcgtggaggtgccttgggttgctgtggccccccctgccgcctcccctcttcagggccctgtcatggtgtgaacccactcctggccacctgtgctgtcaccaccttggcatgtgtgcctgatggctggcccattggcgtgttctgtccccgcctccctgagctcctggaggggcagagctggcctgtttatccccgagcctggctgagacctgtgtgagcagtggagacacagtggcggggggacactggtggacagggggctgctgacaggcaggagactttctgcagaaagcaagaggcgattagggtggcccacggccgcgtgtggggccaggcccctcacctccctgtgctggcagcactgaccgagtgcctgggccccattccctgaggatgggccacccagagacacctgggctcagatgttcacagtggctgagaatcggaagaggagagggcagctgtcctggggtggagtttccgcagatcacagcaggtgggcaggggccaggctcaggcttcttaggaactcggcctctgtccccacagagggatctgtcatctgtgtgctggggttcatcatgtcctcgggggtgtgtgtgtccctgaaatccctgtcccctctgtcctccgtcatgccctgctggctgtgtggtggctaccctgtcgcctctgggccctgggtcagtcctggcaggagccgtgcttccttgtgctcccatataaggaaatagacccaaaagggtcattctctcagcatggtcaggaggagggctctgggagaggtgtcgcctgtgactgtgggctcatgacaggcatgaaccccttgtgggaggcggggccccctgtgatccctttctattcatttccttcgtctttccccacagatgctgtgtgctgtggacccacctggggttcatggagtgggccacggggcccagccctaagcactgctgcgcccagggtcgccgcgcctcctgctgaggggtccccgtgccactggctctcaccattgccctcgcctgccgatggcctctgctgcccagcctggggccagctctaccgcctgagccccctgccccactccaggactcaccgtaccccgatggggtaacgtgacacaggccccacacgtcagaggccgctgtccccacggccactgcccgtgacccctggcccaaggcagctggagttggttcagttcaagttcattcttcctctggcccttgggggcttggggcccacctctgagtgaagggggctgtctgcccatccaccaatgtggagagggcgcccccggtgtggggtccagctctggacactgcttggcggccgggttcactttgagtttttaagttttctttgctgagcttttttggttgttctttttattttttgcctctttatgactatccagctctgagagacgggagtttggagttgcccgctttactttggttgggttggggggggcggcgggctgttttgttccttttcttttttaagagttgggttttcttttttaattatccaaacagtgggcagcttcctcccccacacccaagtatttgcacaatatttgtgcggggtatgggggtgggtttttaaatctcgtttctcttggacaagcacagggatctcgttctcctcattttttgggggtgtgtggggacttctcaggtcgtgtccccagccttctctgcagtcccttctgccctgccgggcccgtcgggaggcgccatggctcggatgaaccgcccggccccggtggaggtgagctacaaacacatgcgcttcctcatcacccacaaccccaccaacgccacgctcagcaccttcattgaggtgagtggagacggaggtgtggcaggcaggtggcccaggtgtctgggaagcccggctgagctgccctcaggcctcgcaagaggggtccccagccccggctggccagacagggctcacagccttggaacaaagcccagtcgcctgttacaggatcctggaggagggagatgggggtgccccgggggttggggttgagggtgttgggggatcaacggggtcccctgggaggcctgcagggggctggcgtgtgataggagggactccacgctgtgtggatagaggcagggggtgaggcagggggatacatggaccaggctgtgcgtgctcagccgtggcctgggctggggccctcccgagccctttgctgtcccagatgttgctgggctctggatgaggcctcaggttagaccaggctggactaggggcttcagggcccagatctctgtgtgaggagggactgagcaagggtcagcgctgaccacaggagggagggaccactgtgccctggagaggcagcagagatacctgccgctggcaaccctggcagatgggacgagatgcgtttacagaagctttcttgggagtggagtctggagcgacctgcatggcctcctggaggagcctg

SEQ ID NO: 11906 - DNA, 6000 bp, Homo sapiens
aggactccatggcccttgttacagttgtgggtagaaatggaatctctgtgacatctcctgctcccctttcacctgccccaaggcaggtctccagtactccctctcctttctgatcatgggcccaaagaggctcattcagagaggatcagtcccatgccctgggggcaggaatgctgagcacatagaggtttcctggaggggccacgtgggcggcatggaagctccccaccccttccgggagacggcgccctgtgcctctcgcgtgtatccatttataattaactgcaaatgtgtttccctgagttccctgagccactcttgcaaatcaattgaacgcaaaaccgggaggggctgcagtattgctgggaaagagggtcctgatccagaccccaagagcaggttcttggatgttgtgcaggaagtaatttggggtgagccacagagcacagtgagagaagcaggtttatttgaaatggctccgttccagagtggggcgtgctcagaaagcaggaggaggagggcctgtcctctgttagtgcctctgcttacaagaaactgtaaggagctacaattacacctggaatgggcagatgcacccactaaggataggggctgtgggtgccatcagtgcccgttcatcctccaacctcaggctgctcattgaaattatctctgagtaaagtggcctgcactcttgggttatctggacagtctgcgggcttgctgggagatgccccatatggccacaaatattctgtaattataattggtgtccagcttgagacatggctatttttagaccataagcattaaccttataggtgccttgtgagtgcctcctactcacttcaagatggagtcactctggtcatgtttcattaaaccagaggcctggtgagcaagcgttcctctaacagtgggaacctcaacgtcgggccagtcggtaagaagttccagaggctggccctcgcagctcatgtgtgtgcatatgtgtgtgtgtgtgtgtgtgtgtgtgtgtgtgtaggtgtctggatctgacgctatctgcaggtaccggaatggtgttggaggacactcggctggtgtccgctgcagaactgatggcttgctcggtggcggggagacgtccacctgccacatttggccccagcagtcttgggagtctcctgtgttgatgtcttctgtgttgagtgagagacaggataaatggtttgagagttttttccaaacagccctcctcctaatgcagcttgttttctgaatcagagggtcctgtcttgaagggggcaaacccacccgtgctttcgtcccacagttcttactgagcccctgccatggcagggatggccccaggtgccggctgcagagacagaaccccctgccctcaccgccaacattccagaggggaagatgccctgcctgtgccccacgtaagacccagaggcagggactcccccgggccacagcctactggaggctcctgtccccagagacagctgggccatcgcccccaaagctgtggaagccccacccacgatgccatcataccacggccaggacatctcgtgacacacacagccccagcctcagcctccatacacacacacacacgcaccacacacactcactcatgcaaaacacacacacagccacattgactgcacccctagatttgagacaggggtgttacaggtgtctgtcagccccagccccctcctgaccacatggccacctgcccaccctcacatttccgcacaccctccccctactcccgtgtggggttcagaagacccctccctggtgctcgccctgtcacccagaaaggaaacgcactgtcaactggagaacaggccggtggcagagccccagcgcccacagcccctcggagagggcctggcgggaggagaggcacccaccgatggcagagcctcagtgccctcgcagaagccagcacccacaacctcccacctcccaacccttgccggtctccccacccccgcctgagggatggccaaggaacagcccagcctggagcgggaagcagggacaagatgacctcaggaatcccaggctgcgggggtgcctgcgtcctcccctcccgagctccactccgcaggcgagacccccaacactgctccccgacactctccgaggcacccctcctccgtgctcacacccaaacacgtctgctcacccgtgggcttcccaccccgaacacaacgaggactgtccaggtgtcagtgacggtcaccccgacctggtcccctgtccggcctcgccaggtcagcacccgccgcgcgcacagcagggccgggtggaaggaggccgggcctggccgtggctcaggcgccacctcactggggaaactgggaggtggtctcagcccccttctgggcctcagcttccccatctatcccaaggagccggggtaggcctgggcggcgcggggacccccaccgcgggctcgccgactccgcccgccggaggcccctcccgcgtcccgcccctgcccccgccccggggccgcgcggctgcctgggaggctccgggccagccgcggtccagagcgcgcgaggttcggggagctcggccaggctgctggtacctgcgtccgcccggcggtgagtccgcgggcccccggccgggacgcccccgccacctgcgcgcacgcgctcagacccggcggcctcggctgcggtgcacgcggccccggctcagccacgcgcggcggaaggcgccctgcgggggccggggcgggagagggtgggagagagcaagaggggcgcacggggaggcgcaggagaggggctggggctgccggtgggttggtccccagagagctgagcttctcctcccatcccccgcaggcctccccgaatgtttccaaagatctggggcgggagcgggcggagactgccgccaggagcctcccggccgccccagggctgcgcagccactggagcccatcacccaactccagacgctcctggctcctctacgtgggccgggagggacagccttgaggactaggggagggggcacgggaccttgcagagctcctggccggaaagggaggattgaccgcccccggcatatcaccccggagcactggaacccgcccccgcttcttgttttggcactggtggtgcttgcggtgaggtccaaggagcccagcctccctgagtggaccgccgggcccctccccgttccgggacacaggagaggctcccgccccttgctggctgggcagcccctagatacctggctcccaggggccagcttccctgagcctggggatgagccatgagcctgcagcctgggccccaggggcgccccccacggcctgccggctggctccctccgggctccatggcccacccggccttcctaattgccttcggctcccaccggtgccttagctcagcctggtggcccagcgggttgggtgccacccagtgagcaggtggcggcaccagctggacctgtttgtggccctgtatgctaggacttcctcagagacagctcagggacccccccacaccagaacctcactttaggggggtggggggaaaaggaattggagatccttcctcctcgggctactccctggaggcggggataggccccagccggacttggcactgtttttggccacctggggctcccactcccaaccccaggatgtcagcccaggtctcactgtcctggcctgctgctctccccttagggcctctgcgggcccctctccagatctgttctctgaggcatcctccttacccccagtgcccagcactagctccccaggcccgggatgtccctcccactcctctgcccacggctgtccctgacagaaggcagcagcctccccctccaacaccatgcactcacaaaacagagaatcacgaccccagctgggtgtgttccagattctttctccagcagtgcagagggtcctgtgcagaggccgaggagcagtacagcgacccatctggccctttcctgctggtgggaccagtggcacgcagccttgtctctcggagcccatttcccagccacagaatggggagtagcagatactgagtggggtgctttcctcggaactgagtaacatcaggaatggggagtgctttccccctcagccatgccccacctggccccaggtctccatgtgaggggagctgcctgggctcaaaacactgagccatcccaaggaaaattctagatacagattagctaatatacactgacagatacacatatagatgtgtatatagatttctcttttttttgagacagggtctcactctgttgcccaggctgcagtgcagtggcatgatcatagttcacttcagtcttgaactccctggctcaagagatcctcccacctcagcctcccaagtagctgaccacaggcacgtaccacgcccggctaatttttgtattttttgtagaaacaggaggtctcactgtgttgcccagggtggtctcaaacccctggcctcatatgatcctcctgccttggcctcacatagcatggagattacaggcgtgagcccctgtacccagccccagactagctaatattatgactgatcaccattccccattccccattcccccaccccaggaccactggcagaggccactcactctgccttcttttctgtggttctgagaaggctgctgagtttcctcctcttgcctgtgcagccccctcctgccaggtttcaggagggagatagcctagagcatgtctgcactgagtgaggagtgggtcaggagagaagcagggaagtccttgtgtgctggcaggtcccttcccctctgctgtctgtgtcctcatctgcaaagtgggggtgcatggtcttggggaggagtgaggcaccacccggccccctaaccagtgtgtctctccagagcaggacaggctgctttggtttgtgacctccaggcaggacggccatcctctccagaatgaagatcttcttgccagtgctgctggctgcccttctgggtgtggagcgaggtgaggtgcccttggggaccccagacctttgtccagctgtgccctgctccactccctctccacccctctcccctgagcagacgccccaggggtccttccaggccgctcccagcagagggctcacccggcctggccacactgtctcactgtgtgtttgagtgtcgcttgacctgctcgacggccagggtggggtgtcactgtctttgctctgccttcagcccagggcctggtatacagtaatttctcagtaaatgtccactggggtcaggcctgggagggacactggaggcttccctgagacaggtgtgtcctccttccgcagccagctcgctgatgtgcttctcctgcttgaaccagaagagcaatctgtactgcctgaagccgaccatctgctccgaccaggacaactactgcgtgactgtgtctgctagtgccggcattggtgagtgccaggcctcagaccgtgccttcctcccctggccatctccctagcccgggccggggctcagcagaggccattgctgtctgtctgcagccgtctgtctctcccctgacagcctcatttcccatgcagggaatctcgtgacatttggccacagcctgagcaagacctgttccccggcctgccccatcccagaaggcgtcaatgttggtgtggcttccatgggcatcagctgctgccagagctttctgtgcaatttcagtgcggccgatggcgggctgcgggcaagcgtcaccctgctgggtgccgggctgctgctgagcctgctgccggccctgctgcggtttggcccctgaccgcccagaccctgtcccccgatcccccagctcaggaaggaaagcccagccctttctggatcccacagtgtatgggagcccctgactcctcacgtgcctgatctgtgcccttggtcccaggtcaggcccaccccctgcacctccacctgccccagcccctgcctctgccccaagtg

SEQ ID NO: 11907 - DNA, 6000 bp, Homo sapiens
tccaaatcaggttgagggttcccggggaggtgaggacttagggttttgtagagtagggaaatgatttgggatcttatttcatatgtaatgtgaaacctttgtaaggtagttaggatttgagtgtgtaggtgagacagaagcagcgttgatgtttgtaaacttgggttggcagggaatggggcaaggatggacacaaggaagccaattaaaaggtgccagagggcgacacatgcaagacagagagcgcaaaacagggggctttgttttggaggtaacgcagttgccccttgctgaggcattgaaagtggagggagaggcagacccacagaggacagtggagtgtgagctggaaggagtgggcctggctcatgtgtctgtcctcttccagatccggggctcccgggctcgagccctgccggacagggccctagtgaactgtcaatatagttcagcgaccttcagcacaggtgagcgcaagcgacggccacatggggaccgtaagtcctgtgagatgggcctgcagctccgccagactttcgaagcagccatcctcacacagctgcacccacgctcccagattgatatctatgtgcaggtgagccagctgcagccgtcaatccagggagggaagggtgtgatggggttggggagggagtctgatagactgacaccctgggttccctgcaggtgctacaggcagatggtgggacctatgcagcttgtgtgaatgcagccacgctggcagtgctggatgccgggatacccatgagagactttgtgtgtgcgtgctcagctggcttcgtggacggcacagccctggcggacctcagccatgtggaggaagcagctggtggcccccagctggccctggccctgctgccagcctcaggacagattgcgctgcttgagatggatgcccggctgcacgaggaccacctggagcgggtgttggaggctgctgcccaggctgcccgagatgtgcacaccctcttagatcgagtggtccggcagcatgtgcgtgaggcctctatcttgctgggggactgaccacccagccacccatgtccagaataaaaccctcctctgcccacacacccctcactgtacgttatcacctaacagcacttcagagccatgtgaaggctggcagagcctggtctggtgctggctcctggggatgattagggaccctcgcccacacatgaacggcctatctctgtgtagcctgattcaaaccctgaagagaacagtggattagggggtttctgtaggggaggccctgggtggaaaaagcagcatgtcccagtaaggactcaaggcagctgagcaggaggcagggcctggcaagatgagccaggccattagactgaggaatctgttacccttattccagcacatcgggggccctgagcaaagggctgaggaagaactcagctggctctgggtacccaccctagggatgtgggggccatgtcccacaacctctggactatggtttggagccccctgggcttttcctgctgcttaccttgggctctgaaagtacaacagccaggcatggtggctcacgcctgtaatcccagagctttgggaggctgaggcaggcggattgcttcaggtcaggagtttgagaccagcctggccaacatggcgaaaccccgtctctactaaaaatacaaaattagctgggagtggtggcacatgcctgtaatccaagctactcaggaggctgagacaggagaatctcttgaacctgggaggcggaggttgcagtgagccgagattgtgccactgcactccagcctgggcgacagagcaagactccatctaaaaaaaaataaaagtacaaaaattacctgttctcatggatcacttgaggtcaggagttcgagaccagcctggccaatgtggtaaaaccccatctctattaaagacacaaaaattagtgtggtggcaggcacctgtaatcccagctactagggaggctggggcaggagaatcacttgaaccaggagttgaaggttgcagtgagccaagattacaccactgcactccagcctgggtgacagagcaagactctgtctcaaaaaaaaaacaaaaaaaaacttgttctcacatggagtcttcagctttgacccttctctctgcccaccactattttgtttgttgagacatggtcttgctctgtgctcaggctggagtgcagtggtgtgatcacggctcactgcagtctggatctcccaggctcaagtgatcctcccactttagcctcctgagctgagactacaggcatgccccactcacctggctaatttaaaaggaatttttttgtgtgtacagactgggtctcatttcgttgtccaggctgatctcaaaggatccacccacctcaccttcccaaagtgcaccctcttgagcaaactcccccttcattcacctctggcccaccgagccccgactaccagtccctgcagtctggaccctgggactgcttctcccctaatattccacggatctcctggcccggacagtgacagtatgatcccccactttataatgcacacaccccagctccagtgaagcccgttttggccagtagtgccatcagcatcttctctgcagtcatctgactctgaaaacctcggtgctgggctcacgctgtgactccactgggacgtcctgagtcattggcagtctcgcttggcatccattctctgaccgccgccggctttccacccacctgcccggctcatcacctctgactcctgcgggccttccagccggcgctatctcgcagcccccgaccagctcggcctgctgtcgggcatctctgctgtcctccggctgtagggctacctgcctccctcccggggggtgcactgcgagtccgactctagtgggggcagcgcctagcggactcccaaacccgctcaggtcctgccggcctcaccggcaccgcccaccctccagccggccgcggctctgcgcttgcgcgccggcagcacacagtgttaggggcgcgccctctgctctggacatgcgcgccgtcgcgagcgtctctgggaccggaagtgcgggcgagcgcgggtccccgggtctgacaggagcagcctgtgggcaccgcggcggtagttggaggcgggagagggtccgtagccgcgccgccctgccccgccatgggcctcctgtcggacccggttcgccggcgcgcgctcgcccgcctagtgctgcgcctcaacgcgccgttgtggtgaggacagggcccggggaggcggggacccgagggccctgggctcgcgccggcggccccatgcgcggtccccatcgagggccggggccgctccagctgctcgcgcccctccggctgctcgcgcccttccgctcctgccctctggaagcactgagggtatcaggcccaggcttagggctcgggtccggcgtcccgatgcaggactccgggtttaggtctcccagacccgcgcgatcgaccccgggtgcggaggttgtggcctcgggtcggcgtctgaggacccgctgacgctccggtgcccctccgtcctctctcacagcgtgctgagctacgtggcgggcatcgcctggttcttggcgctggttttcccgccgctgacccagcgcacttacatgtcggagaacgccatgggctccaccatggtggaggagcagtttgcgggcggagaccgtgcccgggcttttgcccgggacttcgccgcccaccgcaagaagtcggggtgagcggcagagcagggcgtatggggcgagcagtggtggctaaggccggggagctctgctcagaggctcccttcgtgtctgcagggctctgccagtggcctggcttgaacggacgatgcggtcagtagggctggaggtctacacgcagagtttctcccggaaactgcccttcccagatgagacccacgagcgctatgtactgggggagtggggtgtgcctgggcccagaaagcaccttggagggaggggtctgggctgggtatcaccttgcgggggtgtcatggggccaggaagctcagtgggagggaaatccctggtgggcactggagggctaggaaagttgtggggggcccttcagccccctaccacaaagttacactgaggctccccccaccgatgctgcatacagatggtgtcgggcaccaacgtgtacggcatcctgcgggccccgcgtgctgccagcaccgagtcgcttgtgctcaccgtgccctgtggctctgactctaccaacagccaggctgtggggctgctgctggcactggctgcccacttccggggtgagtctcagggctgctggccgtggaggggtttggtcagtgccccagaccctgctgatcctgcttctggcctccagggcagatttattgggccaaagatatcgtcttcctggtaacagaacatgaccttctgggcactgaggcttggcttgaagcctaccacgatgtcaatgtcactggtaggttctcttgtcctgcctgccctggtccccctctcagggtcactgtcctcaccacgtcctccattagcactcattcacttgctcctacaggcatgcagtcgtctcccctgcagggccgagctggggccattcaggcagccgtggccctggagctgagcagtgatgtggtcaccagcctcgatgtggccgtggaggggcttaacgggcagctgcccaaccttgacctgctcaatctcttccagaccttctgccagaaagggggcctgttgtgcacgcttcagggcaaggtggggctgcctgcctgcctgagggctgaagggcacagggtctgtgggaggggctgtctcatcctgtcctgcacctctaaagctgcagcccgaggactggacatcattggatggaccgctgcagggcctgcagacactgctgctcatggttctgcggcaggcctccggccgcccccacggctcccatggcctcttcctgcgctaccgtgtggaggccctaaccctgcgtggcatcaatagcttccgccagtacaagtatgacctggtggcagtgggcaagtaagtagtctctggtcccccctttccatgcccaggatggggtctagctggagcggagtgggggatggcctggtggctctggccagccgtgaacctgccccacacctgacagggctttggagggcatgttccgcaagctcaaccacctcctggagcgcctgcaccagtccttcttcctctacttgctccccggcctctcccgcttcgtctccatcggcctctacatgcccgctgtcggcttcttgctcctggtccttggtctcaagatatcctctgccccttgccatctacctgtgaccagcctccagtctcctcaactctaggctggggagagtcttccatcctgatggggggtggggtacgggggtgagccctgggtccccctctgggcagatcccgttacacctcttgttggggtccttgattgggctacgctctggaactgtggatgcagctgcatgaggctggaatgggccttgaggagcccgggggtgcccctggccccagtgtaccccttcccccatcacaggtgatggcacccccttctgttgttggaatgggcttctggggtctgactggtgtttagtgttgcaacttagcctcagctggtgggatggtggtggtctttggggatcccctggccccagggtccatctccaagagcctgtgtgccctgcagggtgtggggctggcctcgctcgtggcacctctgctgatctcacaggccatgggactggccctctatgtcctgccagtgctgggccaacacgttgccacccagcacttcccagtggcagaggctgaggctgtggtgctgacactgctggcgatttatgcagctggcctggccctgccccacaatacccaccggtaagaggctgggctggttgttgggggcaggggtagaggtcccctggacatgcagacagcttgtgggttgcctct

SEQ ID NO: 11908 - DNA, 6000 bp, Homo sapiens
cattttcttaatagtgtcttctgcagagctgaggactttaattttaatgaagttcaacatatctgttctttttaaaatgcatcctgcctctgtttttgtatctacaaagtcattaccaaacccaagggcaccacaattttctcctatgttatcttctaggagtttatatttttgaactttatatgtgggtgtgtgatacataatggattaatttttctgaagggcaaaaggtctgtgtctggattattttttagaatgtagatatccagtttttccagcaccatttattgaaaagattatctttactctcttgggttgtgtttgctcttctgctcgaagttcattgactagatttatgtgggtttatttctgggctctgtattctgttccattgacacatttgtctacttttttgccagtaacataatgtcttcttacctccgttttatttggctacgacagaatatgatgtatcggacactttttttcaaaatgtatttaatataatttggtaatttgtaaaattaattaaaataacatctcccagtttcctacaagatcggtcttgttggtcgcgaatatttatactgacctatttgattttaggtcagtgtcctgactgacatgggtactttcattacatttaaagctaaatagaaattgttttacctgaaaataattcagctctttgggtatcacagatacatcatctcagtgaaattttattgtaagcaatgatgtgttacccttagatttctttaaggatttctcgcacatgtgcctgttacttcacagattgacaaaatgaacaagaaccttcagtctatcaccgtcaagttgaggtgtttgtgaatacatccagaacagaatgccttcacggcataaacagaaactactttttatgtccctatgagccatatttctgtgtaaaggccacacatagctgggttgaggaattagacacactcaagtgttttcctctgcattgcaagctggtctctagaatgtccatgcaagtagtttatatctgccaaaaaagggattggcattacataaccctgaaataaagagccaactatgtgaaaattatgaggaaaagaaacacaatgtaggttttaagtcgttggttgggggtaaaggaagggagaagcagagagtttcgaaaagacgggagcaaacaaagtgccctggattccatcaggacagcatgtgagatggtgagttccatgggcacagcgaggcagagacattattggtacaggcaggagctgtgtactcgcaacccctcactgagcgtcctggagcgtgtgctctgaatggggcatcaggcttgtaactactggtgtgagactggtaagtgatatctcctgcccttagagcctgaagatatgcacaggacatgaaacagaaggccggatgcaaacagcagcggaaaagaataacggatgtagatgaaggaacacgggaatcgtctgggaccaatttctacagaagagatggctggggcgagaacttggcctggcaaaataggaggaaaatcagagcaactctttttttttttttttttttttttttgagagggagtcttatactgttgcctgggctgaagtgcagtggtgtgatctggatcttggtccactgcaacctccccctcctgggttcaagtgattctcctgcctcagtctcctgactagctgggattacaggcacccgccaccacacccagctaatttttgtatttttagaagagacagggtttcaccatgttggccaggctggtctcaaactcctgacttcatgattcacccgcctcggcctcccaaagtgccggcatcagccactgcgcctggcccagagcggctctttgaagagtcactctagacatttatctaagctacgtgattcaattagaatagcaatcctaggaagaagatattatgttccttatcttagtggtttaatacaaagaaaataacttgaggtatcaaagaatttgccatatgtgagcacacagatgtggctgggcatcacagaaacctctagggaagtgttggaagtcttcagctgctgcggggaaggctgcctggaaatgatttgattagacaccggtgctttgggcatcaggaaaaggcagcaattgtgtaacgctgccaaggcctgcctgggggtacactgtaccgtggtggagggagaattcaaggctctgtccattccagcagcctgtacatagagatagttcagtattcacctggtttcatgatccgtgggggcgaggatcaggagacatgatttgagcgcactgttagctctgaaatgtccacggaagggaataaaaagaagcagaggtgaagaaggtgggcagaagcctggtttggagccttaggacattcccagctacacactgtagggtggaaggaaccggaggaggcgtacaggtatctcctgtaacccttagctcctttcttgctctcacactcattccctcaccaagccctgcctctgaaacacatgcgtccacgtggcttcacttctgcaccacccaggtcaccacctgagcgcctgaaacccccgctgcctcacctccgcttcccttgtgtctccaaacaacagccagactgactttgtgagcatagcaatcaaaagaggacactcctctgcagaaaaactcctgagagttccatggcggtagaagaaaattcacaaacttctctttattttgagctcctttctccaaaagtaaaagtcaggtatgataaagaggccgacttggagccccacccacatcgtgtgtgagtccctgtgtgcataagtagggctacacaccatattggtaattactagcttaaaactaaccctataccccctactgtcttccactcttgcttccaatagctttacacaagttaatttacttaattattatgaggtatgtaatttcattatcaccatattgtatagaggaaaaccaaaagaaggcatgagttgagtaatttggtgaaggtcatggatacagtaagtagcaaagtccagaaaatcggagaagagaatctgtcttcctaatttctaggatatattgcttctaggaacttactagctctcatgatttttaaatctgatgcattataaaactgagaacacaagcaggaaacaggtgccactttaacattgcatgtggtttattctgagaagtattaagtaggtgatggggtcaccataggtaatagaccagtggctttaaggacaaggcctaattttctctaaaatcttctggaaaaatcaggaataaggggtctcttgcagttcacaggtaaatgtatcaatcaatagaacggttttgtgcctatgtaaaacatatgacagggcttaaggtagcttcacttatacctatttttttttgttttaaaatacatatctagatgtacaattgctttaaagaagttacaatgacaacaattaacaaaattgcttctcattgtaaagaagttattgcaggttccattaaatggttgttaaacagcaaaaagtcaatttgcatcgtgagtactcttttgataccaactatgatatgttcagtaacatgaggaaataaatgtaacgtttataataaaatggaaatccatgttaacattttctaagcatcatctgaaactttcaagtaagcatttcctcccgtcgttctttaaagtttgtaaaaaagagatgtggctgttttgttaaaattccttggtattcaagggctggaaaaccgatttaatttttattcgggggattgtttttgttcacttaatttaaatggaaaaaatctggcagagtaagcataaaactttacctcttagccagaaaaatttggttaccattaaatgtccaagtatgtatttccccagggctcattcctttgtatgatatgatggtatgaaacagtttttaagtttctttagcaattgcagtaatatgtagatcagtacactgaatctcaagagataaatacttcagctttgataaatagtaaatgcaaatggtaaatacaattagttcgtttcaccctcaggtttttagtaaaatgaaggttataataaggaattatgcttccatttgccgccttcttgcagtggtgcagatctccgaggcagatgtttgaggtcccttttttttttcatttcagttatttactgagactggatttggatcatcgaagacacgattcatgctaatgacatgatgaaagaagtgagggctattggtattaacggactgggtttaacagtctgacaaaatgatgaaagatgtgtatcatatactgtgtatttaggagaaaacaaaaccattaagctagccttccagtgaaaaactaaattgtttatttctctggtgtaagtgagcaaagtcactacaggattaaaatgtcttttctgggacaaagtaaagaacaacgtatacacatcttaaatgtggtaggtcacaaaagttagaatgcaatcaccttttcatgcaacaagaaaataaataaataaaaattaaatgctttacccaacatttggcattgattgacacatcagtagtgtcagcttcacatatgaaggacagtacagtctggttatttacaaatgctcactatgacatggtatttgggctaaagatacttagaatattataagtgtttcctttttgattaaaagaatataacataatcaacatcaagctgctatcataactcatctttagctgtggtacaccagagaaataaacagcttgcaatggaagaggattttagtgcttttttttcccctgaagtagacattaagctgctgttgtagagtgtttgcagctctttccaatatgtggagacatttttatttatgaatatttatacaaaaaaggaattctgtcaagatgacagctctatatcacttgagaatgacattatttaattagagaacaaattgcatttttttggtagtgcctgtccatacctcttgtcactgtttgccttataatgtgttttttgaattcactttgagctgacggttttgtccaaggtgttggatgaagagcacttgaaaataaactggtatgttgtttttcagttaataatatgtttaataaatgtgtgatttttgcatgaaaaaaacccctaagttctaatcacaatatgtgggtattgtttctttagctaaaactactactagtcagtgaagcaaagcagtcattaacaatttatttatgtggacctactctatgctgggcaccatgaggactttacatgattaaatgcaatttatatacatcataaaaaagggaaagcaaaccagagcaatactagcttgatactcatatctagtgataggtttatatcaccagttccatctagtcatatctagtatttataggtcatagaaacctatcgctatagtgacctatggtactatataatctgtatatatcgttatatgtatatcactttatatactatatatatcaccatagtgacctagtactgtaggtttacatgtactatattcgctatagtactatatgtacatataatcctacagtactaggtcatatctagtatttataggtcatagaaacctatcgctatagtgacctatggtactatataatctgtatatatcgctatatgtatatcactatatatatgtactatatatatatcaccatagtgacctagtactgtaggtttacatgtactatatgcattatagtactatatatacatataatcccacagtactaggtcatatctagtatttataggtcatagaaacctatcgctatagtgacctatggtactatataatctgtatatatcactatatgtatatcactatatatactatatatatatcaccatagtgaccttgtactgtaggtttccatatactatattcactatagtactctgtgtacgtataatcctgcagtactaggtcatatctagcactaggtttatacgacctataaatataaataactcaatgt

SEQ ID NO: 11909 - DNA, 6000 bp, Homo sapiens; identical to SEQ ID NO: 3772

SEQ ID NO: 11910 - DNA, 6000 bp, Homo sapiens
aagtagactgtgatcagtgctttggtaggcagagaggaaagggtgagcacagttctgaccagagactggactggaggagatggtttttgaaatgagctgtcaaggacagtgggggctggattcttagtgtaataggagaggtgcacagttgggaacattcttggtgtatttgggagtgtttgcagaaggcacatctgtccggatcacgaatgatcttgaacgtcacagtggagacttctggagtctttacaccccatctgccagcttgcagagtgtgaacgggctggtaggggggcaatccacgccttgtcctagccaaccctgcagcctggggccctgtgccaccaggctctgatatggagggcaggtgccacggggtgccgacattgtcatggggcctgcattttcctctggaccctcaatgtatccctttggcatttcccctcaggtccgttatgccacctggagcatcataatggactctgtggtgccctctgacaagggcaactacacctgcattgtggagaatgagtacggcagcatcaaccacacataccagctggatgtcgtgggtaagagggcagaggcagcaggaggaatgagtttagtgggaagagccaggcttggagaacacagccggggtgtccaggtttcttaggggcagagtcaggatagcgattggcacttcttggctttgtcaccttgagcaggtcacttctcccttttgagcctcacttttcttatctgtaaaatagagttaagatcagacagtaacacggtcaaagctggttgtcactgtgaaattgaaggtgctgttcagagtctgtcctgaaggaggcgttgttggagaggtgttaaatgtagcgtaataggagctgtcgcttaatgctagcaagatgccaggctccttaaatacctgccctgtaatgctcatggcacacctgcaaggtgggcagtattagtctagccctgcacaggagcacaggcgcataggctcagagaggtcagacaccttgctaatgcagaactgcacacctgtgccaacttcagggcatcacaggagactctgggaagaacattgagcctcttggagctattaccgcaaccttttccttctaggagttctgaaactcactccctagagatcattgggtacagaatctctcagccagtgttcttcttgattatgatgatatggtctaagaaggagattgtggccaggagcagtggcttatgagctccaggtggcatgatgggattactcacgcctgtgatcccatcactttaggaggccaaggctggaggattgcttgaggccaggagtgtgagaccagcctgggcaacacagtgagaccctgtctctataaaaaaatttaaaaattagcctagtgcagtgtcatgtacttgtagtaccagctgagttaactgaggctactgaggtgggaagatcacttgagcccaggaattcgaagctgcagtgagctatgatgacacccttgtgctccagcatgggtgacagagtgagaccctgcctttaaaaaaaaaaaaggtaaaaaggagattctgatccaagaggttggggtaagatctgagattccgcgtttctaacaagctcctaggggatgctggtagcactgctcgtggaccacactttgaatagcaggagtcaaagtgactctggttttttaaggaggagcaggttgtgctgaggtctgggggtgcaactgaattagaaggttctccattaaagcatgagcgacttactgtgactgtaaatatgatgactgccttggggaggaggatcctgatggcttagggcctgaagagagggtgtccctttccccagctctgttttgagaggcttgggctcagcagaagtgctgggaggtttacaacccatcactgggaaagccaagtggggcgcaggtgagcccacccctctttagccatggcaaggtccccatgacaagtgcctcctctcccatcttccacagagcggtcccctcaccggcccatcctgcaagcagggttgcccgccaacaaaacagtggccctgggtagcaacgtggagttcatgtgtaaggtgtacagtgacccgcagccgcacatccagtggctaaagcacatcgaggtgaatgggagcaagattggcccagacaacctgccttatgtccagatcttgaaggtaatcatggcaccagtcttcgtgggccagtctactgggaaggagaccactgtctcgggggctcaagttcctgtgggcaggctcagttgcccccgaatgggatcattcctcacgcttcaggcacacacactccatctcagtagggatctagccacatcccccaggactagtaacagaggtcacaaagtggaggtgagctgggaacagagggctgcagggatgggtggtgctggtctgtaataagctttgagagcaacgtcactggggctttggggtcagctacacaaggaaggcatttggacccctgccttttcattgcccgaaaccagagcctttccaccaagcgtttcccagtcttagccctgtgtcctgagttacgtacgatctttctggcaaatggggtgcatgataagagcatctcttacgaagagttggaaaaacaaatgccatatataaattctaagccatatgaggacgaggagtaatggcattttcttcctttttcctctcactcccagacattcattgtccctgaatgctccattaatccagggaaggtaattgcctaaatctccagtggatctcgcaacaggaaggaaccagaagctgggaaagttgtttacctctttgtcccagagttagacctcatcctcccctagcttagctgtctcagagatatactggccctcccttctcttctctttgctgctggtgctaaaactgctctgtaggtcattggccactgtctccactcacaacccctgctccagtcctggagggagtgggttaaacacaaatagaacattccatttgaagcagtgattctttttttttttttttttttttaatcaaatgctttggacttttgaagtccacttgttctgtacttgtaaaagggaaagaaggccgggcgcagtggctcacgcctgtaatcccagcactttagatcacttgaggtcaggagtttgagaccagcccggccaacatggtgaaaccccatctctactaaaaatacaaaaattagctgtgcatagtggttggcacctgtagtcccagctactcaggaggctgaggcaagctaactgcttgaacccagaaggcagaggttgcagtgagctgagatcacgccactgcactccagcctgggtgacagagtgagtgagactctgcgttaaaaaaaaaaaaaaaaaaaaaaactaaaagggaaaggtaataaatctcacttaacatctcccttcgctccctgggcctgcctgaaagttacacgggagcaacgtgcgtggccacatctcagctttgcccaactgactggtgtgtcgttggtttgttccagcattcggggattaatagctcggatgcggaggtgctgaccctgttcaatgtgacagaggcccagagcggggagtatgtgtgtaaggtttccaattatattggtgaagctaaccagtctgcgtggctcactgtcaccagacctgtggcaaaaggtaatggggagatggatgggaccctgtgctggggatttgatgtaggccccaagctgctggggcaggcggggaagccagtactggactgtccttgccaccctactgtatttctagtgcccagagccatggaaaaatacccggcctgggaggctggtttggtttggtattgtgttggtgtctgtgggttccctctctgccttctgtgtgttccttggctttgtgtggatccatgtgaggactcacggggacacggttttgctgtgttacaaatggtacttcagactgaagttgtgagtgagtggtgattaagagaaggggccataggccaggcacagtggctcacgcctgtcatcccagcactttgggaggctgaggtgggaggatcgcttgaagccaggagtttgagaccagcctgggcaacatagcaagaccccatctctacaaattaaataaattagccaagtatggtggcgtgtgcctgtagtcccagctagtctgaaggctgaggcaggaggattgcctgagcttaggtcgaggctgcagtgagctatgtttatgccactgcaccccagcctgggttgacagaatggtaccccatctcttaaaaaagagagagaaggggttaggcattcccttgcatactcgcatctgctggctgtgtatgcacatgtgcgtgtgtgtatgcgtgtgcatgtgtgtgtctgcagcccccgccatccctcctgtgttcaccttctggctatctttacctgaaaccaaacagcccctgcccgccggccccatttctccatgccgctcaccgcccgcatgctcggatgggccagtggctgccagcatctggtgaagggtcgtaaccagccatcgtcttctcaggtctgccggagttcttccctcagggtctcaccctcttcctctaacaggttttgctgcctggtggttttcgtttgttccttgttgcaaagaagatgtcagggagcatttcttcctctagtcccccttctttctgtctccttcccttgctctgcgtctcttagaggtctcatgtcctgtgcttgtccattttgcttccgttgtctcttctagactgctggagttaataccaccgacaaagagatggaggtgcttcacttaagaaatgtctcctttgaggacgcaggggagtatacgtgcttggcgggtaactctatcggactctcccatcactctgcatggttgaccgttctggaaggtacacactgtaacttctcctctcgatgtcctgccctcgccacgggcacggggggagcatgcatttccaggcttggggagacacagaggcaggagagctggaagaatgggctcctgcctgcctggtgccacatcctgccccagctttgagggctgaatcctctcagctcagagaagagcttccctagttttgcaggcgcacggaggcctcccacccgtacacctgcctctgctctccccctggccattgcaatgcatgcccgggatctgggtttaccctgcagcccgactcctccagggcaggctccttccgtccttgggtccagcagcctcccccctccgctgggtactgagcatctgaaaagtctcagatagggccctacacctcttctcccttctcaagtgctcagcccaggggtggggcttgctgcttgcaaagagcagcccaccctcctgtactgccatcctattgcctttgaagaaggaggtcagcctggacaggtgaactgagttgccttcagaaaggcctgtctcaggcagccgcagcaggcttcacgatgtccatgtatcctgtttgcctgctgccgtctctcctctcccaagaggggaggtctgcgtgttgagccagggaggaaggagcctgcagcctgctcagggtggtggctggtgactgcggggccagggcttgctgctgtctctcggaatgtcctgcatgtgggtctggctgttcctgctggcactgccctcttctctctcccctcctttcccactctgccctgcttgcccgtcagggtctccggatgcccctgctggaggcagagaagcgttctgtttttatcatcgtccctgtcttggtcctgtccgtgctccccatgtgctcccaatcagttgtcttcgttcctcaacatcagggaaagaaaaaacagcaacacttctccctgtcatcagctctgctgtctccttgtcaggccttgggacgttctctgggctcagtctagggtcgtgcctcatgcctcatgcctctctgggaaggttcccaggggcgccgcctccatggttggctggtgggttttaaaggggaaggttgggaggaggcctgtggaa

SEQ ID NO: 11911 - DNA, 6000 bp, Homo sapiens
accgtggggaaacatcaaagatactcaaaatggtaggttatattttagttaggcaaacctagtgtacacatgtgaaacagtactagaatttggagctaaataagagttaatacttatgtcgtgcttaaaatgtgaacctcacaacaatcctttgaagtaggtacaattatttcctcatttttcagaggaagaaatggagacacagcaaagtaattaagtttgttgctcaagatcgtaccggaaatcataagtaggcagtctggctccagaggcggtgtggtttctctggggagctttactttatacttcgaagggacatctaagcactacttttgcagctgtaagagatgctcttttaaaaatttcaaagtagcgtaagagattgcagtgtctctaaactgcagaaggaatgctggattttctatatagaggacattgataatggaatggttaaggggacattatatattgaaatgactaaagatggtggagagaaactgaagtttgaatctcaaagctgaggattatgattttttatagatactgaattctagaacagtgattcaccaggacataggacaatgattgcttgttactaatttagtatcaaaaaacttatgccaaataaaataatattgaatgacactggatatcttactgcatttctttttttaaacacttaccagatttgaagccctagtggtagtaatttaccttaatgtgggtattactaaaggtttcctatacacttctgtccatttgctttatctttttgtggaatctttttttttttttttttttttgagacagggtctcactctgtcgcccgggttagagtacagtagtgtgatctcactgcagcctctgcctcaagcaatcctcccacctcagcctccagagtagctgggactacaggcacgcaccactgtgctcagctaatttttaaattttgtgtaaagatgaggtctcactatactgcccaggctggtcttgaactcctgggctcaaacaaccctcctcctgcctcagcctcccaaagtgctgggtacgtcagtgagccattgtgcctggcctttttgtagaatcttttttttttttttaaacagactccggctctgttgcccaggccggagtgcagcagcgcgatcttgcctcactgcagcccctgcctcccggattcaagcaattcttctgcctcagcctcccgaatagttgtgattacaggtgcttgccactacgcccagctaatttttctatttttagtagaagacggggtttcaccatgttggccaggctggtctcgaactcctgacctcaggtgatccacccaccttggcctcctaaagtgctgtgattacaggtgtgaaccactgtgcccaacctttttgtagaatcttgattcactttttcaggttgtattgagcaatagagaatgctgttggggtcaggaggtctcttcaaaccaagtaatactcctttggtggaaaaaaatgtaaaattgtgtgattgatttggtgacacacctggaataaagtcagtttgaagctgtttagaattagatgagggcctataaatttcagcaagatgaagaacagtggtatttctctgaaagtcccagtatgtctcccttttgttgggagctgacagtatgattttgggggcatcgggcatcaacagtcactgaatctaaatggctccacagataggggagtgtatacatcaccacaccagctgtccaggaattaggaggaagtgcccttgaatgaagcctgggctgcaagcctggttagcagccagggaggacacacacacgttgcaggtacagtattctgtattacacagattgtttctactgggaaggatatcatatcatttatcttgggggtagcttcagaatttgagtcagtgatgaaatgacttgctgctttcgttatgctcccttaagaagaacatcatatatttcgggatggcctgcataaaagaaacttgtaataatgaatattgacctataccttgtgttctgtttaagtatctgaggaagtaatttggaaaacttgagttaaaatagtctatattgtagtttttatccaatttgcacgttagccctaatcttcatttcagactcttccctgaatgggaaacttttagggaaagagagaatgatacactgattaatttattttcagcctacgaagctaggataatttaatgaaatctctaccagtcccatgttatgaattttagggttggagagctggattctggacgtgatctattctttaactaggaatgtacagcagaatgacccagggtttatcctgaaagtagcagatgtcttcacttaactcctgagacgcaaatttggtagagctgctgccacaggccccggacatcagtattaaaccatccttaagtgattctggtgccttttctccagtaagaagaaccagccctgtattttatatttaagaaaacctgggcaaacaaatgacttgcctagatttggttcagtggtaccaagatttagtcaccagataatacagtttcagaatcctatggctggaagaagtttaccaagtcatcaattcagtagttcatcttacagcggagtgtaaaccatgcttttcaattatttgcggttcttttactgtataccctgtgatgcccttttaagtttttttgaaaatattgtatacttaaaactgaagtgaaacattaaaatttcttattagaattatttttcagtcttagctgaaatacaatattgtatgaaaatttgcactgcattattagtttttttttttaatctagttgattttcaacttttcttttttaaaggcatctccttggaaacaatgccatctttgaatgtgagagataaacctagtttcagcatgtctgcagcagagaccagtacatcaggcttattcccacaggaagcctcctaaagcctgtggcgcggcaaccatttccaggactaaataataatgtgtcagatgcctgtgagtggactgcctggccaaatgactcatgaagatattcacggaagaatagtcaaaaaccaaagaaaaggcatattctagaagcaccttcaattccatcgaggatttttgagcagctgaagaagaaagttctgaaaatatgagtgacaggactccagcacattttttttagttgtttcttacattatctttgttaacccatccgcttttgtgtataatattaagttattttccactactgcaatggctagtaatttacttaggctcagagttttactctgtatggacagagaaataggaggtaacaacagtgggagaacaaataggaacagttcactgggatgttggtccccagaaattggctttcattgaataattcctaaagggtgtcgtgtgctgaattgctttttcatagtgatgtgctgcttcttgttcatactcttatgactttaatttcacctttatctactcccagcctctgtatatgcctacgtttttaaaaataatttttggcactgaagatctgattaccatattttttcagtttaaaaattaaatcctcgcaaatagatctttggtatagttgcattctaccctaggttattttctaggatcaagaatagaacaatttctgttctttccagcattactctttactattcatatgttcttgttcagtgttttgttgttctcatattctaggtggaaatgaagggtaatctctatgttctattttcagttttctaggaaaccagaaaaacatgggtagtagaaatgtatagaaaatgtatgaggtctcttaaccattgtgttaaacttgcattaagcttcttttttagcaatatcgatgtcagtgttacctcttctttcctttttatttattttttttgagacagagtctcattctgtcgcccagactggttggagtgcgatgatgcgatcgcggctaactgcaaccgctgcctcccaggtacaagtaattctcgtgccttgggctcccgagtagctgggatttttagtagagaacaggtttcaccatattggccaggctggtcttgaactcgcaacctcaggtgatccacccacctcagcctccccaaagtgttgggattacaggcatgagccaccatacctggccccttttgttgttttgaggggcaggcagtaagaagcagggatttcttcaaatgctagtaagcacaaagagagggagaagtttttgtaagtaacgaacagggccgggcatggtggcgtgagaggccgaggtgggcagatcacgaggtcaggagttcgagaccagcctgaccaacatagtgaaacccccgtctccactagaaatacaaaaattagccgggcatggtggtgcacgcctgtaatccagctagtcaggaggctgaggcaggagaatcgcttgaacctgggaggtggaggttgcagggagctgagatcacgccactgcactccagcctgggcgacagagtaagactcccgtctcaaaaaaaaaaaaaaaaaaaaaagaacagttgatcattaaggccattaatgtgcatggacagtttgttgcccaggttggagtgtgatgacgacgcaatctcggtaaatataaacctactctgtaacctccacctcctgggctcaagcagttctcgtgcttcagcctcccgagtagctgggatcacaggcatgcgccactaagcccagctaatttttgtatttttagtagagacggggtttcaccatgttggccaggctggtcttgaactcctggcctcaagtgatgcgcctgcctgggcctcccaaagtgctgggattacaggtgtgagccactgcacctggcccaataggcacatttttttaataagtagtttgttgattagaacgaagagcacttgccgtaagtgcatgtcattgttttcagctgttatggctaagtcagttaacctcatcaacaattttttcttctgtaaattgaggacaatttttgcttttatgaatgaagtcttaaccagcaggaagaaatataaacaaaggaacatatttttaatttaatgaagcaaaattccatacatcattttgaaaatagtgtttctttccctgataggcctgttctgcatcattcttttagcttccttctgccctgtttatcacttggtcccacttttatatttttcctcttcggtccagaatttcttatttagtttcttgtattttgcctactccctcccttctccatgattcagcctagtctttccgtcctctgtggacttgggtgtgccttcctctgggccacctcgtcttttgctgctgttagccctcccgcctgcgcacctgccacttcaccctcgcctgtggtccacttacgttccactcagcccggtcagtcctgctttgttcttctccaccgccttggtctcccgtgtgtcttatctagctctggttccttctcgtctccacatttattttgttttcttcctgtgcttgttagtccttgtgcacttggtccttgagctctttttctattaataggtattactagatggatttgttgtctgcctttacatagaacacacatccttactgtgcatttcctgggtagccaggatgaatcaattattattaacttcccttcgaacattgagcttcctctgttttctgtttctaagaattagattagtattctagaagactaatactactttaaagacagtcaaaacagtcatacgctgccatttcagccctttatttaagagtttgtgacatttatcactcccttgaaagattaaagaacacccaaagcaagtttggggtggaggtggggaaggcaggaagagaaaggtaagtgctataaaaggactcattgttaatttctagaaattggactgagatctgaaagcataagccttaacattttttagataaacggtccctgaaaagaataaaaagtatcagtacttccgttaactagctttagtattgggtcatttgtagtttacattct

SEQ ID NO: 11912 - DNA, 6000 bp, Homo sapiens
gtcaggagttcgagagcagcctggtcaacatggtgaaacccatctctactaaaaatataaaaattagctgggcatggttgcaggtgcctgtaatcgtagctacttgggagactgaagcacgcgcgtcgcttgaacccagaaggcagaagttgcagtgagccgagatcacaccactgcatgccagcctgggcaacctgggcaagagagtgaaaactctgtctcaaaaaaaaaaaaaatttacaaagttttgcacagagccttggaaaggcctgtgcaagtgaggggtcctgtagcctaagtttgattaggttcacaatcacaccacctctgggaggaaaagtcattgagctgttaatatctttttattttaaatcctactcctggaaatcagttcaacaaaaggatcgagaggcagtgtggcctagtgggtaagaacagtaaaatacaaggtcctttccataacctacagtgtcctccatgattccagtgactctctccttcctttgtctcttgaccctccatccccactctcgctccactcagccacatgggtcttcgtgtttaaggtctccatgccagccacattcccacctcaaggtctttgccattccttctatctgaactgttcttcctccagatctccacactgcttgctctttcaccaccctgagacgtgtactcaatatcttctgagtttgcagtgaggccttccctcaccagcccaaatctccttttcttcttttttcttttcctattcctattgccagtttacctactgtacatgttactttttttttttttttttttgagaggagtttcgctcttgttgcccaggctggagtgcaatggcgcaatctcagctcactgcaaacttcacctcccgagttcaagtgattctcctgcctcagcctcctgagtagctgggattacaggcgcatgccaccatgcccggttaatttttgtattttcagtagagacggggtttccccatgttggccaggctggtctcgaactcctgacctcaggtgatctgcccaccttggcctcccaaaagtgctgggatcacaggcgtgagccaccgcgcccagcctgtacatcttacttttatctctttctgttgtctttctgcctcctctagaatgtaagttccaagagggtggagataattgtcagtttagttcactgtttagaactgttattggtatataacaagcactggacaaaagcattgctgaataaatgaatgaaagagcaccacctttgggctgggcgtggtggctcatgcctgtagtcccagcgctttgggaggccgaggtgtgtggatcacttgaggccaggggtttggaaccagcctggccaacatagcgaaaccctgtctctactaaaaatacaaaaaagtagccaggcatggtggtggacacctgtaattctggctacttggcaggctgaggcaggaggattgcttgaacccaggaggcggagtttgcagtgagccgagattgcgccactggcactccagcctgggtgacagaagcgagagggagacgctgtctcaagaaaaaaaaagaaaaaaaaaagcaccacctttggctttaaatagatctgggttgaagttttatatatgcacctgccggcaagtgccaagttacttaacttctctaaggctgtttcttcatttgtaaatggaaataaaagtacttcatagggttgaagcattgttgtaaagactaattaaaaccatgcccataaagggcatagctgagtgccaatcaaactgtagacactcagcaaatgttagatattagtaaataaaaaagttagctattagtataaaatgtatatgcataaaggtattcattatagaactatatatagtatttaaaaacaggtatcagaaataggaaaatggtcaaaagattctgccacatcactagtagaatattagtcattaaaatgattattaagactttgtagaaagagaaagcctttaaaaaataattatttaaataatattattaataaattaataataaatttaataaatattcaatattatttaaaaataataaatatttttaaaagccagtcaaatttagcagtggggggttgtataccaactttagtgacactaatgttaataagttctgataaatcactaccatcggaccagccagaaagcctttgaatgtaaagttacaagaaaagaccagacatacctggcctaccgttgctctgatttaaacttcagtgtttctaaaggccgaagttgaattccagagcattcactatgaattctagagcacaacttagaaataaacactgccaggccgggcgcggtggctcacgcctgtaatcccagcactttgtgaggccgaggcgggcagatcatgaggtcaggagattgagaccatcttggctaacacggtgaaaccccgtctctactaaaaatacaaaaaattagccgggcgtgctggcggacgcctgtagtctcagctactcgggaggctgtggcagcagaatcgcttgaacccgggaggcggagcttgcagtgagccgagatcccgccactgcactccagcctgggcgacagagcaagactccgtctcaaaaaaaaaaaaaaaaaagaaataaacactgccagatattgggtgtacatttttcttgttcttgtcttttctcatgcacgtgtacttttaagtttatcagagaaactttccttagccctccacctaagccagataacccctgttttctttcactgtaccttggttatgagtagtgggtacaaaacaatggtggtggtagtagagggaaataaacagaataaacctcaggcaatatcgtcaagtattatctgttatttatataaatatctagcttttatatcaaaattatctttttgtaaggctgtatcaatttatattcccaccagctgtgttcttcgtagatttgctatccattggttcccaaatgttgtatactctcattacactgtggaatatttaatgcctttttgttatgaaaaaactgtttttattaattaacatcaaggatatggtgctgacaaatattctctaaaattatggaatgttggaaactctgctgtctgacatcctttccgtgtgaatggaacatcccattcttgtccagagcatctgagccatacaggtcactttgacacaggattttcaatacaggtacaaagctttagatagagttttcagacccaacgtttcacatttgtcgtaattttgagatttccaaggaaagagcctgcttcctactcaggtctgatgttaacctgatgctgcacacagctctgctttgcttcgagtctatcaaacactgctccagttaattcttaccaaaaaatccccccattcccataacccaataatgacacttccgtttgatgagaggcattgaggttcctctggagtgcagtctcccttgctgcagcaagttaataaatctaactttgttgactacaggtttgttcctggtgctctttattggaagactttagcaatcttaaactgctggccccaaatcccaaaacaacgggaaactctactcagtatcttttctttttttcttttttttgagatggagtctggctcttgtcccccaggctggagtgcaatggtgcaatctcggctcgctgtaacctccacctcccgggttcaagcgattctcctgcctcagcctcccaagtagctgggactacaggcgccctccaccatgcccggctaatttttgtatttttagtagagacggggtttcatcatgttggccaggctggtctcgaactcctgacctcgtgatccgcccgcctcggcctcccaaagtgctgggattacaggcgtgagccaccgcgcctggccagtatcttttcttaaagattccttcttatacaagttgaattagacaagatggatcattttggcttttagttcctccaacattccaacctagttagagcggcttttctctgtgcatggaaaattcttcccccagatctcttgcctggctggcccagttcatacctaaggtagccatctgtcctcacactgccgcacccccaccccgtcactccacctcatcatctcatttcattttcctatttttctaatcactctctgagattatcttacttcattatctatttgtttataaattatcccaatgaggatgttaagatcaggagagagggtaccacgacagcgctgacagccgcagctgcccagtgtctagaactgtgcccaacaaacacttgtggaatgagtaagcagacgaggaactagacacttcgtttgccttcgtcccctttaaataccctccaggtggacccagccgcattaaaactctgagaactaggtgaatggcatttggcctcgccactggccggagcgtttgccgttgatccaggcaaccactgttttcccaccagtcgtgtagtcgctctacctggctccgccccccaggacgccgagcctcggccgggcggtaaaatcggcgcttaccctttaagcggcgggacttctggtcacgtcgtccgcggtcgccggaaggggaagtttcgcctcagaaggctgcctcgctggtccgaattcggtggcgccacgtccgcccgtctccgccttctgcatcgcggcttcggcggcttccacctagacacctaacagtcgcggagccggccgcgtcgtgagggggtcggcacggggagtcgggcggtcttgtgcatcttggctacctgtgggtcgaagatgtcggacatcggagactggttcaggagcatcccggcgatcacgcgctattggttcgccgccaccgtcgccgtgcccttggtcggcaaactcggcctcatcagcccggcctacctcttcctctggcccgaagccttcctttatcgctttcaggtacttaccggagacggggggcgtggagactacaggccccaggaggcccagcggcggctaagcgtaggctggcatgttgcgggcgcgcggtgcctgctgggatttgtagtgggtccggcgccggcggtttagggcggggtcctttgggcccggggaggctctgggatctggagcggggtgctggatagctggagttgtgggctggcctggtggggaggggttgacttcactggtatagtgagattgtgcttcccgctcttcgcactcagtgaaggaagcagtgagattagtcgttggtagttgtcaatctgttggacgctggcgattaggtccgcctggagcattgccctctgacctccctctgtcacccacgtgggtggcctgtaggtgtcaacttcaccaacttatagctgagttcctttcacgtttatggagtttttttgttttggttttcctataggagtgatttaaagtcagagatacaaagaacgagtgtattgttctgcatttccctctagacctaatttagtgtcccccacgtagtaatagaatgtacgaaggaatgggcaaagagtacatttgtccagaaatggaaggccttgttattttcttaagcatgaaggaaacagtccagagtaacatttctgtcaagagagtgccagttttctgaaggttatctgtattcaccaatttctgatttaaaacttcaatcagtggcaggtcagatagcaagatctggcattaatttcagccctttacttggcctatggataacattttcttgtctttccctgtcttcactgggtgttacttcttggtttcctttgctggttccttatcttcctgacttttaaatgttaggatgtgccttgggaatcagttataggaccttttctatagactctccctagctttaggtggtctcattcattcagcctcagggctttacatactttctataaactggagattctgaaatataaatataaatatcttcagtccagatctgtctccctatttccagatttgtgcatccagcagttacttgaaatcacgacttggatgactaagagtcatcttc

SEQ ID NO: 11913 - DNA, 6000 bp, Homo sapiens
tgcctcagtctgcccctggtgtgctggggcagggggaagacaaggaatgcccgcaggtggggtggtggggagactcttaggaggaaaggctcctccaggcctagtcacgcttcctactgaggccaggagctgccaggaccggtacgggatcagggctgtgggaggagggcctttggcaccggcccctgtgctaggaagtctgccaggcccgagttggagccaccccctgcaggggagggggcggctctgcctcagcaggccccagggcccccgaagtcacagaagctttttcgggtccagcaaggggtgtgtgtcctctcagtcaaaccccttgacgtttcccaccccctcacggggagggcaccaggcctgaagctggcaggagctagggccatgctatatttggtgggtcctggacgctgacccggccagcgctattctgggcagggagggaaaggggcagagcaggtggtcccccgagtcctggtccccaaccacagcaggacccagccgagcaaggcaaaagacgcaggactgggggatgcgcgcacaggctgggggttgggagcagcctggggccggcgcgggcctgggcgtgggaaggcggagcatgccaccctctcgtggccgtgcgggggcgggagtggggagggtggggtggggagggcggagacccagcccctcccccgcagcgggatgcgcacagtgagtgggtccctccatcaccttccacctggggatgcacccactgggagggcagggtggaagccccagctgggtgtgtggactcccagggaccccaccccaggcctgggaagcaggggtcagcccaacacgcaccaatccatccccgatgcaggtagcccagggagcacctgcccctgctgtgaatggggcattcgggggcgtgagaccttttggtgccagcggtcacgctgcacctgaggcccccacctgaccagtgctcccagctctggtgtcctgagaaacccttcaagccatcccgcatgggcaggatggtgacatatccatgtggtaggattgtcccggccccaaagtatggccctggtcaggggagcccctgctggaaattgcatctccagagctttgatgcaggacccctgggggatcagggaatgagggtctccaccccaggggtctccttgcagtgagtctatatgcaggcctgcgttctgctcctggggctggttctgagtgcccagcttcagtctcctgagaacatgaggatgggagggggcagagtcttgctgagggcacacccagttcccgctggaggaggacagtgccagtcttctgcaaagggaccttgggtgggaacgggcccggagcgggaggaacgtgactccccagagggaagatgggcatcatactgggcccagagctgggaaggagttgctgccagcacagggtgggcctggactcccctcgcccctacccccagtggttgtggctgtagccctaagcctggagagcaggaccggcccggggtgtctgggaggctgccaggtgcctcccagagctcccaagggcccccacctgcaagtgccagcctcagggcagtgcccaaatgaggccctctcagctgcagccagcgatgccttgggatgcttaccgggagggaggcggctttgggctcctaagtccttgggagaggctgggagcagtcactgcgcggcttgcgcaagcccattgtcgggttgggtggcttcctcagccagggctgggagggactccaggatcaggtcctccctgtctcgagtctcagtggggtgatggggaggagacctggccacccatggctcaggggcagctgagaacaaggacctgctggagctggaagtgctgtggtgttgaggggtggggtgggcagcttctcacacctgcctcctgcctccttctgtccacctttccaccaccctgacctgtcccagccccacacatggttctgcctggctggcctgcccttggcacctggcgtagagcacacagaaggcactcagctaatgctgggcaggcccactcatggggagtgcgtggctgtgcagcaccagggaaccggcacagcagcgccggcagaaatcacagcagtaaacttgtccgggttgtatgcatcaaggtggcgatggacgtgggtccccccactgcactgtggccctgagcactgtatagcagcccggcaatgggagccattatcttgcccctttgacagaggaggacacagaggcacagggaggtgaagtagctgccccacactagtgcctcctcgctcactcaccaccccctgcaccacagtgcagccgcttctcccaccagctggggttccttggacccccaagcctgggaagggggaggtgagtttacaaaatggaaagcttaaaaggagaaaagtggaaccagaggtttgagaagccctgagtggtagagtaaggcctccagcgctgcctctgggtgcagggcagagtggcagaggagagggggagaggcactgggcaccatgggggcccagttcccacttcggggatctctctcgcagaaccgagggtccccttcatgggggtagatgcccagggctagctgttgccactgtctgtgtggacctgagtcctggacatgcccgagtgactcaggagtggctgcttgggcgggctctgtcaccctaggatgttatacattctgggaactggacaggagtggctgcttgggcgggctctggcaccctgggatgttatacattctgggaactggacaggagtggctgcttgggtgggctctggcaccctgggatgttatacattctgggaactgcaatcagccactagagaagtcggagctacaggaagtgaccctggggtgggacctggggacatggccaggtcagcatggggacacccggctccagcaggagctctggtctgtcctggggtctttgggggcagggctgcggccctgggcaggcttcctccaggcggaggtcctggggaagtgggggagccaggccagctgccgcctcccccactatgtagcatctgattcgtcatctctcatgaaggcgatttggttcataactctgaaactctgaaaaaggtcaaaagaagcagagaggccctcggtggatatgccagcttttctgccggtgctttctcccactactctgggtggtctgctctcctcttcaaacctcagctcgcagggagggcctgaatctgccagcccctcaggatctccttccctctgggccctccccagccttaaggagcctcccagacagaagggtggacagagccacctgggcagcccgagagacacacgggggtcctccctgtggacagccctgccagcttccgcccagccctgagcttcatttgcatcttgaggagtaaggggtggtgaaatgggaatgctggtctggctcagctggtcgtgggcataagtgcccgctgaatggatggcatctctccctcctgtcttatgttctggggtccaggtgcttcccagggccatgcccctgctgctaatgcttgccctaacccttaccctaaccagcgtccagcgtcgtctcaccgagccgtaaataaatcaacagattcgcattgtctgcgcttctctccagccccactgcctcggcctgagctcgggcctcacctttccagcctggctgggctggcactccaggctgcatgcagccactttcctgtctaccctacccggtccaggtcctggacttttctggcctctaggcctgacctgtcctcggagccaggcacagggagggagacaggcagggctcctggggcttgctgagagttgctcccagttccgtgggagagaggccaccccccacccagcacccctgaggggcatacaaacccctgaggaagtctgggtgtgcggggtaagggaggcgggaactcccccaggaccccatcccaccatctctgacctctctgcctacctggttcctgaccccagcttctcgactgccccaggaaggagggcctggatctgccagcccctctttcaggatctccctcctcctgggcccacctcccagccataaggagcccccgaaacggaggggtagacagaagccatgtgggcagcccgagagacacataggggtccccgggttggcatggctgactggctacggacaggccctttggggccccagcccctggccagcctttggaggaacagctgatggctcccgctctccagggtgtcccttctgggctcttaccttatccttggggtcccttttagtaccaagggcctttctgtcccccctactcctctgcacagatcctggggcgttagtcacagtgtgacaatggccatgattccctgtacggatgacagagaggtggctcacaaccatgctccctctgtgttctcccagccctgcgggggtcaggatgggaaagctctggcttatttggaggaggtcttgtcatggaactcattctagggtgggagtacagatgaaggcctgtggcttccacccagccctgagcttcatgtgcattttgaggcgtaaggggtgggctggtggctggtgcccaagaccctccttcccaccagaccttccttcccagcctctgagggagaccggcctgtggccgtcacctgcctggtgccaggccttccttcccagccactgagggagagtggcctgtggccattgcttgcctggtgccaggccattttatcagatcctcaatcctgtcagccagggctatccctactttatggacaaggagagatggctcatgagatgacaccggcccgctcagaggcctaaccagcgagctttggggccaggttggcccctaccgcccggaccccagcccggctccttgactgagcccggctgcctggtgactcagacccgcagagtctgctgagcgggcgagggccagggcggggtgccagcaggtataaggcagccggccagggcgccgacagcccgacctcaccaggagaacatgcagctcggcactgggctcctgctggccgccgtcctgagcctgcagctgggtgagtccaggggctggggccacctcctgctcaaggcccccatcactctagcccaaccaccgtccctccagccctgggctgtgactgcccacctcgggagaacccattcctgtccccccaccatctaccaggtgcagctttcctccgaaagcctcctgcgatcctgcaggtccatccagctcagccccagcccccgacactggcccccacacttctcaggatgcacagcccttggctcaaacccccctcttcctctgcccagcccccagacctctccagtccaccgcgacacccctcacacacgcaccttcgtgcacgtgcacacacacactctgaatgtgcccccctccagccctcttgggcctggcctcccagctggtttgtctcctggggccaccctcccgggactccctcttccctcttgcctgggaaaaccaagtccctctgctctcccatccccagttcctgctcccgggtcctctcctctgctccccgctttcctgggtgattttaccccctccccatcccccaaccctcgacccccgcagtgcccacgtctgctacggctggccctgtccccccagcttcagatcccttggcccagggccttcctgagggctccaaggggatgacccctcaagcacagctgtgcacacctggccttggcatcccccagcagagcctgaacgtcttctcttggcagggcatctccacccccaccctgaggcctcaacaaaaccagctggccccttgatctgccggtggcctgcacctccaagcccaagcagcccagccccccaggggccaagcctctgcgtccctggctgtgggttgaacgacctgggcagcccctgcctcccaggccctgaatgagcagggggtggagcgtcggtgagtccctggcgctggctcaggtgtctcttacatccctccagtctccat

SEQ ID NO: 11914 - DNA, 6000 bp, Homo sapiens
ccaaagtgctgggattacaggcataagccaccacgccctgctggctaattttgtatttttagtaaagatggggtttctccatgttggtcaggctggtctggaactcccgacctcaggtgatccgcctgccttggccctacaaagtactaggattacaggcatgagccactgggtgccaggcatgtattttttttaacttatttaattttttgtttttttttttagacagagtctcgttctgttgcccaggctggaatgctatggtgcgatctcggctcactgcaacctctgccttccgggttcaagcagttctcccgccttcgcctcctgagtagctgggattacaggctcctgccactatgcccagctaagttttgtaccttttagtagacaggttttcaccatgttggccaggctggtcttatactcccaacctcaggtgatccgcccgccttggcctcccaaagtactgggattagaggtatgagccactgtgcccggcctgtattttttttatttattttaaaattttttgttattactatttttgagacagagtctagctctgtcgcctaggctagagtgcaatggcgtgatctcagctcactgtaacctctgcctccggggttcaagcaattctcccgcctcagacttctgagcagctgggaccccgccaccatgcctggctaatttttgtattttttagtagagatggggtttcaccatgttggctaggctggtctcgaagtcctgaccttaggtgatctgcccgcctcggcctcccaaaacccttttactttctgtctccatgaatttgactggctggggtcctcacatcagtcagatcacaccgtccttgcccttttgcgtctggctgctttcgttcatcacagtctcctccaggtgcatccaagtcacggtgcaggccggtttccttcctttttctggctgaatcgtgttccactgtggatgaaccacgatgtgttcactcatgcgcgtttggatacttgagttgcttccatcttttgaatagtgctgccattgaacgtgggctttttttttttgttgtttttttctttttagagtcagggtcttgccaggttgcccgggctggagtgcgtgatgcgatcgtggctcactgcagcctccacctcctgggctcaagcaattctgcctcagcctcccgagtcgctgggactacaggcacccaccaccactcagggtgccttaatttgtttttgtgtttttagtggagctcgggtttcaccatgttgcccaggctggtcttaaactcctgactttaagtgatccccccgccccggcctcccacagcgctgggattacaggtgtgagccagcgtgaccagccggtgttgtttttaagatgggccagttgcagtgagcttgttggatgacagagtgggcctgaggggcaggagagtgcaacccgtctgctctggggaagccggccttaggctggggcatgggcaggtgaaaccctcaacagctgctcctgggctacggaagagagtttctgctgggaggggtggggtcacatgaatggagggaatggaggaggcctgtagcccagcactgaggcctactggggaggcagctcaggaaggccacagagtcaggcccaggccaagacctttgcccagaagctaaagtaggcccttgagcctattttagcatgggtggcctccagccagcccattggtcctggggtggtgtgggagggaaagggccagtttgggtccgcagcatcttcaggctgtgtgtagagcagccccctcatggtcctgggacccagaaatcatctgcacccccagcaggctctgcacccccggcaggatctgcacccccggcaggctcccctaagggcccccagaaggataccactgcgggtgggcccagccagaggagcaccatgagatccgcttggtggggtgaggccggcaggggaagcaccctgaccccaggacactgggctcaatgcccgccctgccccgtcccaccctgtgtatggcgggacagagtccttgggcctcaggcacccagctccccaccccagccccacccacaatgctcagggtcaggctggctggaccgggcgggaggtggcatctggactcccccttcagaaggcaaagctgccctgagatctgccttccccttcccccagacttcctgccatcaccaccacggtagagataaggcctctaggctcaaaggccagagagggagcccacagagagggcagggctgggagccacagcctccctgcccccggggctagagctggggtcttgccccaatcttatcctgacccaagctcggccaggtggctgccagggcccagctccgtcttcctgtttgtctgtgttggagcttcctggggctgtctccggcctaagggagcatgatgcagcaggcaccttttcagtttctttgactccatcgcagtccccaacagggaccacagcccaggacccaggaggagggaggtccatgtccccacccccaacaggggccaccgagggtgtctgggcagcctctgttgggaggggcagaggcagggacctgggagctctcaggctctgggggcatctgtgcacctctgccctgtgtcccccagcttggaggcagcccccagatggacagccagaaggggacaccccagccctgccccacagcttggggggcagcaggcagaggacagaagcccacccaggctggcctggcgtggtgagccacgccggtaatcccagcactttgggaggccaaggcgggcgaatcacctgaggttgggagttcaagaccagcctgaccaacatggagaaacactgtctctactaaaaatacaaaagtaaccgggcgtggtggcgctgcctgtaatcccagctactcgggaggctgaggcaggagaagcacttgaacccgggaggcggaggttgccgtgagccaagatcacgccattgcactccagcctgggcagcaagagcaaaactccaactcgaaaaaaaaaagaccaccgaggctgcctgtccaggggaaggggcccagccctcgacccccacaggcagtggctccaggctgttggggaggatctgccactggaatggttaacccaggcatctccagcagccaatcacagagctctgcaggaatacctgggagaggtcctcatgcagcccgggcgggtcctagcccagccccagtctggccctggacaaccccagcaaagccgccctcagccagcccagaagcactgggccttggccacagcaacacccactgagcacgctgggagctgagtatggcgtccctggtctcgctggagctggggctgcttctggctgtgctggtggtgacggcgacggcgtccccgcctgctggtctgctgagcctgctcacctctggccagggcgctctggatcaagaggctctgggcggcctgttaaatacgctggcggaccgtgtgcactgcgccaacgggccgtgtggaaaggtaacagccccacccgacgggtcccccagccctggcctcttcccgccagctccgccctgccagccggcagcaaagggccctgggcaaactccaggaggcggaggaggctagtggcagtacctgggcaccctgaccctccccacaggccagagcccaccctcctgctcatgagggcagacaggcctttccagggacacagtccctcttctccccaggaccccagggccaactccccctgccggccctctgccatcaaattggcagtggctccaggggagtcccctggggatgggggaccactgttggggacccctctgcgtgcacccctgtagttggggaagcaggacaggggcctggggagacggaagggcgccaggggttgagagaggatggtggacgttgttggacttgaaagggaaacaggccctcggggaagcccctggccaggcctgcctctcccctccctggtgggcccagcgcccctgctcacttgtctctgcccacagtgcctgtctgtggaggacgccctgggcctgggcgagcctgaggggtcagggctgcccccgggcccggtcctggaggccaggtacgtcgcccgcctcagtgccgccgccgtcctgtacctcagcaaccccgagggcacctgtgaggacgctcgggctggcctctgggcctctcatgcagaccacctcctggccctgctcgagagccccaaggccctgaccccgggcctgagctggctgctgcagaggatgcaggcccgggctgccggccagacccccaagacggtgagggagagtccaggcagaccaggggagtgggtgaggagggtcccacggcccatgggacccggcctggctgcaaagccttcggggagcctgggggcctggggagacgcccaggagtcggcctgcggctggggattcacaacgtggggctcactactgggcagttgggagcctgtaggagccccgggagggacctcatgagggaggaacccagaggcctgagtgggagcctgaagcagctgggcccggcagggagggctgtggctccagggaggggcggggctggtgggggcagatcctgtagttggggtgggagatgcatccaggggcagcggggtggatggcagaaggtcacaccaaaggctgaggcggaggccccctcttccccaggcctgcgtagatatccctcagctgctggaggaggcggtgggggcgggggctccgggcagtgctggcggcgtcctggctgccctgctggaccatgtcaggagcgggtcttgcttccacgccttgccgagccctcagtacttcgtggactttgtgttccagcagcacagcagcgaggtccctatgacgctggccggtgaggcctgggctgggctgtggaggggggcacccccgagtccccagcctccacgtccctggggggcagggccggagcccacacagactcgcggtgccaactcttctccctgccagagctgtcagccttgatgcagcgcctgggggtgggcagggaggcccacagtgaccacagtcatcggcacaggggagccagcagctgggaccctgtgcccctcatcagctccagcaacagctccagtgtgtgggacacggtgagctgcgccctggggtaagatggggcctcaccggggtctgcttgggcccctgagcctgtcctgccaccccccaggtatgcctgagtgccagggacgtgatggctgcatatggactgtcggaacaggctggggtgaccccggaggcctgggcccaactgagccctgccctgctccaacagcagctgagtggagcctgcacctcccagtccaggccccccgtccaggaccagctcagccagtcagagagtgagtgcccacgccgacattgtgctggcagcacagaggtggagcccgtgtaggaaggaaggagtggctgcccaggatgagggatggagagagtgagcaggggctggaagtagaaacaacagacacaggggaaggtggcgtcgccaggagagtggggctttgaggcaggagggtcagcctgagtgagggcctggcccacactgacggcctgcagctctggtgagcagcgcccgggaagcaggggctgagtctggaagaaaagctctcacagccgcctcacccgcccccagggtatctgtacggctccctggccacgctgctcatctgcctctgcgcggtctttggcctcctgctgctgacctgcactggctgcaggggggtcacccactacatcctgcagaccttcctgagcctggcagtgggtgcactcactggggacgctgtcctgcatctgacgcccaaggtctgcccccacaaacccgcgaccctggccctccgttccccaccatggactcccaggccatgccctcccagggaccttacccaccccacctcctgacccctctccctgggtcttggtgggaggcaccctgggacctcccccccagcccagcgcc

SEQ ID NO: 11915 - DNA, 6000 bp, Homo sapiens
ttattaaggaggattgctttgtgcccaccacctagtgtaaaataaaatcgagcaatacagtcttaaatgttgtggccttttttgatcataagagttggtactgtttaaggccaaaagtaatagtttttataaatcttttagtctcaactcagcttttacaataaaaaggatttgtattgcattgagtttataaacttttggtttgtgaaatccatatttgatctgttttcttccaatcaaatgtttatttggaaagtcagtgaaactgtcaaaatgttacctcaataagatatttataattgtatgagaactacaatcaccaaatcgactgtcttcagtattagcagatctagtttgataaacaaatggcttgtgtgaaaaccgagcaggtgtttgtcattacccatagtgttctgtgtagttattgcttagtctgcagaaaataatgacctagatgagatgtctgacttgctttcacttattaaacatgttcaccatgggatgatgtctgtaacgtcagatattgttaaactagactaggatttaataaaaattgtgaaagcttactggcctaacagtttattttataatattgagtatgaattatatgtagccagagatgtcaataaggcttactgtcggtaggtaatatggttagtttgtagggaaaagagcgtatgagcacatgcttgtgtatttcggcctttgccccagtagatcagacaatgacattctagtcttgatgttactaagttttagcagacactagcaagtggtttgtatttaaccacagccatgaagcagacagactgaggcacagattttagtggctttgtggcaataaatagggcatggtgtgccttaggaaaagaatgtttataaagggaactataactgaaattaaaggaggcggcagtgaagaggaaataattatcttctatctaaatgatatacatatgatattttgagatttttataactgcagtggaacacaattctgggtagagtagaaaaaggaaaggtttaaagacatataaaagattcttgttgacaatttatttttggtagcaaatctcaaatgattacctgctattaagggctgccatatcagagttttgcactattttgctaccaagtttgattcgtacatctaaaacattttgtagttgattgtcaaggacttaatttgaaaatcatttgccaggccacatagttatcaattttctttctagcagctattctgttgtatttttaaaacattttttagatgactttttaaagtctatttagcagtaaccttaagaggtgcatattagtaaaataaatctcttcttgtcatttagccttcatcaaataataggtaccaatgtattaaaaatatgtggtttttttttttttggcagccctttgaaccagagtaggttcagagaaactcccaaaatttgtattttagacacgtcatgcttgattggtaacttccctccttttttggggaacatgtttgtgtcctattaacttaattggatagatttttaagtatttcttatttttggcacacaggatggttagaatacagaactttgatttttggtgtagatacggagagaatgatgggtaaatttcctaggtttatatgaatttagggggtgtacgcattttgaaacgctattaacagatggtgctgaaatctattgcctacatgttttctagctctttagcattatgttaatgaagcctccatataaggagtgtttctctggcacagttggtaagttgactgctaacttcattgaaatgtgttactggatatgcagtatactgaaattattgatcttttttgtgtataggaaaagagaagtgggttaaaagaagcaaattaacttgttctgaaaagaaagtatagattaattttgttttctgtttaaattttatctccttggtaagactttttttccaaggcagaaagcttggcatttttaggcatagatcccttaccttataatgtcaaaatgaatttaattccagtactcaggtttttccctttaacagactctatgtgtatcagggctttctaatgggtttttcctctttgtttttaaaatgtgagcagcttttgaccaatttccagtgctcttagcattttacttaaagaacaaccactaaaaaagaaaaacttcgtaatttgcttgtcttttgctttgctttattaatgtctaagaacttaagaatactcctacctcattagctactcaagatgctgtgacgaccaaatctattctacataatgtgtttagaaacaaagacttgggtgaaaaatgaaataagtatattctgacttggctattgagggtaaaaagaaagaattaagtattaagtgttccttgtaggagatatgttagtagaataccataaaagtttgaaaattttaaaaagtactaatatttaggtatcctgaaattatttgcagttcattttttatggaaattaatccagtgaatcacgcaaaagttttttttttaaatggtgtttttccagatcaactctagggtaaacattcacataatcacaaatatgcaattctgtaattgtgaaatgcctgtatgttttgttttcatacatcttccttggagatgtctgaatataatactccatctatgaatattttaaatgttgaaataaaagtaagaaatgtgaaaaaaaaaaatgaaggctagggaggagagcaaaggatgaatataacgtgaaaatgtatgtatagttagttcaggggagaaaaccaggagagagagagagaaagctcacaccagagctgtcgcttaaagatgactggactagggtgggaagagaaagaataacaagtccctagaaaatttgctaaaagtgaggcctttggggtacagaagagtgggcaggtttgtaacggctgtaagggaaacgtgatcacttcgggttagagggaagggctgtagagccacatggcaagcccaggacacctgtgcatttcctgactttccctgacagcatccagtggcttaggataaaaaatggagacattggatgttggattaccccacaatggacatggacgtttgtcagggtaaggatggtgggagacctaagggacaaggagaaacattatttttttaaaattacagacgtcaaaagagtcacacaatacaaagtttatagagtgaaacatgaaagaatgaccttcatccctgccttaggaggatctctggagcagctttgctcatagtgtctctgactgcagtgacttacggaaaaaactaataattgggaaaatactagtacctaacagttgagactaagtgttgtggttggtgccgttggaactccatggaacatgttcctcatggaagaggtggggaagggggaatgtgggcaggtaacaacccacactcccatgcttctctcccagtgagtgagatctaattcaccctggcagtaggtcctcagtgggtttcaggttggttccaaaaggaggtagggcctggtgcagtggctcacgcctgtaatcccagcactttgggaggctgaggcaggaggattgcttgaccccgggagttcgagaccagcctgggcaacatagcgagaccccatctctacaaaaaatacaaaaattagccaggcatggtgatgcatacctgtagtcccagctactagggaggttgaggtggaaggatcacttgagcccaggaggtcaaggctgcagtgagccgagatgatgtcactgtactccagtctgggtgacagagtaagaccttgtctcaaaaataaaaaaataaaaattttaaataaatacataaaaggaggtaggcacgatatgttgtaagtggactgaaagagaggagatggtacagagacagcagggtggagtgtgaccagtggcggttatgccttttgtgcctgtgcctgttgcctggaaggaggagaggttttcgcttgacaggactgtgaaggagggcacggaaatatggggggtcgggggtgaatctaggcttccatcttagtaaggagaggcgggatacgtgtgagaggcggcagcatgctggcagccctgcagcccttgctcgctctcggtgcctcctcggcctcggcgcccattctggccgcgcttgaggagcccttcagcccaccgctgcaccgtgggagcccttctctgggctggcctagtccggagccggctccctcggcttgcggggaggtgtggagtgagaggcactggcgggaaccagggctgcgcgcggcgcttgcgggccagcgcaagttccgggtgggcgtgggctcggcgggccgcacttggagcgggcggccggccccgccggccagggcagtgaggggcttagcacctgggccagcagccgccgtgcttgatttctcaacaggccttagctgcctccccgcggggcagggctcgggacctgcagcccgccatgcctgagcctcccccgcgccgccgccgtgggctcctgcgcggcccaagcctccccgacgagcgccaccccctgttccacggcgcccagtcccgtcgaccgcccaagagctgaggagtgcgggcggatggcacgggagtggcaggcagctccacctgcggccctgcgcgggatccactgggtgaagccagctgggctcctgagtctggtggggacttggagaatatttatgtctagctaagggattgtaaatacaccaatcagcactctgtatctagctcaaggtttgtaaacacaccaatcagcaccctgtgtctagctcagagtttgtaaatacaccaatggacactctgtatctagctaatctagtggggaggtggagaccttttatgtctagctcagggattgtaaccgcaccaatcagcaccctgtcaaaacggacaaatcagctctctgtaaaacagaccaatcggctttctgtaaaatggaccaatcagcagggtgtgggtggggccagataagagcataaaagcgggctgccttaaaaaaaacggtggcaacacgctgggtttgctttacaacgcttgggaagctttgttgtttgcaataaattttaatacttgtctgtttcggtctgcactgcctttatgagctgtaacactcacagggtaggtttgcagcttcactcctgaagccagtaagacaacgaacccactgggagaaacaaacaactccagacgcgccgacttaagagctgtaatactcgctgtgacggtctgcagcttcactcctgagccagcgagaccacgaacccaccagaaggaagaaactccgaacacatctgaacatcagaaggaacagactccggacacgccgcctttaagaactgtaacactcaccgcgagggtgggcggtttcattcctgaagtcagtgagaccaagaaccaaccaattccggacacacttggactcgacagactctaaggtgaaagattggtttagttcatgagttggggttttgtgataactgacattgtgaaaaacgggggatttaacatagattttcacagtggctttagacatttcataaatatttcttaaatgcctcctaaatgctaggatttggcaatacaaggctaaacaaaatacaaagccaaatcctactgtaatgggagtatgtaaagtgtttctgttaatggaaaaagtgctgtgtgaggatgggggttaagtgactggactgtttgtgttctgagctttctaggactgatctgattacgctgtaaacactccgccagatactgtgtaggcccagcccttgtgcttgagggggccactgtgaggtggcgaaacagacaagagattattagaatacagaaagttcaggttgggaggaaccactgaacatggtagaagtactgaggtctgtgaaagtaaagatcagcccaatgaacacaaacaaataaggttcttgattcggagcttgctgtagtaagggagttttgtacttagtggacactccgaggcaggcaggggagtgggaagcttt

SEQ ID NO: 11916 - DNA, 6000 bp, Homo sapiens; identical to SEQ ID NO: 1288

SEQ ID NO: 11917 - DNA, 6000 bp, Homo sapiens
atttcgttgatttctgctctttaggtttgttttgttttttttctgggttcttgaaggaggagcataggttattgattcgagacttttcttcaatgcaagaatttatgcataaattttcctcttagcactgttttagccatgttcccatttttttttcttccatctataatatcttacttaatttgtgcaataaccctggcggtaggtagagattttcagactcactttacaaaggaggaaatgagctcagggagattatgtaacattcccaaattctcaaggctgagctgcatcctgagccgggtagtctagctgcaggtccatatggccatccagctgcctcctggctctgaagttctctctctgtagtttataatgtattcaatacaatatattatttgttaatggattcattaacattatgttgagagccatggggaacactttcagtatgaggtaggaggactgggtcccagcaaagcagaaagggaggatgagtcagggaagtagatggaacactaaaaaagcacagcttcatggaagtccaggggagaattgagagtttgtaggatgaggaagtgatcagtgataggattcatttatttaacaaatatttatagagtgtttacagtgtgctggacactgggctgggtgctggccacgcagcagtgatccaaacacaaagggttcctcccctcgaggattaggctttggtggggaagggagggaattaataaattacaagatattaggaagtaaatcagtgggtcggtgccagagagcatcggggggtaagaaaggcaactttaaatggtaatgccaggaaagttgaggcctgaaggatgagaaagagtctgccaggcagaagcctggggaagaacatttcagacaaaacaggcataaagttttgagagcgagaagcttggcacagtcgaggaggtaagaggaggccagtgtggctgaagctgagagagcaaggggaagagcgatggtaactgagatgggtctggggagcccggcagtacagtgggcagccttgaaaatattgagaggggaggcgtggcctgactcatgtttcacgatggtcctggttgctgtgtatggagtgcattgtaggggcaggaatggaggccagctggcaagttaagcatgaaatgctgtggcaggtgactgagaatgaattagacatgtacattgtatatggaataaaaaaaatctgaagggctccttatcattgtttcagtgacatttatttctagaggctgatatgtttattgtcattttccagagaatgacagaagagattctgagggtatcctttttcttttgtgcttgaaataatttaattagctgtttaggaaggaatgctcatgctattggacatggatgatgcttttgcctggctccagtaaaagagatgggaatttagtggggatgcattcttttgaatcattgttgaattattggtttctgtgagaacatttgtttctgccctcagctctgcttatatgtaagttggtagcactagaaatattagactaactatagtcagtctccaaatgactttttaataacctctgtttagactctgtatgtagtatcttttagaatttttggtatgaaaaatttcaaacttagacaaaagagagcctgatataataagcccccatgggtacccatcattcagtgtcaacagcagtcagctcacggccgatcttgggttcatttctacccgcaaacattccccgccaccctcatcctgtttattttgaagcaaattccaggtatatcatttcatctgtaaatatctcagtatatactttcaacaagtaaggacttttccatattttagtgtttggttttattcccccttagagcacataaataggtaacgtctgtctggacggtttgcctgccagagtccccgtgtatacctcttgtcccagtgtatttattaatagtctccctttccacttcaaagagtctctgtttggacagtaaattatttggtgacctcatgtacataagagaaatcttttcataggggacagtaaataggttctttaatagcactttcagtattgagtatttttctaatagtatgtcactgttctatttttgttttttgtttttttttttaaatcaggagagcaagccctggaggttcactctttcaagaagtcgtgtgctgaggtgtaatgctacacaagtcagaggaaggaagggtcctgaaacacatggtgaggaaggaatgagtcagctggattgctgtgattacgccttcttttctttttcttccattctgttgtttctttgttacaatttggtcataagtgcaaagaagattcttttgaaagcaagagatttaaacatttgaatcacaaggataatgtaaatttgagtatttggtcagctgctaattatccaagtttagattatccaaatacttaaaccttttagtaatattatcatcaactttaggtctgatgtcttgtcaggtgttctttgtaatggacaaagtgactcacaccatcatttccctcctctcattctttgctgttagctgattctaatatcctcttttctttctttcttttttttttttttttttttgagatggtatttcactcttgttgcctgggctggagtgcaatggtgcgatctcggctcactgcaacctccacctcccgggttcaggcgattctcctgcctcagcctcctgagtagctgggattacagttgcgtgccaccacacccagctaattttgtatttttagtagagatggggttttgccatgttggccaggctggtctcaaactcctgacctcaggagatccgctcgcctcggcctctcaaagtgctgggattacaggtgtgagccaccatgcccagcctaatatccccttgtctttagaaattgttattataatttattgacagattaaaatttaatgtccaatgttacgatgaaataaaatgttacttgaaaaaatgttagaatgtttaaaggaatctttattctgaaacataattaaaattatgtttataaaaatggtaaaaaggagagaagactattacacctttaatagttaaacatctttgacagaggtagaagctagagaaagtggttgtgcctctgtgaagtcctactcattttatgctacgtgtacccttgtttgtttatatcttatctcttagggtaagggaagttccatgaggtcaaggattatacaccctagattctcccacagttatacttagcatgtcttagccctgttaagagtatggtgaatattttttggaagaattaaaaaaagaaaccgggaatattccctggcatagaatattatgatttgtttctagctgtgttgaatttgagggaaagcaagtggcaagcctctgcagccagtggcagtgaagcttggtgagagagcagggctgggagtgttgctgagggactgagtcgctacaagcgtcctcccatccactgcactttgtatcacagcaacgtggtgcattgccgtctccgtgcacctatctccattttagaagattaggaaaccaaggtctgatagcaaatctgtcagcaaagaaggagaacgaatgcctctcatttctaagtatagtgttctttctaaaagagcaagttactatttatattttaagaaagagcacatgatgtctgctaatggaagataaatgagaagcaaactgggaaatacattttgtctcaggattactgcatctactactggataaagatcaaaagagttctcttcaaccctttcaactctacatttaacaaattgagcttttcagagtctttttttgtaaagtatttccaaagaagacttataggttaggaataaacataaactacccaggttggctaggaaggtatttctgttcatctaaagatgatgcccaggtgtggaacaggataagaaaagaccatggacatctttgtcccatgaatttagttggtcatcgtgttacagggctataatgccgctctagatccagttaaataagaagtggggaggggttgtaaactgcagctttttggggcacttatccatttattaccccaagtaaaagacctataccaaacagcaaacaacatctctgcattgtcattataatgttctttgagacacagccagtgttccagccattgttccatctaagatttaagcattttctagaaatgtatggtggcaggggtgttgaacataacttcttcaagactgacatggttctctttcttttgcaggcctgattgttggcaaaggcatcataagaagctggcatttatttctgttctaacctattactgtataactgtgaatagacactatgcatatttgttggtcagcaaaaccaagaaacaagagctatggcatttgaaaaagtctgtctgattccagggtgtttttcctgggtttcatcatcaggtacctcctccctttcatctcagcaagaatgtggcaccttttatcgtttgataaagattaaggacatgttctttggtcaacagccagaacttaaaatctgctggaatagggtcagagaccatttcagctgcagctgaggaaaatgaaatgttcattttatttggtgccttgtctggggagcacactaactcttctggaaacgtgtcagtgaaacagagatcgttttgtggaatagcaacccatggttatggcgagtgacccgacgtgatctggggggcaggctgcagaggactcatgacaggctataccatgctgcggaatgggggcgcggggaacggaggtcagacctgcatgctgcgctggtccaaccgcatccgcctcacgtggctcagcttcacgctctttgtcatcctggtcttcttcccgctcatcgcccactattacctcaccactctggatgaggctgatgaggcaggcaagcggatttttggtccccgggtggggaacgagctgtgcgaggtgaagcacgtgctggatctgtgccgcatccgggagtcggtgagtgaagagctcctgcagctggaggccaagcgccaagagctgaacagcgagatcgccaagctgaatctgaagatcgaagcctgtaagaagagcattgagaacgccaagcaggacctgctccagctcaagaatgtcatcagccagaccgagcattcctacaaggagctcatggcccagaaccagcccaagctgtccctgcccatccgactgctcccagagaaggacgatgccggcctccctcccccgaaggccactcggggctgccggctacacaactgctttgattattctcgttgccctctcacctctggcttcccggtctacgtctatgacagtgaccagtttgtctttggcagctacctggatcccttggtcaagcaggcttttcaggcgacagcacgagctaacgtttatgttacagaaaatgcagacatcgcctgcctttacgtgatactagtgggagagatgcaggagccggtggtgctgcggcctgctgagctggagaagcagttgtattccctgccacactggcggacggatggacacaaccatgtcatcatcaatctgtcacgtaagtcagatacacagaaccttctctataacgtcagtactggccgtgccatggtggcccagtccaccttctacactgtccagtacagacctggctttgacttggtcgtatcaccgctggtccatgccatgtctgagcccaacttcatggaaatcccaccacaggtgccggtgaagcggaaatatctcttcaccttccagggcgagaagattgagtctctgaggtctagccttcaggaggcccgctccttcgaagaggaaatggagggcgaccctcccgccgactacgatgaccggatcattgccaccctgaaggcggtgcaggacagcaagctggatcaggtcctggtggaattcacctgcaaaaaccagcccaaacccagcctgccgactgagtgggcactgtgtggagag

SEQ ID NO: 11918 - DNA, 6000 bp, Homo sapiens; identical to SEQ ID NO: 1306

SEQ ID NO: 11919 - DNA, 6000 bp, Homo sapiens
ggtgggtggatcacaaggtcaggagttcgagaccagcctggccaagatggtgaaaccctgtctctactaaaaatacaaaaattggccaggtgtggtggcaggcacctgtaatcccagctacccaagaggctgaggcaggagaatcacttgaacccaggaggcagaggttgcagtgagccaagatcacgccactgcactccagcctgggcaacaaagtgagactccatctcataaataagcaaccaggtgcagtggctcagacctgtaatcccaacactttgggaggccaaggcaggaggatcacttgagtccaggagtttgagaccagcctgggcaacatggctagactcagtatttacaaaaagcacaaaaattagctgggtgtagtggtgtgtgcttgtagtcccagctactcgggagactgagtgggaagatcacttgagcccaggaggtcgaggctgcagtgagctgtaattgcgccactgcactccagcctgggcgacaaagtgagactttgtgaagaagaatatatatatatttatttatttatttatgtgtgtgtgtataataaatagcaaagggtctatttgactttttttttttttttttgagacaagagtcttgctctattgcccaggctggagtgcagtgacgcaatccgcaatctcggctcgctgcaacctctacctcctgggttcaggcgattttcctgcctcagcctcccaagtagctgggattacaggtgcacgccaccacccctggctaatttttatatttttagtagagatggggtttcaccttgttggccaggctagtctcgaactcctgacctcaagtgatccgcctgcctcagcctcccaaagtactgggattacaggcacgagccaccacgcccggcctctgtttgatatttttatattaaatcattttcagaagccatcttatgaagaagatttgatccgttctgtgacttaatgtagataagtgagagaacaaaggggaaaaggagattaaaaataagtaacaataaaacttctggatatgaaataaatacagggaacactaagaaaggtaaagaaactaggcaacataaatacaacctcagggccagccatggtggctcacgcctgtaatcccagcactttgggaggttgagatgggtagatcacttgagctcaggagttcaagaccagctgggcagaatgatgaaacccccgtctctaccaaaaatacaaaaaagtaactggatgtggtggtgtgcacctgtggtcccaggtacttgggggactgaggtgggaggatcatgtgagcccaggaggcagaggttgcagtgaatgaagatcacaccactacactccagcctgggtgacagagtgagaccctgtcacacacacacacacaaatacaacttcagatacctggaataggaagaaggaatcctagtaattacttgggctcacaccatttcctcttgtatccttatcccattttgctttctcgaatctatgggccctggaagaataggggcaagagaagcattacttacccttctttctatgttcaggataatgatcacagatagagctaataggtgaaatgatctactcatctctcacaacccgaaggcactccaaattactgacgttcttatcattaccaggtcctgatcatttattaatggatatgcttcagtgaggcaaatcagttagtttacctcctttctgcttccaggctgtagagaagtaaggctcaagaatctaggctctgccttaagcattccaatttcactaccagactggataaaacactgaaaatttgtacctgagtgttaccagttgcttgagtcagtaggactggtaaccacagtgtgcttgtaggaaacagaagctgttgctgctgctatttgagaaattcttacctgttgggaaggagattaggagttgtcatctactggtagttcagaagttagctattttccttctgtttttcacaaaaatttttgaagcgttctgagttggtggaaatggacaacaaccaatgaatcactaacaagtataaaatcagccagtctcagtggttcacgcctataatcccagctactcaggaggttgaagtgggaggattgcttgagcccaggaggtcaaggctgcagtgagctgttttgtgcctctgcactctaggctaggccatagagcgatactctgtctcaaaaaagaaaagcataaaatcatcttatttatatgaaacttaagaatataaaagttaggccgggcgtggttgctcatgcctgtaatcccagcactttgggaggctgaggcaggcggatcacgaagtcaagagatcgagaccatcctggctaacacagtgaaaccttgtctctactaaaaacacaaaaaaaatagctgggcgtggtggcacacgcctgtagtcccagctactcaggaggctgaggcaggagaatcgtttgaacccgggaggcggaggttgcagtgagccaagattgtgccactgcactccatcctgggcaacagagtgagactccacctcaaaaaaaagttaatgaaaaattattcatttctatttgaaattcagtagacattttataatttcataccttcatttttatctcaacatatattcataaatgttgtaggtgatgattgatttggctgtatcactagagggcaggtatgagttacattgtttatctggaaaccatattagtattgaattgctgctaaaccacctcttggtattactgtgatatttaaactttatttgaaaatttcaccaaaaaacctgagatgattttttcctaaaatagcctatcaagactcttccacctgctacttctaccgagccatctgtaatcttatcaaaaagtgattctgacaagagctcttcccaagtgccgccaatactacaagagacagataaatccaagtcaaataccaagcaaaatagtgtgcctccttcacagagtaagtaatcctcattttttgttcctttgtactgtttacatttttcatgtgttaaggttctgatcttaaaagtctaatggaggccaggcgcagtggctcacgcctgtaatcccagcactttgggaggccgaggcgggcagatcacgaggtcaggacatcaagaccatcctggctaacatggtgaaaccccgtctctactaaaaatacaaaaaattagccaggtgtggcggcgggtgcctgtagtcccagctactcgggaggctgaggcaggagaatggcgtgaacccgggaggcagagcttgcagtgagccaaaatcgtgccactgcactccagcctgggcaacagagcgagactccgtctcaaaaaaaaaaacgtctaatggattaataagagtagccctttcttcctttgaaaatgctaaattctgccgggtgcggtggctcacgcctgtaatcccagcactttgagaggctgaggcgggcggatcactaggtcaggagatcgagaccatcctggctaacatggtgaaaccccgtctctactaaaaatacaacagattagccgggcgtggtggcaggcacctgtagtcccagctactcgggaggctgaggcaggagaatggcgtgaacccgggaggcggagcttgcagtgagccgagatcatgccactgcactccaacctgggcgacagagcaagactctgtctcaaaaaaaaaagagaaaatgctaaattttttggacgtttgtctacttaagttgtgaaggccaagttgttaaaataactaaaggaggctgggtgccgtgcctcacacctgtaatccgagcactttgggaggctgaggcgggtggatcacttgaagtcagaagttcaagaccagcgtggccaacatggcgaaaccccgtctctactaaaaatacaaaaattagctgggtgtgctggccgaacatctgtaatcgcagctactcgggaggctgaggcaggagaatcgcttgaacgcgggaggcggaggttgtagtgagccaagattgcgccattgcactccagcctgggtgacagagcaagactcaataaataaatgatcaatctatctatctatctctgaaggagagaatacattgctgagaacagagagggagaactttcatgcctgcctgcttgtctatgtggtccctctccctttttctctgcacatgttcttgaggctacaaattattctatgctttttttcctcctttactctcttcagctacctttagtatccattttacccatttttctcttttattagttaggttgagccatattaaataacagtttttttgggtcaaaactggttgaatatcagcagttccatatagttcaacctaataataccattgaaaggaaaggagggaagaagacatagaataacttaaaatatataacgagggcttgaaaacttaaacataaaatttgagtattttaaaacattgtttcatagttactacttttatattattgagacgtaacagtatttaccatcctcctaatttttttcttcgttttcccccttttcttttttagccaagtctgaaactagctgggaatctcccaaacaaataaaaaagaagaaaaaagccagacgagaaacgtgaaattttttttcctgaattggacatgtgtttgcaaacacttgtcttgaagattatgctgtttatgcaataatttgtgaacatgtacagagttttatataaatttaaaccaatttttaaaacaaaactgcggacaccaccataaaaatggaatcaaaagaaagttaatttatgaaattaagaggtcagcagaatatactcagtgatggaagacacttgggaaagtctttttaatagaacaagaacgatcttaatttaagaatattatcctggtttaacaacagtgccctgtttacaacagattgtgccctatctcatctgcagccgaggaataaaggattctgattagaaagagggttgcctacagattagtaagcaattccttggatcttatgcacagaacttgtaccatttgaatctgttttatgcttaaatcaaagtgctttgatcaaatgcataacctgccatatctttacatatttgttggtagcaatttgtattaaagaaatcacaagtgcaaataaaaagtcatttatcatttgtttaactaaactgtcatggtttagtttacaatttttaaaaagttcttaaaatactgaaaatgcagttgacacttgtgtatggcttatgaagttatttttgatagtcttacattacttgaattgttcaaagtacagtatattttaaattaagaaaagtgaactatatgtatttgttttatacatttaaggcttagactcataaataatgctattgtttatgatttgaaaactttcaggcaaaatccaatttacatttttcccttccctagcaattacttttttccagcttcaactcttcttagttactaatactttgttgactttaaaaatgaaatcattcacaaacttttggtatatgatggagaatgaaaaactagagtcagacagctttaattgacattgtcaacacctccagttatcaggaatacatttttttactgccttaacctgtagtgcgtagaatatgcatcaatttcttgaaggagattcatgtttttataagaattttcatgtaattattgcaattgtggtcaaataaggaacgtttcctgcttgaaattatattgatttaaatgatgtgtgagatgtttcaccattttcaggcactgtgtaattctattgtaataaactggcaggtatctttgtaactataaatagtgcatgctcagccatgtacactgtaaatagcctttaccaaacgtgtttgacaaggaccataattaacatcacttagtgaattgtgataaagaaaaaaaagccatgatttattcgatgtgattggcttgtttttatgtggcgccaagaacgaacctgtttaacagctgtaaccaatggtactgatctat

SEQ ID NO: 11920 - DNA, 6000 bp, Homo sapiens
gggtgcagtggctcacgcctgtaatcccagcactttgggaggctgaggcaggcagatcacgaggtccgattgagaccatcctggctaacagggtgaaatcctgtctctactaaaaatataaaaaaattagccaagtgtggtggcacgcgcctgtagtgctggctacttgggagactgaggcagagaatcacttgaacccaggaggtggaggttgcagtgagccgagattgtgccactgcactattgcaccactgcactccagcctgggcaacagagcgagactccgcctgaaaaaacaaaacacaaaacaaacaaaaaaacaccccaaaacttacatgtaaccatgctcactatttttaaattttttcaaattttcaaactatatgtgggtaacctcatgctattaccataaaagtatctgctgaccttacttcttcttatttcctgaggatattcatatattaccttaaaaattgaatggtaagccaggcgtggtggctcatgcctgtagtcccagcactttgggaggccaaggcgggcagatcatgaggtcaagagattgagaccatgctggccaacatggtgaaaccccgtctctactaaaaatagaaaaatcagctgggcatggtggtatgtgcctgtaatcccagctactcaggaggctgaggcaggagaatggcttgaacccaggaggcggagattgcagtgagccaggattgcaccactgcactccagcctggcaacagtaagaatccgtctcaaaagaaaaaaaaaatgaatggtaattgaagtaattcctagtaattggcgtagagatttctagtggacagtggggaccaaaggtttgcgtttctgtttatattgaagttttttgtgtatattagtttcagtttctatatatattagttgaacttgtaaaggtaaagggagatattctctccccgttaaccatgattaaagagtatgagaatatttgctttgaaaagaaaatctctttacatgtttgcttgtattgcgtactgtatttctgcttttttgtaaggtatggcttgccagtgaacttccaagcaatgctacttcagcccaataagaaaactttgaagaaactgagagaagtattacatgaattgtataaacatctagacagcagtgcagcagctattattgatgtaagtacttattagcccagtagagtaagaattgaagtgaatttcagaaaaaaaatgattgaaagaagatagacagaaaagggagggtaagtatgaaacttaatcattttttattactttgaggttctcaatttgttatgtaaacatagtaatttacattgtttaccctgttttatactaattatatctgtgttttgcttcttggcatttctacaagctagtaattatcttgctgtgtatcagatgtttatagctgcagaaatacagaaaccagtgatactagttatttacaaaaactataaattgcagagaggaagaaaataagcagttattttaattttatttggtagaagcgatagagtcaatagatgagtattttcaaggtaggttcatttttctaaaatggcgtagctgggcgtggtgggacatgttggtagtcccagcaactgaggaggctgaggcgggaggatcacttgagcccaggccttcgagaccaacctgggtaacatagtaagatcccatctgaaaaaagaaaaaaaaaaacagaccaaaaaatgtattatgtgtttatatcttcttttaaacaaaactgttattttttaaacaaaagaagatataaacagagttacttgtgtttttttgttgttgctgtttaaaattgtagtgggccgctgggcgtggtggctcacgcctgtaatcccagcactttgggaggccgaggcggggggatcaccttaagtcaggagtttgagaccggcctggccaacatggtgaaaccccgtctctactagaaatacaataattagctgggcgtggcagcggtcacctataatcccagctactcgggagcctgaggcaggagaatcgcttgaacctcggggggtggttgcagtgagccaagattgcgccactgcactccagcctgggtgacagagggagactccgtcccaaaaaaaaaaaaaaaaaaaattgtagtgggcttttactttatatttctggttttaaatatcttgctgatttttttttttctctttaaaagtttagggtagatggtagcatctcacataggcattaattagaactatgaaaaatcagtttttcttgatagaaggaaatgcgggaaatgacttgctacactttttttctttttctttttttttttttttttttcgagatggagtttcgctcttttgcccaggctggagtgaagtggcgtgatcttggctcactgcagtctctgcctcctgggttcaggcagttctcctgcctcagcctcctgagtagctgggattatgcctggctaatttttgtatttttagtagagctgcggtttcaccatgttggccaggctggtcttgaactcctgacctcaggtgatccgcccacctcggcctcccaaagtgctaagattacaggcgtgagccaccttgcccccggccaacttgctccactttcatgcaattgtggataaaatgagaggtataattatttgatacataaatgttctagcagtaaattcttataacatgcatttataataagtgttatccttgcttgttttttggctctgttgctcaggctagaatgcagtggcatggttttggctcactgcagcctcaacctctatgctcaagtgatcctcccacctcagccttccaagtagttgggactataggcacgcagtaccactgctggttaatgtttttatttttattttttgtagcgatagagtctcactatgttgcccagactggtcttgaactcctgggctcaaggccttggcctctcaaagtgctgatattacagaataagtattacttataaatcatacttgctttatttttactccatattttgtaagtcttgtatcccatcaactcagtattctaagtccaagatttaaaaagttaatttttacagtatacataaaaaaggttggtgggatcatgctaaatacatatgcagtcagaatgcttgaacctggctttaccactcactgtctgtgtttcctaggagaagtcagtctttcagagattgttttctcatttgcaaaatgggaataatgtctaactcagataaattagccttaagtgcatacatttagcccagagtagatgttcaataaaaaggtaaatgttaatacttgctttctttttttgagttctgtaaatacaaaattgaataattgtctgttttttccataggctcctatggatattccaggtttaaacctgagtcaacaagaatactacccctatgtgtactacaagattgattgcaacttgctggaattcaagtgaaaatgggctcctcccccgacaatcctgtccttgtgtttgtgtgtgctaacagaaataagttgcagtatggtcgtacttttaactctagtatcctttgcttgcttcttacgccctttcctaggtgaattctcccacagtggtctgtatctcaacattttctttttaaaggaaaaaatatatatatatagtttctttttattgatcaggtctgtaaatgtgtactaaaaaaatcagagtttatttataaacaaaatagtttatttaaagagaaggtctcttccttattgatatcatggtatgcattaattccatttgttactattgtgcacaaaagccctgttcacaggggaatggtgtaaacatttatactgttttgttcactgtatttagtagacataactgttgaatagttactgaatcatgatgtaaagaatatgtgaccatcttcaggtatgggatttctgaacgtttcaaatttcaatcaatgagcactgtcaacacccacaggagagaataaaattacctgtgcaaaggtgtattgtggtgtgtgtaacttaagattacagttctgtttgagagttaaatgatgtcatagctcacttgctatgctgcttccaggattttgttatatgctgaggtgtaaccatttgtgttgtctgactttcgtatgatttaattgagccaaatttgggtcagaacacaaatttgaagatgacttttcagtatatgatgggtatttacatttgaacactagaattttaggtctctcaaataattaagaatagagccagttttgaataaagtctagcagaactatgcagctttagtcatttgttttgtctaagtctgtattttatgtgttgtcttcttaagatctataattttggcatttatgtcatttgtgacatagtctgaaaatagagacattgttggcctttaaaatctcagaaatgaatgacttaatttagtgtcctgaaagagcttttaaaagaggattttgtggcaatgtttctcttactacgtactcacaggtttgcaaatgggaaaaaagtttacatttcagtttaggggcatatctaagctatgctattccctttagaaaattagcctccaaaatcttttgtttcaaaatattatattatttcataaataatttcaagcaaatacagacatccacaatgtagaacatgagagaccccctccctcaatttccacctcccaagggaagtttatgtatttttctaggcccttttctatgtctttacatctctgtctcacacacacacacgtatacacacacacagtttatttttaataaaataggattataccacacacatcctgtcacttgcttttttgcttaagagtatatctaagagaatcctttgtgtcagtgaagctggagctacctcattcttttaactggctgcgtggcgttccattgagtgtctgtcatcatgtgtttagccgagtggatggatagtctgcttgtttttagtttttgctcttaacaaacactgctgcagtcagcatccttgcacagatttctttgtatacttgtattagtatttctgtaagatctgagaagtggaatttgtagggtcataggttatgtacacttaagtttttgacactcactgccaagtcatctgtcagaattctaaactaaagacatgtttggagtgtggatttatcttcagtttttctttggacaagaggaagctgtgaaagattttgctatcagaaaattttggttctttgtcttttgcacatgttctttgagtcttagtatctgtaacgtggcgctactctctctatcatgggggggcatgttttgacattaaattgacttttaagaaaaacatgtcactaacctgaagctcagccacacagtgacttttaaggttttatttagactttactgttgttctcatgagagtaggtacagactgcataaggtttagaatcccagcatatgtctgaaacgacgggactttcactgtgatttccaccagagaaattatagcagagtggctgagcatgtgctctgaggccaggccccagctctgctgctgacgagctgtgtggtcctgggcagagtggtctccgagttccagtccctcctctgtaaaatgggcatgattagagtgcccaccgcattagggatgttggggtgagtcagtgtgaccccacgtgcacagaaagtgctgcgagtggtgcatggtgagaggttgatgcaggtacttagcccttggggaacacaggtagttccttttcactgtgtttaatttgggaaaatccagatccacatcattgtagagtctgagggttagaaggaagtcattgtgtctaacataacaacagagcagtttgtgtcactgagctccagtctgtgctggattattgatattgttggtggcggtcaccattcctggaaagggactgtcccaagccacttaccttcccgaggagtctgctggttctccttgaggatagtgcttagataacagactcattaaacatttactgag

SEQ ID NO: 11921 - DNA, 6000 bp, Homo sapiens
cctgttgtggaccactttggggcctctggctgatgctggtgggtgaggaccttcctgggcagcctcctccggccagcaggagggaccatcaggccatgcggacccttggagagcttgggggtcggttcctgccctggagtcagctgtgtctgctgagggtccactggtgtgtggcacagaaggggtaggggctgtgcctggtgtgccagggaggccctgaactctccgggaggccagatcaggggcctcctctgggcctgctgggggcctctgcattcttggcagggcctcagggactggggcggggagaggctccttctcagaggctgtgagctccgaatgaaactccatgccctccgggacaccatgcccacttctgggtactggccttcaggggccttggatgtgggtggcatggcactggctaaatggggcccaggaggaaggcagcaggaccgtgggcatgcaggcctaatgccagggccagggcaggcttcatgtgggcttcctcctgtctggaatcctggagccgcacaatttccgacccaacaccccgtactccagagcgactggctcttaacggaagctgctgctggcaggtgtgttataacagagctctggggtgggaggctgggggcagggagggttagggccgtcagaacacggctccctcctgcccagggcaaggtggggccacgtgtgcgcatgtgagtggggcacctggtctgggtgtggcctgggaacctgcatgttacagacgccatggctttggaaacactcaggagtccagctgtgtctgttccaagatgggtcagggttgccgcagggagggcagtgactggtccacagctggtgtggctgtgccatcctccttccagcctgggcagaggccttccaggcaagatgaaagatgcggtatggacaggaggacatggaggattcagggctcttggtgtaaagatgctgtgtggacaggaggacatggaggattcgggctcacggtgtccctggaggctctggtgggcgtcgtggggctggactgctgcggggcaatggggtccccatcttcccggcacaggcatctgatctggtcatctgtttctgtggcgtgtgtgtgtgtgtgtgtgtgtgcacgtgagcacacatctctgtgtatgcaggtcagtgtgtgtgcttgccagagcttcccattgggcggtttccacactggcttctcagtcatcctgggaggtaaggcatgagcactggactgggagtcctgtctgagccaccgacttggcctgccattgtggagctgtcctgtccactcgctggacattaggccatttgtgtacaataatcccctgagatttgtatcctcccatggggagatcaaaaggggccgagtgtggccctagggtctgggggcccagcctggtgggtagacctggcttctgggactgtagtggtggaaggtggctggggcaggggaggttcactcactgggaggctggaagaggtggcccggtagggagagagaagggcagccagacagagggcacgtgggagcagcagcctggtggcaggtgtgtgagtctctgcacctggccggggtcttgaggagcaggagaggttcgggcaggtggctgaggagaatgcgggcactgagcttgggaagagccctggactggggggggggtagggactgttgggcagccccagactggcacaggtggatcgggtgcctaggcagggggtggtgagttatggcgcagctgtcttggtggctggggggagcagggataagggtggacttcttagtgaccgctctctgccccaggaggtagagtcctgggggctgggctggcctgagagacgccccctcatcctttccagggtgaggtacgagggctccgccccctcctgatatcaccaggcctagggcagcatcctgatgggggaggggcaagtgacccgggccctggactgcaggaacagcccctcctccactggtggagttcccacttcctgcggaaggaactatgttagaagttgtgtatatggggtgggggttgggtgtgggtggcggggggcctgggtggggtccactgagtcgcctcccctgtctccctgcacttcctcctggaggaaatggggacaacaggatgaagtgagggcctgctgagcccagggctgccacctgggagtgaagccggggcaggctgcagggtccgggcccttctgtgtgggcaggtggaagtggtggggatgcagtgaggctccctccagcgcggcaaggaacgggccctgggaccctcttcccagcctgcagcaggcagtggggagacaggccggagccctggacagcccccagtctttccccaccccaactacagggcctgggtctccgtgcgccatccccctcccgccccctcccgctcgctcccgctgttacagggccctagggaccgccctgtcccccgtgggccccagagcccaggccagcgctggagggaccctcctgccctctggccgggaccagggtgcccgccgcagccctgggaccctgcggccccggtccctattcgaggccccagccggagcgttccgggatccttcgggggagtgcccagccccgcgcccccgcctcccacatgactccgggtgggcccttttgacgtgcgcggagggcggggggcagggggcggggcgggggggcagggggcaggggtggtgaagggtagggggcgtggcggggagaggggatggggtggggtggggactggggtggggtggggtggggagagggtgtggggtggggtggggagagggtgtggggtggggtggggagaggggatgggatggcatggggggatgtggcagtgaggaggctgggcccttggagctgccgagtgcaggggcctggaggactccgggaaggcgtcctagtgcatcaagcgtgggcttggcctgcttgggtctcccctcctggcccccctagcaatgggcggacttgggcccgctctgggaggattccaggaacggctcctgcctggttataaatagacttctccgaaaggcctggggctgtgccagctgcagcaggtgcctcccaggcccggccagagggccccaggcaagggggtggagcccgggtgggggtgatgaggatgctggggtccacttttgtagcgccagaggcgacgggctctgtctggttgtagcatcacagagcttgatgggaactttcactctgagaccccttttatggataagaaaactgaggctggggggcaggagcagcttaccccagaggtcctctctcccagagggctagggtggggataagcagggtctcgggggcagcaagacccagctccaaatgtggtttttctgccttctggctgtgtgactcagaagggttgctcagcttctctgtgctgttatggtttgtcagtgcagtgtggcaggtgtgtgtcttgcttgtggaatgcagtgtctagcctggtatccttagaaagtggctgaggttggagattggtggggcagagtccctgaagctgacccattcttgccttcaaccttcagggagacgctgctggaagtggtgagctgagagcactgggcaggagtcagagcctagcgtctccctgtggagctgggtgcacccacgtgggtgggtgcccttgccagggagctcacacccttgggggtccatgagctggcaggcagggctacctggcttggtgtgcccttgggtggaggctcccatggggcccttcagactgggcacagccctcctgtcctctgctccccagcctgcttgcccacctggaggtgggaggaggcgagggttgccggcacagctgggccaggctgatggtgatgttttctggaagtgtgggtggggagagcctggcagggggagggggggtcgtgctctcagctgggccccttgatgacctcagattgcagggaccaggttgtttgagagctgcaagcagggccacacctccagggaccctgtgctgggggtaccacccttgccgctccaccctgctctgagggccctgggtggccagggcgggcacagagtgggtggtgatgccagctgcatccctggggttcatagtctggggagcacatgagttcccggcacaatgctcccaggaggcagagccaggagtcgcagggaggcgtttgcttgagagggtctgggagggcttcctggaagagggggcatcagtgccgagcctcagagtttgtggagcccgccgcctggctgaatcctgcctgccggtgttacctcagggtgttcctcgttgcagtgcctcagtttcctcaccagtacgctaggagagaccagcgtagccagccacagcggggtcgtgaggattaagtgaggggacagcagtgtctggcacggtgggtgctgagtaaattcatggaggagtgcccgggcggtggggctggtgggctgggcagggggtctgaactggagggactcgggcgccctcctcctcagggtgcaggacagcacctgcacggcggggccgcatttccatttccaaagctgggcgcgctctgtccaggcctccccaccaggagcgcggcccggcggctcctgccctccggacccccagcccacaggcccgtgcagccccatgagggggccagggggagctccgaggttctagggagggcgcgcaccgggagagggcgccgggccggccggcgggaggaaggaggggtcccgggcggcagcgcccccggccctcgccgcgccccgcacttccctttcctggctgggcttcctcttccccgcgcccgccctgcgcggcccctttgtttcccgggcagggcgcggctatatttaggcggcaggtgtgggagcccccggcagccgggtcgcccgccggtcacgccccccacgtgacgcccgggcgctataaatagccgcaggcggcggtggcggcagcgcctggagccggctccgcggcggaggggcggcgccccgacccagggccagcaccgtgggcaccgccaggccggcgcgtatggaggcggtgggacgcctgcggcgcgggtgagcctggcaggtggggacgcggcggacccaggccttccgggaccccagccccgccggggaggaggtggcgccctccggagggctgggcgggagccccgctggcacccagggagggggccgcgccccttaccacgaccccacccgcgactggttccccgggactccccagagcgcccgcctcagccctgaccgcggcgcagcttacttctcctgagacccgctgagccccgggcctccagcctcctcccccaaaatcacagggggcgccctgtctgaagcgggggctggattcaaacttcttaagctgctgtgccatcgggaaggagggcggtagcctccctgaacctcgatttcctcttctgtgcagggcgctgcgtgttgttcctgcctcctagatttgagccagagagaacccagttaactggacgcctggtgtggccctggtggagaatgttctcccctctccctggcttgtttcctcatctcgcaaacagggacaaggatggactctcccttaaagggtcttgagaaatagctgagggctctgggcctgctggcccgaggaggctgagccagatcttgggaagggttctgcagggcttggtagcaggagggaaggaggtagcaggagggaaagaggggccacggctgccagtgggtccccgtgctgtgggccgcgggcctggtgggggtggtagcgactcaggacacatggaggcaggggcaacctgtccccatttcgcagatgggaagcctgaggctttggcttcagggagttctcagtgcccatccctggggatccttaacccttgctctcagggccctacctggtgacctcactgggggcgtgtggttatggaggggttttctcccttgggggacagccaccaggcagggcagagccacatagtggtgccagggcatcattgctt

SEQ ID NO: 11922 - DNA, 6000 bp, Homo sapiens
tgccactgcactccagactgggcaacaaagcaactctgtcttaaaaaaaaaaaagggtctttgtcatcccgtccagtggcatgatcatagctcaccgtagcctccaactcctgggctcaagcaatcctgtctcagcccactgagtagctgggactacaggcatgtgccaccaagtctggctagtttttaaatttttttgtagagacgaggtctcactatgttgcctaggctggtcttgaactcctgggctcaaatgagcctcctgcctcagcctccccaagtgctgggattgcaggcataagccactgcacccagcccctggacgttttggatggtggactttgagtagtttggggtaggaggactctggagtggcgctgacagtcctcaggaaggagtaagctttgccatgccagggaggatgcagccgtgctgaaagcatcccaactggggaggggggggggcgcggtggggagggacagcccctggtagagagaatggggctgggtggagagagtggaagccaattgcagggagtcttgaaggtgaggcagggatgtggattttactctgtacacagggtagattttgatcaggaaaataatgtcaagcacatgacagcttggaagcaggagtctgagctgcagccccagggaggccatttaaaagattatcccggctgggcgccatggctcatgccagcactttgggaggccgaggcaggcagatcacgaggtcaggagctttagaccagcctgaccaacattccccttctctactaaaaatacaaaaattagctgggcatggtggcgcatgcctgtaatcccagcaactcaggaggctgaggcaggagaatcacttgaacccgggaggcagaggttgcagtgagccgagatcgcagcacttcactccagcctgggcgaaagagcaaaactccatctcaaaaaaaaaaaaaaaaaaaatttatcccgagatggttccggtaaagggataggacagagcatacctgagccacgtttggaagggaaccggggtctaaacttgcatcaggaggaaagcgagctggttcttgaggcttttacagatcacgtatagtggagttttgtttgcacgttctggttgggacgggcaggaagttacggatccaagctggtatcagctagagcgggtctcaccagggccagtgttcctttgctgcattctcttggggggaaataaatgcctgggggttctctttgctacatttttgtctttgggagctgcttttttctctgggatcggctgcaataggccttgtgatgccagagggtaagaattcaagtttactcttgaccaatgggttgcacagatcacaagctgcaaaatatttaatcaccgaggtcatttgagggaaatgagatttgatcaatagaagtgtctgctctgttccttaagagttgagtctaaactgcttttctccttaccttcgtttggcaaaaccacagaccattaaaaatggaaagaataactttttctaaggcccacaaaagcttatttttaatcagttgtgtggtctactcacctttgtggtgttccccttgaccggactcacaaaaataaacgtgtgcaagcctagtggtttctgagcccttttaaagcagtacccctgtttctgacaactcttatttaagataaagcccatgggtcaatgcaggactgggtctgcaaccttggcccccccaagagaaaccactgtcagtccctgtcagttgctgatcatgatgcgcgggacacccattttcatttttaaggtttctagcggaagcctgttgagcacttgaggaagaccgtgtttcaaataagggggagtgaaagagaaaagggagagtagaaaggaaggcagtgaagagccagagtgactgcacgtgtggtatttattgagcaagcatttcttgagcaactcctgggcgccaggcatcgtagtaggtgctggggatttaaaggtaccgatgacacatcaccgcactcaggttcagaaagaggactgcccttcagtgtgacaggtgccaggagggggagggcacctaacccagactgggagtcagcaccgccctggaggagaagtcaccagctaggctgagacagaagagtgagtagtgagagctggacagaaaaaaatcaggggccctgtggccactggggcagccgtgagccacagcaggggctgagggagaacatgctgtttcagagccttatgcatcggggagcggcagtcgctccactgagtctcttagggtgaacaaatggtgagaaaagtcctctccaaggctgtgggcgggatgtgggtggtaggtgagaggtggaagatgccaggagtacatttgaacatcctaaaaggaaatagaaagttcatttcccctcgtgagtgcagaggggtgtgctcaggagatgggtaacagcccaggatggtgaactcaggtgtgtccgggccacgggccttcttgaacgcgtgcgggaagaggcactggtcaggggagggacaggtgctcttggtggtatcagatcttgtgaggtgcagacaccccggtgggtccagtgctcccacccagggacagagaaggatggggcacggggagggagagtggatggtggggggcctgagggtgtgcccagtcagagggctgaggagaaaggacctttgtgtgcgacagctcctgctgccagagcaagtgtgggttttatggcagctgtggcctcccgtcctaatatagtcaacagctccaaatcccctgccctgacacctgttagcgagaggttccctgagctgacctctccttgggctgcccccccagcatgtgcatctgacgcgtcgagggccagacccccaccctctccgaatcacacgcatcctggtcagcccccagttgacaaattgccttctctcgacttgggcaggggctgctggggttttgaggggcggggtttgttcagctgttgctagggaagggtgaggctgagctatcccaaaggaaatggggtgttcctctggcaagtggcaatcttggcaaagaactgagcatctggggagggggcaactccggacacaaagaagtcctggggagggccgacctttccccttaggatgggggaaatgaaatgcgcttaatgctgctacagctgcttcctaactttgcctctttcttcctttgacttttggaggagtggggtggaaaagagatgggggttcccaggcagccagctgttttccccactgacccatgctccaattcccactgccctggctcagtagcctccagtaagtgatgcccaggatggtgcggctccgtgtggccagcgtaattccctttgtctctcccctcctcccctctccctgtcttcctctctcgccccttggcttcccttcccggccccgtggtggctgcagcccagccctggggagcccctgtggaagtggagtccttcctggtccaccccggtgacctgctgcagcttcgctgtcggctgcgggacgatgtgcagagcatcaactggctgcgggacggggtgcagctggcggaaagcaaccgcacccgcatcacaggggaggaggtggaggtgcaggactccgtgcccgcagactccggcctctatgcttgcgtaaccagcagcccctcgggcagtgacaccacctacttctccgtcaatgtttcaggttggtagccaagccctgcccttgcccctccctagacccaccccctccagccctctctgccagtttcagaggaaggtgaacctcctccccctccgtgatctgcccccactctgcttcagaaactgctgcccactaacattgctccctgcctgccgcgtggcttggctctcagagaggtgactaggtggggtgggccccagggccggagatctggggcttccaggacacacctcggaggtgattgccagggctcttgggatgttaagaccctgtgatttttttccaccacagcttgcccagatctccaggaggctaagtggtgctcggccagcttccactccatcactcccttgccatttggacttggtactcggcttagtgattagaggccctgaacaggtggtggtatccctgctctgctggagaggaacccaggtgcaccgcaagggagctgtgcgagggcagccagggagccctggagctctgtgaacttgggaacttgccactcttagaatgtgactttcacaaaactaggagttgaggaagtggagctgaaattttctttatgccatttatgcacctcagggtgtggacttggcagcagatccccaaaggtgataggaaggactggagaaagatctggcatgaaccctgatgggtgaccacatgtgtatcaagcgtgttcttacaagaaataaatacttattggggagaggtgttggcagctgctggggtggtgggtgccctatctgctctgattaaggagggcagcccccaaaccttagtagacacatgctagaaaaattctgactgtggggtgtttagcccatcctttggaaatagcatctagccacagtgtgtctagacctgcctgggtttccctatagtcagccgtccaaagaagaatacaggttgcctggctccagcacacccaggtggcaccacaagttgagaaagcgcctttgaatgtaggacggaattaagttaaataggaacagctgaccctgatggaaccacccagtgtgaaggcttccaggcagtgggggcagtgcttcggggaaggaagcaaacacgcacaggaactgttcttaaacagtttccatcccaccaagagatcatcactaagggagcagtgggactgggatccccatggggagggtgtccgtgttcatctggaactgcactagccttggtgaaatctaggggtccctaggaggaacctcagtgccccttcttcttcccatagatgctctcccctcctcggaggatgatgatgatgatgatgactcctcttcagaggagaaagaaacagataacaccaaaccaaaccgtatgcgtgagacactgtttcctatcttactgccctttgggtctgggcattgggtttaagaggggaggggaaggctgaaaggggaggaagaggagggcacatggggtcacggtgcctgttctgctaagtgccaggcactgctcacaggtgttgggcagatgggcaagacacctccaggtcctggcctgggccctgctcctgagcctgaccagctgctcctctccaccctgcctgtctctcttggctttccccgggcagccgtagctccatattggacatccccagaaaagatggaaaagaaattgcatgcagtgccggctgccaagacagtgaagttcaaatgcccttccagtgggaccccaaaccccacactgcgctggttgaaaaatggcaaagaattcaaacctgaccacagaattggaggctacaaggtacgtgtgtgtgcatgcgaaagttagagtaatgggaacaggggaggccgagttaggaagtcctgattacatgcttttcatttttttaagtaatactttccacctatacaggttattcattaaaatttttaaatacaaaaaaatgcaaataaagtttaaacatttcttcagtcttctttctgtaatatggtttttacatagttgatcacatcatgtatgtaatttccttgccttgtcatttgttaacatgagtcttttcctgatatatttcaagcatgaatatttgaaacataatttttcatgactgtataagattccattattttaaaatcccataatttggctgggcatggtggctcacgcctaaaatcctatcactttgggaggccgaggtgggcggattgcctgagctcaggagttcgagaccagcctgggcaacatggcgaaacctcctctgtactaaaaatacaaaaaattagccatgtgtggtggcaggctcctgtaatcccagctactggggaggctgaagcaggagattgcttgaaccc

SEQ ID NO: 11923 - DNA, 6000 bp, Homo sapiens
ctggcacaggagggtgcgcattacctctcggcaaacagaacaactaactggcctagtttgctggggaccgaaggatttcctggaaccggagcccgcttgcccagcaggcatggtgtattctgtacctcaggcccgcaaaaatgttttaaagaaaaaaatgagctttagggtagaagaaaaggttttatttttctttctcacattggaaaaaatgaaaactttcggacccatgaaattttattacattttgccaaaaacagaaccaataacataagtattcaaagttatgtaaagataattatttaatatgaacattatgatggtgagagggaccacggagcaaggggctgccttgcaggcctgccttccagctttgctacagggaccagaagcgggagctgagcgcaggggaggcaggcggaggccatgggcagcgaggcgggtgcgccaaagggcgccagttccggagctgctgggcctgggctgcaggagggcggagctggggccgcaaggctggtgccggccgacaaacgacgcggcgcgggcgagtgggcggaggcggctgcggggaaggctgggctgccgcgggacgcggtgaagatagcctgcggagtgtccgggctgaacacgtgagtctgagggtcgccagggaatcactgcgtggctgcctctgtgtcggagatccagatgcctggactggcctcggggtcccagcgcttgcccggcgagccggcggtccggggacgggtccgggccgaggcctgcggtgaactcggctcggcgggtgcccaggaggcgggtccggggcggggcctgcggtgaactcggctcggcgggtgcccaggaggcgggtccggggcggggcctgcggtgaactcggctcggcgggtgcccaggaggcgggtccggggcggggcctgcggtgaactcggctcggcgggtgcccaggaggcggggcaggggcggggcctgcagtgagcgcggcttggtgagtagcccaggaggcgggtccggggcggggcctgcggtgagctcggctcggggggttgctcaggaggtggggccggggcaggcctggggcggggcctgcggtgagctcgcgctgggcgggctgttccgggggcgggactgggctgggcctgcggtgagcatcaggcgatgcggcacgggtgctgcgggacacacagacacgcctacgattagactcaggcaggcacctaccggcgagcggccgcgggtgactcccaggcgcggcggtacctcacggtggtgaaggtcacaggtgaggtcaccctgatagtcccgctcgcgccgagagccctcccctcgacctgggaccgcagtgtttggggcggggctctccgtgagggggttgggaagctcgaagccgcaggcctgactctggcctttggcatcctggggttggcctgggcaaatgtgtcgtgagagacggatttgttgttctcgggaaggcgtaagtttaatttagtcctccaggacggagaccgagggccgagtatcccggcaggggtaggagagccgtaatccaacccccacctccccactgtaaacctctttccagagagggcattcccgttccaaacaccagacccagccggggaaatgcttcttcttgtctggcccaagtgccctcctgggaggggctcaaaatgcattccccccaagctgggcacagctcatccctgctggggagcttctgcagtggccgaggactcagacaaccctaaccagggctctggaggtcttctggaagaaggaaccccaagtagggacaccccaggagcagagaggaggggaacagcgagaagagacccagcttttgggcccagtcctgccatggccagccatccggcccccagggccctgcttgggatggggctgcagaccacctcccatgggacctctgcaccaaccatcccctgggtaaaatccttgtttaggcctggtatttaaggcccctctgcccatccctactccttctctagcactgcccctcatcctccccccatctctcctccatccagcgctacaggctgttttgagcttttgcaggtgctggtctctgattgaaatgtcctgatctcttctcccttcttgtcccatcccaagtgtctcctcctccaggaaaccttccctgacacccactgagttaggtggcccctctgcccaccatcatccctgcccaggcccccatgggtccttcaggcccagtactgaccacctgtctttgccacctgctgtgcagggttgcagcactcccagtagaccaggagctccgggaggcagggccggccccacgtcctctgcgcaccaccctgagttggatcctctgtgcgccacctgagttggatccagggctagctgctgttgacctccccactcccacgctgccctcctgcctgcagccatgacgcccctgctcaccctgatcctggtggtcctcatgggcttacctctgggtaagatggacaaaggacagagggatgggcagacccactttgagggcagatgggctgacagtagggaaggaggctagaattcccagcgacaacccctccttctagccccctgccccggggaaggtgacgggctgggggcctgatgggctggaggaggggcctctcatgttctgtgacccccgttcccttcccgcccatctgccaaccccagcccaggccttggactgccacgtgtgtgcctacaacggagacaactgcttcaaccccatgcgctgcccggctatggttgcctactgcatgaccacgcgcacctgtgagtctgggggccctgcgtggccctgcctggggagcacgaaggggaggttctgccctgcccctgagcatgcgggggtcctgaggaaggaggctctcctgttcccggatcctgtctgggagctccaggctgaggggccctgccctgatggctgtggatgctggggtggggccagctgggtctcctgcccctcttagcggagctggctcaccgccccgcccctctgcagactacacccccaccaggatgaaggtcagtaagtcctgcgtgccccgctgcttcgagactgtgtatgatggctactccaagcacgcgtccaccacctcctgctgccagtacgacctctgcaacggcaccggccttgccaccccggccaccctggccctggcccccatcctcctggccaccctctggggtctcctctaaagcccccgaggcagacccactcaagaacaaagctctcgagacacactgctacaccctcgcacccagctcaccctgcctcaccctccacactccctgcgacctcctcagccatgcccagggtcaggactgtgggcaagaagacacccgacctcccccaaccaccacacgacctcacttcgaggccttgacctttcgatgctgtgtgggatcccaaaagtgtccggctttgatgggctgatcagcccctcgcctgtccagggctatttatggggaggggcccagtcaggcagggagcactgagcagatgggagctgtggccaagcccaccttctgggaagccctaggagaggcccctgcctcagtctgcccctggtgtgctggggcagggggaagacaaggaatgcccgcaggtggggtggtggggagactcttaggaggaaaggctcctccaggcctagtcacgcttcctactgaggccaggagctgccaggaccggtacgggatcagggctgtgggaggagggcctttggcaccggcccctgtgctaggaagtctgccaggcccgagttggagccaccccctgcaggggagggggcggctctgcctcagcaggccccagggcccccgaagtcacagaagctttttcgggtccagcaaggggtgtgtgtcctctcagtcaaaccccttgacgtttcccaccccctcacggggagggcaccaggcctgaagctggcaggagctagggccatgctatatttggtgggtcctggacgctgacccggccagcgctattctgggcagggagggaaaggggcagagcaggtggtcccccgagtcctggtccccaaccacagcaggacccagccgagcaaggcaaaagacgcaggactgggggatgcgcgcacaggctgggggttgggagcagcctggggccggcgcgggcctgggcgtgggaaggcggagcatgccaccctctcgtggccgtgcgggggcgggagtggggagggtggggtggggagggcggagacccagcccctcccccgcagcgggatgcgcacagtgagtgggtccctccatcaccttccacctggggatgcacccactgggagggcagggtggaagccccagctgggtgtgtggactcccagggaccccaccccaggcctgggaagcaggggtcagcccaacacgcaccaatccatccccgatgcaggtagcccagggagcacctgcccctgctgtgaatggggcattcgggggcgtgagaccttttggtgccagcggtcacgctgcacctgaggcccccacctgaccagtgctcccagctctggtgtcctgagaaacccttcaagccatcccgcatgggcaggatggtgacatatccatgtggtaggattgtcccggccccaaagtatggccctggtcaggggagcccctgctggaaattgcatctccagagctttgatgcaggacccctgggggatcagggaatgagggtctccaccccaggggtctccttgcagtgagtctatatgcaggcctgcgttctgctcctggggctggttctgagtgcccagcttcagtctcctgagaacatgaggatgggagggggcagagtcttgctgagggcacacccagttcccgctggaggaggacagtgccagtcttctgcaaagggaccttgggtgggaacgggcccggagcgggaggaacgtgactccccagagggaagatgggcatcatactgggcccagagctgggaaggagttgctgccagcacagggtgggcctggactcccctcgcccctacccccagtggttgtggctgtagccctaagcctggagagcaggaccggcccggggtgtctgggaggctgccaggtgcctcccagagctcccaagggcccccacctgcaagtgccagcctcagggcagtgcccaaatgaggccctctcagctgcagccagcgatgccttgggatgcttaccgggagggaggcggctttgggctcctaagtccttgggagaggctgggagcagtcactgcgcggcttgcgcaagcccattgtcgggttgggtggcttcctcagccagggctgggagggactccaggatcaggtcctccctgtctcgagtctcagtggggtgatggggaggagacctggccacccatggctcaggggcagctgagaacaaggacctgctggagctggaagtgctgtggtgttgaggggtggggtgggcagcttctcacacctgcctcctgcctccttctgtccacctttccaccaccctgacctgtcccagccccacacatggttctgcctggctggcctgcccttggcacctggcgtagagcacacagaaggcactcagctaatgctgggcaggcccactcatggggagtgcgtggctgtgcagcaccagggaaccggcacagcagcgccggcagaaatcacagcagtaaacttgtccgggttgtatgcatcaaggtggcgatggacgtgggtccccccactgcactgtggccctgagcactgtatagcagcccggcaatgggagccattatcttgcccctttgacagaggaggacacagaggcacagggaggtgaagtagctgccccacactagtgcctcctcgctcactcaccaccccctgcaccacagtgcagccgcttctcccaccagctggggttccttggacccccaagcctgggaagggggaggtgagtttacaaaatggaaagcttaaaaggagaaaagtggaaccagaggtttgag

SEQ ID NO: 11924 - DNA, 6000 bp, Homo sapiens
tcttaaaagtctaatggaggccaggcgcagtggctcacgcctgtaatcccagcactttgggaggccgaggcgggcagatcacgaggtcaggacatcaagaccatcctggctaacatggtgaaaccccgtctctactaaaaatacaaaaaattagccaggtgtggcggcgggtgcctgtagtcccagctactcgggaggctgaggcaggagaatggcgtgaacccgggaggcagagcttgcagtgagccaaaatcgtgccactgcactccagcctgggcaacagagcgagactccgtctcaaaaaaaaaaacgtctaatggattaataagagtagccctttcttcctttgaaaatgctaaattctgccgggtgcggtggctcacgcctgtaatcccagcactttgagaggctgaggcgggcggatcactaggtcaggagatcgagaccatcctggctaacatggtgaaaccccgtctctactaaaaatacaacagattagccgggcgtggtggcaggcacctgtagtcccagctactcgggaggctgaggcaggagaatggcgtgaacccgggaggcggagcttgcagtgagccgagatcatgccactgcactccaacctgggcgacagagcaagactctgtctcaaaaaaaaaagagaaaatgctaaattttttggacgtttgtctacttaagttgtgaaggccaagttgttaaaataactaaaggaggctgggtgccgtgcctcacacctgtaatccgagcactttgggaggctgaggcgggtggatcacttgaagtcagaagttcaagaccagcgtggccaacatggcgaaaccccgtctctactaaaaatacaaaaattagctgggtgtgctggccgaacatctgtaatcgcagctactcgggaggctgaggcaggagaatcgcttgaacgcgggaggcggaggttgtagtgagccaagattgcgccattgcactccagcctgggtgacagagcaagactcaataaataaatgatcaatctatctatctatctctgaaggagagaatacattgctgagaacagagagggagaactttcatgcctgcctgcttgtctatgtggtccctctccctttttctctgcacatgttcttgaggctacaaattattctatgctttttttcctcctttactctcttcagctacctttagtatccattttacccatttttctcttttattagttaggttgagccatattaaataacagtttttttgggtcaaaactggttgaatatcagcagttccatatagttcaacctaataataccattgaaaggaaaggagggaagaagacatagaataacttaaaatatataacgagggcttgaaaacttaaacataaaatttgagtattttaaaacattgtttcatagttactacttttatattattgagacgtaacagtatttaccatcctcctaatttttttcttcgttttcccccttttcttttttagccaagtctgaaactagctgggaatctcccaaacaaataaaaaagaagaaaaaagccagacgagaaacgtgaaattttttttcctgaattggacatgtgtttgcaaacacttgtcttgaagattatgctgtttatgcaataatttgtgaacatgtacagagttttatataaatttaaaccaatttttaaaacaaaactgcggacaccaccataaaaatggaatcaaaagaaagttaatttatgaaattaagaggtcagcagaatatactcagtgatggaagacacttgggaaagtctttttaatagaacaagaacgatcttaatttaagaatattatcctggtttaacaacagtgccctgtttacaacagattgtgccctatctcatctgcagccgaggaataaaggattctgattagaaagagggttgcctacagattagtaagcaattccttggatcttatgcacagaacttgtaccatttgaatctgttttatgcttaaatcaaagtgctttgatcaaatgcataacctgccatatctttacatatttgttggtagcaatttgtattaaagaaatcacaagtgcaaataaaaagtcatttatcatttgtttaactaaactgtcatggtttagtttacaatttttaaaaagttcttaaaatactgaaaatgcagttgacacttgtgtatggcttatgaagttatttttgatagtcttacattacttgaattgttcaaagtacagtatattttaaattaagaaaagtgaactatatgtatttgttttatacatttaaggcttagactcataaataatgctattgtttatgatttgaaaactttcaggcaaaatccaatttacatttttcccttccctagcaattacttttttccagcttcaactcttcttagttactaatactttgttgactttaaaaatgaaatcattcacaaacttttggtatatgatggagaatgaaaaactagagtcagacagctttaattgacattgtcaacacctccagttatcaggaatacatttttttactgccttaacctgtagtgcgtagaatatgcatcaatttcttgaaggagattcatgtttttataagaattttcatgtaattattgcaattgtggtcaaataaggaacgtttcctgcttgaaattatattgatttaaatgatgtgtgagatgtttcaccattttcaggcactgtgtaattctattgtaataaactggcaggtatctttgtaactataaatagtgcatgctcagccatgtacactgtaaatagcctttaccaaacgtgtttgacaaggaccataattaacatcacttagtgaattgtgataaagaaaaaaaagccatgatttattcgatgtgattggcttgtttttatgtggcgccaagaacgaacctgtttaacagctgtaaccaatggtactgatctatccatccaatgttgtcattatatttgactgtggttcaacagtattgcgttgtcagactaggaaagctaaacgaacaaaatggttttagttttgctgaagactggccttattaatggacagctttcctaacaagagattattaacttttatcaggtgttaacatctgtttcaggaacatggcagtatgtttacatgtcagaagttttgtttaattctatggtatttctaaattgacttgtttaaataaattcagcaaatggatagcattgttttttatttgcttcaatatgggggtagataatagctaaagagccaaggatgaatttcttcaaatgactttattctgttagctttacataggtgttggaggattcctaaggtgtcagcattttgtaaaggtaccacaaaggagaagttgatagggaatctaattttagaatgtgccaaatggtctgtgctcaacaatataattgaactctctcaactctacctcaccatttctttatctcaaaattctgttggctttgtcaaacgttggattttatttctgcagcctagtatctccccattctaccacctatgccagatgttaaagacagcagatgttttgaggagaatggcattgtggagatgcagagatgcgttgctaagttgaggtggatccagtatagagatacctctatttcttctttatggctcaagagctaggacttggattttgttttaagagatggcagctggccgggtgcagtggctcacgtctgtaatcccagcactttgggaggccgaggcaggtggatcacgaggtcaggagttcaagaccagcctggccaagagggtgaaaccccatctttactaaaaatacaaaaaaaaaaattagctgggtgtggtggtgggctcctgtaatcccagctactcaggaggctaaggcagagaatcatttgaacccaggagacggagtttgcaaagccaagatcgtgccactgcactccagcctgggcaacagaaggagactccgtctcaaaaaaaaaaaaaagatggcagctatataaatgataaaattaattacattctctttcacatgcatgaggtgcaaactctgtcacaaagtattttaattaccttttaccttgtttcatagatctttatgtgacataaaaacagtttctggcacggtggctcacgcctgtaatcctagcactttgggaggctgaggcaggtggatcacctgaggtcaggagtttgagaccagcctggccaatatggtgaaaccccatctctacaaaatttgcaaaaagtagatgggtgtggtagtgggcgcctgtaatcccagctactcaggaggttgaggcagagaatcgcttgaacccggggggtggaggttgcagtgagctgagatcgcaccactgcactccagcatgaaagagcgagactcaatctcaaaaaaaaaaaagtttctggcacctgaacaggaactggtttccatcatcaactcagaaagcactaaaatctaggtggtgattcagggaggagcaggggaagacagcctcctatggtggcatgaataagatgcttccagaactagtagggaaataactaacctcttcaggctttatcaggcctggaggggaaccttgctcatgttagcaagaaaggtatcctagagaagccactcaaaaggctccctaatccagcctgtctccacatacatactgaaaattcttccctactctgaggcagggtgtagtggtttaggggtttctccagactggaatcctacctatctgtaccgacaattgagcaaacaacagttgagagagtccaaaaaaaaaagtattaaaatgtgattgatgtaatttaccatgtttactttatgcatgcattttattggggaggggaggtcagaataattcacccaaatctagtggtcttatttcataggctaatctggtttatatttgcattaaagatactggagggcaatatttacagagtttagtttttcttaattaaaaacagtcctctattaatatagtgtgaaatatctttcaaaatttagagtttaggtttaagatgtctactagatatctttaagattttcctgtaaactcactgcacaaactggaattactttccaaaagacttagggaatgcaaatatgttactcataagatgcattgagtattgtaaataaaacaaaccatttttgatttgtttaaattgctcgttacagttctcttgtggggagggactttgtcagtcattttgcatcttaagctagactaaactttttgttgttgttttcctaaaaccataggtgcaagctttgccgctgggaagtcatattgaattaagcacttttgaaaatgtcactgtttgtgacacacaatgttctctacagaaaacttcttctatcttatgtcattttagcagtagatgtagctgcctgccaccaggtgcaatatgtcatttgcatcagccttttcagttaaggaaattaaaacttggcatgcattagttcatatgtatgaggttggctgtgtccccaaacagcaattgcttgtacaagatagaagtttgcttctcagctgggcatggtggctcatgcctgtaatccaagctctttgggaggccaacgcgggaggattgtttgagcccaggagtttgaaaccatcctgagcaatagagagacccccatctcgacaaaaaaaaaaaaaaaaaattagaaacaaaaaaaagattgtttctctttcatattaaagtttgggaaggcaatccagagcccatatgacattatgcagggtcagggatccgggttctttctatattgttcctccccattctcaacctgtagctttttttttttttcttttaatgagatagggtctcactctgttgcccaggctggagtgcagtggcacacttctggctcacttcagcctggaactcccgggctcgagctatattctcccactttagcctcagcctccagagtacctgggactacaggtacacaccaccatgcctggctaaattttttttttt

SEQ ID NO: 11925 - DNA, 6000 bp, Homo sapiens
ctgagtgctggcatgtgggaggggcctgcgagtgctcctggaggtctgagtatgagcgccctctggtggccaccggagagccgggtgccggggctcctgcacagggaaaatccgccttcgcccaggccagtgccgctcatggccccatctgtgcccttttccactccactctggacaggtggcctgaggcctgccaagcgcccagggcagggtgtgcgaaggcacctgggcatgggagtcgggcagagagcagaggggtaggagtgcctaggccgcaggcccacccatccccacttccgtatggggaaactaaggctgggcaagggaaagtgactcctgccacttcacggcaggctggctgcaggaatcctcatccagggcccagggaacgggagtgctctgtgtccagtgcagcctggaggcaggcgggaatgccacctcccctaccactcccacccctgaaaggcaggaaacgggggctgtggccaccaaactccaggaatgaaggaagagggagttctgctggtgggtcagggaagactgcaaagcagcagcaggtacagggacaacgaaggcagcatggatgaggctgcgtgcgggccctgggcaaaggcccaggagtgggagcgaacctgcaggatccagagagggctaggctgcccatgtggctgcaatggggcctgggagctggcaggactccagaccaagcccaaggacagtcacagctcatagcccatcactgccctctgccctgtgcctccaggggtccctagctcagtctcccagcctccaggctgcttctctgtgaccctgctggacagctcctcaactgtcctggacacaacctgaccccagccccagccccagccaagactctgtcaggcatcttcagtcccacacagggcctgcaaccttgtaggtgtggacagcgcagctggccagagggggccgacagccctgcccccatgtcctgagtgcccctgaaggaggagctccctctgccagagcccaagctcagaacttgcagggagatgcttaggcataggattgagtggtggggccccaaggcacagccactgaggtttggccagcacccaggggtggggcactgtccctgtcatggggtgcatggctgactctcctggcccatcaccggatgcaattttctctatgccttaaaaatggaaatgctaaaagcagtcaaagcacaatgtccagacagagggcagctgtcagggagactgtgcaaaagcaactgaccaggtcctctgaaaagggatcctccctccacctgctcggaacttctgctctcctcaccgtccagtcgggcctgagctcccacccggccccctctggccagctgcgctgtccccacctacaaggttgcaggccctgtgtggggctgatgacgcctgacagcatcttggctgaaaggccaggtgggagaaagaaaggagcattattcagtcagatcaggggggcccaagagcctcccttaacgcccagtctcgacagccagatcccacggagggctggaggggcagccccagccgcccactccactggccagcccccaactcagaggcagctagctttggtttgcaagaggtcctttctctggtcctgccatggacaagccggactggggagggttgttgaggtcctcctcctggaggggcattctcaaacattgctctcattgatttttctctatcttctttttctacctcacttttttttttttttttttttgcttttatttttgctattttcttcattttgcttaccttgggtttgatttgctctttttgttctggtttccgagggtgaaagtttaggtggttttttttggagaacttctttctcttccaaaagaagttttagctcttttttttctaaaagaagcattagtgcaaaatttccctccagggcccacttcagctgcatcctttgactttgatgaattgtgtttgcattttcattcagttggaaatattttctgatttcctttttggtttctcctttgacctataagttgtttagaaatatgttattactcagtttctaaatatttgatgatcttttagatatatttctgttattgatttctaatttagctccattgtagtccaagcaaataatctgcatgattttaatccgtataaatttactgagatttgttctatggcccagaatacagtctgccttggaggacattattggtaaataaaggtgtgttccccttctgtgaggtggagtgtcctacaaacatcaagttggtcatgttgactggtaatgtgatccacgtcttcatccttacagactttttgtctattttttatcagttctcgaaagaggagtgttgaaatctctgttattgtggattttctttttctcctttcagttctatcagatgttgtttgttttgctttgtgtattttgaagcttaattgttaggtgcatacatatttagaactgctgagtcctcttcatgaactgatcaatttatcatttggtaatgtccctctttttaaattttttttctttctttctagtacagatagtgttttgctgttttgccctggctggtctcaaactcctggcctcaagcaatcctcccacctcagcctcccaaagtgctgggattgcagatgagagccactacacctggccagtaatgctcctctttatttctgattatagtctttgctttaaacctactttgatattgacgtagtcatgtctgtgttcttttaattggtgttagcatagtatatctctctccatctttttacttttatcttatttgtgtttttacatgtctggtgagtttcccactgacagcatatacttggctgtttctatttttatccaatctgacaacctctgtttttaattgagatgtttttgtttgtttttgaggcagagtctcactcactctgtcgctcaggctggagtgcagtggcaccatctcagcttactgcaacctctgcctcccaggttcaagcaattctcctgcctcagcctcccaagtagctgggattacaggcacccaccgccatgcccagctaatttttgtattttttagtagagagggagtttcaccatgttggccaggctggtctggaactcctgacttcaagtgatccaccttcctcagcctttcaaagtgttgggattacaggttaggattacaggtgtgagccaccgtgctcagcctgattgaagtgtttagatgacatagtgtcattattgctgtggctgggtttaaatatatgtcatcttgctatttgttttctatttgtctcattgttttttcctttctcctcttctgcagtctctgtaacatgtgcttttataaataaataattctgtatcatcacttttgttgatttattaactacagtgctttgacttttgcttttttctttgtctttttttagtgacactttagcgtcttagcatacacctttgacttactagtctacctccaagaaatagtaggccacttcacatagagtagaataaatctacaacagtgaacttccattgtccctctcctggtctatttgtattactatttttttttaaatttatttgacacagcgtcttgctctatcacccaggcttcagtgcagtagcgtgatcacagctcactgcaacctccacctcctgggttcaagtgattctcccacctcagcctcctgggtgcaacctcaggtgtgcaccaccacacccagctaattttttggtatttttttttttttagagatgaggtctctctacgttgcccagccaagcctggtcttgaactcctgggctcaagcgatccactcgcctcagcctcccaaagtgctgggattacaggcgtgagccgcggtgcccagcctgcactactattatcatacaatttacttctacatttgctataaattccttaatacattgttattatttttgctttaggtaatcaactatcttttaacttgattcaaaaataagaaaaaaattaccttctatttcctatttctggtgtcatttattcctttgtgtagatccgtatttctgcctgaagaacttcctttaacataaaggtccccaacccctgggtcacagaccggttaggaaccacgccacacagcaggaggcgagcgctggcgggcgggcaagggaagtttcatccgtattaattcatcgtggtctgaggctgaagaccgcgacatactctggttctgacctatgcgttccttccacgccccttatcccaccagagtgtgagctccatggggtgggaatattctggaacgtctgctggttttattctttgccttctccccaactaggacctggcacaggagggtgcgcattacctctcggcaaacagaacaactaactggcctagtttgctggggaccgaaggatttcctggaaccggagcccgcttgcccagcaggcatggtgtattctgtacctcaggcccgcaaaaatgttttaaagaaaaaaatgagctttagggtagaagaaaaggttttatttttctttctcacattggaaaaaatgaaaactttcggacccatgaaattttattacattttgccaaaaacagaaccaataacataagtattcaaagttatgtaaagataattatttaatatgaacattatgatggtgagagggaccacggagcaaggggctgccttgcaggcctgccttccagctttgctacagggaccagaagcgggagctgagcgcaggggaggcaggcggaggccatgggcagcgaggcgggtgcgccaaagggcgccagttccggagctgctgggcctgggctgcaggagggcggagctggggccgcaaggctggtgccggccgacaaacgacgcggcgcgggcgagtgggcggaggcggctgcggggaaggctgggctgccgcgggacgcggtgaagatagcctgcggagtgtccgggctgaacacgtgagtctgagggtcgccagggaatcactgcgtggctgcctctgtgtcggagatccagatgcctggactggcctcggggtcccagcgcttgcccggcgagccggcggtccggggacgggtccgggccgaggcctgcggtgaactcggctcggcgggtgcccaggaggcgggtccggggcggggcctgcggtgaactcggctcggcgggtgcccaggaggcgggtccggggcggggcctgcggtgaactcggctcggcgggtgcccaggaggcgggtccggggcggggcctgcggtgaactcggctcggcgggtgcccaggaggcggggcaggggcggggcctgcagtgagcgcggcttggtgagtagcccaggaggcgggtccggggcggggcctgcggtgagctcggctcggggggttgctcaggaggtggggccggggcaggcctggggcggggcctgcggtgagctcgcgctgggcgggctgttccgggggcgggactgggctgggcctgcggtgagcatcaggcgatgcggcacgggtgctgcgggacacacagacacgcctacgattagactcaggcaggcacctaccggcgagcggccgcgggtgactcccaggcgcggcggtacctcacggtggtgaaggtcacaggtgaggtcaccctgatagtcccgctcgcgccgagagccctcccctcgacctgggaccgcagtgtttggggcggggctctccgtgagggggttgggaagctcgaagccgcaggcctgactctggcctttggcatcctggggttggcctgggcaaatgtgtcgtgagagacggatttgttgttctcgggaaggcgtaagtttaatttagtcctccaggacggagaccgagggccgagtatcccggcaggggtaggagagccgtaatccaacccccacctccccactgtaaacctctttccagagagggcattcccgttccaaacaccagacccagccggggaaatgcttcttcttgtctggcccaagtgccctc

SEQ ID NO: 11926 - DNA, 6000 bp, Homo sapiens
attggtgttagcatagtatatctctctccatctttttacttttatcttatttgtgtttttacatgtctggtgagtttcccactgacagcatatacttggctgtttctatttttatccaatctgacaacctctgtttttaattgagatgtttttgtttgtttttgaggcagagtctcactcactctgtcgctcaggctggagtgcagtggcaccatctcagcttactgcaacctctgcctcccaggttcaagcaattctcctgcctcagcctcccaagtagctgggattacaggcacccaccgccatgcccagctaatttttgtattttttagtagagagggagtttcaccatgttggccaggctggtctggaactcctgacttcaagtgatccaccttcctcagcctttcaaagtgttgggattacaggttaggattacaggtgtgagccaccgtgctcagcctgattgaagtgtttagatgacatagtgtcattattgctgtggctgggtttaaatatatgtcatcttgctatttgttttctatttgtctcattgttttttcctttctcctcttctgcagtctctgtaacatgtgcttttataaataaataattctgtatcatcacttttgttgatttattaactacagtgctttgacttttgcttttttctttgtctttttttagtgacactttagcgtcttagcatacacctttgacttactagtctacctccaagaaatagtaggccacttcacatagagtagaataaatctacaacagtgaacttccattgtccctctcctggtctatttgtattactatttttttttaaatttatttgacacagcgtcttgctctatcacccaggcttcagtgcagtagcgtgatcacagctcactgcaacctccacctcctgggttcaagtgattctcccacctcagcctcctgggtgcaacctcaggtgtgcaccaccacacccagctaattttttggtatttttttttttttagagatgaggtctctctacgttgcccagccaagcctggtcttgaactcctgggctcaagcgatccactcgcctcagcctcccaaagtgctgggattacaggcgtgagccgcggtgcccagcctgcactactattatcatacaatttacttctacatttgctataaattccttaatacattgttattatttttgctttaggtaatcaactatcttttaacttgattcaaaaataagaaaaaaattaccttctatttcctatttctggtgtcatttattcctttgtgtagatccgtatttctgcctgaagaacttcctttaacataaaggtccccaacccctgggtcacagaccggttaggaaccacgccacacagcaggaggcgagcgctggcgggcgggcaagggaagtttcatccgtattaattcatcgtggtctgaggctgaagaccgcgacatactctggttctgacctatgcgttccttccacgccccttatcccaccagagtgtgagctccatggggtgggaatattctggaacgtctgctggttttattctttgccttctccccaactaggacctggcacaggagggtgcgcattacctctcggcaaacagaacaactaactggcctagtttgctggggaccgaaggatttcctggaaccggagcccgcttgcccagcaggcatggtgtattctgtacctcaggcccgcaaaaatgttttaaagaaaaaaatgagctttagggtagaagaaaaggttttatttttctttctcacattggaaaaaatgaaaactttcggacccatgaaattttattacattttgccaaaaacagaaccaataacataagtattcaaagttatgtaaagataattatttaatatgaacattatgatggtgagagggaccacggagcaaggggctgccttgcaggcctgccttccagctttgctacagggaccagaagcgggagctgagcgcaggggaggcaggcggaggccatgggcagcgaggcgggtgcgccaaagggcgccagttccggagctgctgggcctgggctgcaggagggcggagctggggccgcaaggctggtgccggccgacaaacgacgcggcgcgggcgagtgggcggaggcggctgcggggaaggctgggctgccgcgggacgcggtgaagatagcctgcggagtgtccgggctgaacacgtgagtctgagggtcgccagggaatcactgcgtggctgcctctgtgtcggagatccagatgcctggactggcctcggggtcccagcgcttgcccggcgagccggcggtccggggacgggtccgggccgaggcctgcggtgaactcggctcggcgggtgcccaggaggcgggtccggggcggggcctgcggtgaactcggctcggcgggtgcccaggaggcgggtccggggcggggcctgcggtgaactcggctcggcgggtgcccaggaggcgggtccggggcggggcctgcggtgaactcggctcggcgggtgcccaggaggcggggcaggggcggggcctgcagtgagcgcggcttggtgagtagcccaggaggcgggtccggggcggggcctgcggtgagctcggctcggggggttgctcaggaggtggggccggggcaggcctggggcggggcctgcggtgagctcgcgctgggcgggctgttccgggggcgggactgggctgggcctgcggtgagcatcaggcgatgcggcacgggtgctgcgggacacacagacacgcctacgattagactcaggcaggcacctaccggcgagcggccgcgggtgactcccaggcgcggcggtacctcacggtggtgaaggtcacaggtgaggtcaccctgatagtcccgctcgcgccgagagccctcccctcgacctgggaccgcagtgtttggggcggggctctccgtgagggggttgggaagctcgaagccgcaggcctgactctggcctttggcatcctggggttggcctgggcaaatgtgtcgtgagagacggatttgttgttctcgggaaggcgtaagtttaatttagtcctccaggacggagaccgagggccgagtatcccggcaggggtaggagagccgtaatccaacccccacctccccactgtaaacctctttccagagagggcattcccgttccaaacaccagacccagccggggaaatgcttcttcttgtctggcccaagtgccctcctgggaggggctcaaaatgcattccccccaagctgggcacagctcatccctgctggggagcttctgcagtggccgaggactcagacaaccctaaccagggctctggaggtcttctggaagaaggaaccccaagtagggacaccccaggagcagagaggaggggaacagcgagaagagacccagcttttgggcccagtcctgccatggccagccatccggcccccagggccctgcttgggatggggctgcagaccacctcccatgggacctctgcaccaaccatcccctgggtaaaatccttgtttaggcctggtatttaaggcccctctgcccatccctactccttctctagcactgcccctcatcctccccccatctctcctccatccagcgctacaggctgttttgagcttttgcaggtgctggtctctgattgaaatgtcctgatctcttctcccttcttgtcccatcccaagtgtctcctcctccaggaaaccttccctgacacccactgagttaggtggcccctctgcccaccatcatccctgcccaggcccccatgggtccttcaggcccagtactgaccacctgtctttgccacctgctgtgcagggttgcagcactcccagtagaccaggagctccgggaggcagggccggccccacgtcctctgcgcaccaccctgagttggatcctctgtgcgccacctgagttggatccagggctagctgctgttgacctccccactcccacgctgccctcctgcctgcagccatgacgcccctgctcaccctgatcctggtggtcctcatgggcttacctctgggtaagatggacaaaggacagagggatgggcagacccactttgagggcagatgggctgacagtagggaaggaggctagaattcccagcgacaacccctccttctagccccctgccccggggaaggtgacgggctgggggcctgatgggctggaggaggggcctctcatgttctgtgacccccgttcccttcccgcccatctgccaaccccagcccaggccttggactgccacgtgtgtgcctacaacggagacaactgcttcaaccccatgcgctgcccggctatggttgcctactgcatgaccacgcgcacctgtgagtctgggggccctgcgtggccctgcctggggagcacgaaggggaggttctgccctgcccctgagcatgcgggggtcctgaggaaggaggctctcctgttcccggatcctgtctgggagctccaggctgaggggccctgccctgatggctgtggatgctggggtggggccagctgggtctcctgcccctcttagcggagctggctcaccgccccgcccctctgcagactacacccccaccaggatgaaggtcagtaagtcctgcgtgccccgctgcttcgagactgtgtatgatggctactccaagcacgcgtccaccacctcctgctgccagtacgacctctgcaacggcaccggccttgccaccccggccaccctggccctggcccccatcctcctggccaccctctggggtctcctctaaagcccccgaggcagacccactcaagaacaaagctctcgagacacactgctacaccctcgcacccagctcaccctgcctcaccctccacactccctgcgacctcctcagccatgcccagggtcaggactgtgggcaagaagacacccgacctcccccaaccaccacacgacctcacttcgaggccttgacctttcgatgctgtgtgggatcccaaaagtgtccggctttgatgggctgatcagcccctcgcctgtccagggctatttatggggaggggcccagtcaggcagggagcactgagcagatgggagctgtggccaagcccaccttctgggaagccctaggagaggcccctgcctcagtctgcccctggtgtgctggggcagggggaagacaaggaatgcccgcaggtggggtggtggggagactcttaggaggaaaggctcctccaggcctagtcacgcttcctactgaggccaggagctgccaggaccggtacgggatcagggctgtgggaggagggcctttggcaccggcccctgtgctaggaagtctgccaggcccgagttggagccaccccctgcaggggagggggcggctctgcctcagcaggccccagggcccccgaagtcacagaagctttttcgggtccagcaaggggtgtgtgtcctctcagtcaaaccccttgacgtttcccaccccctcacggggagggcaccaggcctgaagctggcaggagctagggccatgctatatttggtgggtcctggacgctgacccggccagcgctattctgggcagggagggaaaggggcagagcaggtggtcccccgagtcctggtccccaaccacagcaggacccagccgagcaaggcaaaagacgcaggactgggggatgcgcgcacaggctgggggttgggagcagcctggggccggcgcgggcctgggcgtgggaaggcggagcatgccaccctctcgtggccgtgcgggggcgggagtggggagggtggggtggggagggcggagacccagcccctcccccgcagcgggatgcgcacagtgagtgggtccctccatcaccttccacctggggatgcacccactgggagggcagggtggaagccccagctgggtgtgtggactcccagggaccccaccccaggcctgggaagcaggggtcagcccaacacg

SEQ ID NO: 11927 - DNA, 6000 bp, Homo sapiens
acatgttcacagtaagaactagagagttttgttttctcaattaacgtcagaagcattagaaccagaacgacttccttctgaatggaggaaggtaaaacgaggccgagacccgctgggctgcattcccacgaggttaggcattcttagtcacagaatgagattggaggtcaccggactggtattacaagacataggttataaagaccctgctgatgaaacaggatgcagtaaagaatctggcccaaacccaccaaaaccaaaatggcaaggaaaacgacctctggtcgtcctctctgctcattatacacttactataacgcattagcatgttaaaagacacttccaccagctccatgacagttgtaaactgctatggccaggtagggaatctaccctatatggtcaaaagaggaaccctcggttccaggaaatccctgtccctttaccagaaaactcatgaataatccaccccttgtttaacatataaacaagcaataactattagtatactcagtggagcagcccctagccctgctctgcctacggagtagccattcttttgtttttttttgttttgttttgttttgtttttgcttctctaataaaattgctttcacttatggccccaaattctttcttgccagagatccaagaatcttctcttgggactgggatccctttccagtaacactgatatcacaactaaaggacttaaaagcctgataaatgtacacaagtacatgaaatgtgaatcccactattatcattttcagtaaattgtcatcaatttaaaacttttggagaatccacaaaattctcattgtccaaatccaatccacaagaatgattaaaaacagtgtgaataagacctcaaatccttcagaacgctgatattacaggaaaggggtcccaatccagaccccaagagagggttcttggatctcacgcaagagagaattcagggcaagtccatacagtaaagtgaaagcaagtttattaagaaagtaaagaaataaaagaatggctactccatagctggttgcccatttttatggttatttcttgatgttatgctaaacaaggggtggattattcatgcctcccctctttagaccatatagggtaacttcctgacattgccacagcactcgtaaactgtcatggcgttgatggtgtgtccagcattggtgggttcttggtctcaccgacttcaagaatgaagctgcggaccctcgcggtgagtgttacagttcttaaagatggtatgtctggagtttattctttctggtgggttcctggtctcactggcttcaggagtgaagctgcagaccttcgcagtgagtgttatagctcttaaaggcactgcggacccaaagagtgagcagcagcaagatttattgcaaagagcaaaagaacaaagcttccacagtgtgtaacgggacccgagtgggttgccactgctggctcaggcagcctgcttttattcccttatctggccccatccacatcctgctgattggtccattttacagagagctgactggtccattttgacagggtgctgactggtgcatttacaatccctgagctagacacaaaagttctccaagtccccactagattagctagacacagagcgctgattggtgcatttacaaaccttgagctagacacagggtgctgattggtgtgtttaacaaaccttgagctagacacagagtgctgattggtgttatttacaatcccttagctagacataaatattctccacgtccccaccagattagctagatacagagtgctgattggtgcatttacaaaccttgagctagacacagagtgctgattggtgtatttacaatcctttagctagacataaaggttcttcaagtccccaccagattagctagatacagagcgctgattggtgcatttacaaaccttgagctagacacagggtgctgattggtgtgtgtacaatcctctagctagacataaaagttcttcaagtccccactagactcaggagcccagctggcttcacctagtggatcctgcactggggccgcaggcagagctacttgccagtcccacgccgtgggcctgcactcctcagcccttgggcggtcgatgggaccaggtgccgcggagcaaagggaggtgctggtcagggaggcttgggccacgcaggagcccacggcgggggcgggggaggctcaggtatggcgggctgcaggtcctgagccctgccccgcggggaggcggctgaggcccggggagaattccagcgcagtgagggcgggcccacagtgccgggggacctggtgccccctccgcagctgctggcccaggtgctaagcccgccgagcccacgcccacccggaacttgctctggccccggttcccacggacacctctccctccacacctttctgcaagcagagggagctggctctggcctgcgccagcacagagtggctcccacagtgcagcggcgggccgaagggctcctcaagtgtggccagagcagacaccgaggccgaggaggtgctgagaatgagcgaggactgctagcgcgttgttatctctcaatgagagtgcagtagtgaggatgaccagagttcactctcattgccatcttagttttggtgggttttggccggcttctttactgcatcctgttttatcagcaagatctttataagctatattttgcgctgacgttctatctcatcctgtgacttagaatgccttaaccgtctgggaatgcagcccaataggtttcagccttactttactcagcccctatttaagatggagttgctctggttcacacgcctctgacactggttaccgtgtgaaagaaatggagtgttgttttttttacagctttcttccgaaccttactctctaaggatggtatccagtatgtccttttttttttcagatggagtcctgctctgttgcccaggctggagtgcagtggtactatcttggctcactgcaagctccgcctcctgggttcatgccattctcctgccttagcctcccgagtagctgggactacaggcaaccaccaccacacccagctaatttttttttttttttgtattgttagtagagacgggttttcaccgtgtgagccaggatggtctcaatctcctgacctcgtgatccgcccacctcggcctcccaaagtgctgggattacaggtttgagccactgcgcccggcctccagtatgtccttcactgaattgtaaacttctgaaggtcagggcattttggctttaagtgtttctatcttgtgctctcttccagatcttaccatgtagttgatatgcaacacatttgttgagtaactacattttaggccataaaggcacctgtgcagaaaagggcagtctagtctcatgcttatgtgtccagagttggttccttccggtgggttcatggtctcgctgacttcaagaataaagcttgtcaccttcgtggtgagtgttacagtttttttttttttttttttttttttttgagacaaggtctctctctgtctcccaggctggagtgcagtgacgcgatctcaggtcactacaagctctgcctctcaggttcacgccattcccctgcctcagcctcccaagtagcttggactacacgaccggccaattttttttttttgtatttttagtagagacgaggtctcaccgtgttaaggcaggatggtctcgatcacctgacctcctgatccacccgcctcggcctcccaaagtgctgggagtgttacagctcttaaaggtcccacagacccaaagagtgagcagcagcagcaagatttattgtgaagagtgaaagaacaaactttccacagtgtggaaggggacccagggctgccactgccagctaggggatggggggcgtggccagcttttatttccttatttgtcccggcccaagtcctgcggattggtccactttacagaacactgattagcccgttttacagggtactgattggtgcattttacaaacctctagctagccacaaagtgctgattggtgcattttacaatcctagctacagagtgctgttggtacattttacaatcctcttgtaagacagaaaagttctccaagtccccaaccgacccagaagaccagctggctttacctctcacttaaacctgtactgtgtcaatatccgtacatcagtaagtgttgtcgatcaagttagggaagtagtggatttctggtgacaaatgttaccctttccaactaaagtttaaagaaggtaagttgaacccaaatctacatactgctgtagccccaaacggaaatactgcaaaagctccatcaacgtctcccagtccatccagacttttacaaatggatagaccccggccgcaggaaaccaaggagcacctggggttgggttgggtgaattggctctggggctcattcttttcactacagcgccagaaaagcaaaaacctaaaccaagacccaagagaccagccctcagcctgcacctgagagcacattttccctagccagcactgagcatgcgcaggctgcgtggtgtggcgaaagcgcagccaggtccgcgctgccgccgcagccaatcggagggagggagccgcccggacattgtgaggtgccgagggaggggcggcgggcgaggggcagggcagggcggaccctggacgcgcgggcgcgcgcggaaggtagcgcggggccgcgttggcgcgcacgcgcctgagcgtgcgcccggtggggccggccgggactcgccgctcgcacgcccttgggccgcggccgggcgcccgctcttccttccgcttgcgctgtgagctgaggcggtgtatgtgcggcaataacatgtcaaccccgctgcccgccatcgtgcccgccgcccggaaggccaccgctgcggtgagtggcgtaggcgtgggctcggaggggtccactgggccggccaccggtggttgcccctcgcgcggggtgggcgttgcgggcgcgtggcggcctgcggacgaggacgctcctcccggcccgggtggggtgcgaatggtccgcgcggccgggtccgcggggggcgggggcagccggggggtcacagccggcgcgagggccagtccccagctcctccctgcattgcggaggaagtgtggccccgggacccccgcgggccggcctagggcacggcgtcagcctctgcagcgtgtttctgcctggtgtgtgggtgagggaaacctaagtccgccaggaaatcgccttattgtcacctcgcactcttatcctcaatgaaagaagtttgaagattgagtgtcctacaaggtcagacgtactgttttttagaaaactcgtgtatgaaaagtcaaacttatttttgcctccggaagcttgcttttgcagtggaaaaattctacaggatatgtgagatgttcctgatttcacttgaaagagataaactgtttttcttagaatgtgatcatttgcactcaatgtctaactgggacctctcagtgctaccccccccccattcattatctcaggaaataaagggagaagttgatcagaatttttgccatttaaaagaggtcgataaagattaagtcgccgaagatagtgttgtgtaattctctcgtaggtttcgttccgttttccaccttaagcaaagctagtgtgtaacaatcctgtgtgggcttatttaggcattgcttattaattttcctcttctcttataggtgattttcctgcatggattgggagatactgggtaggtaccattattattaatagtaacagtaatgaaactgggtcatgcaacttttgtttacgcgttcaaaggtttaatgtttaagggcgctaaaatggtattttaagattgccagttaatgtatcttacagtgcggtgattttatgttttgaaaaccctcagaattttccccttatcatcgtgagtttattgattttttaactctggtttctggaacatatta

SEQ ID NO: 11928 - DNA, 6000 bp, Homo sapiens
ataactcttttatcagaaagtataacacttaaatatatgcccagataccaataaattttagtgacaactaatactgtaatgcttagcacaattacttgcacatacgagaagatcagcacatggtcatgcagttgactaaaactatgccagaaaaataatgaggttgagaagtggggaagtaaggctgacaggaattgagttaaacctaaggagaatgaagaagtcctatcaatgattagatagaaaagagacaaggcagtctggatggaaggacttatattattaatattagcaggcttactggtggtaagttaggtgtggtcccagatagtggagcaaactagtctggtggagacaggagctagcatccttagtactggggactggtggctgcagcaggaactgtctcctaaagagaacaagatgtgggagaaagggaaaagactcagtttctagcctctatttctaaattactcagaaagcagacaactttctcaggctttcgattagggttttcagttgaggatgcttagaaaaattttaaagattcactctccccactccactctagcatctttccacctgcttgcagacaaatttcaagtagcaaatccacaaagagaataaaagtgttttaaatttacataagtaatggaaataacaatataataaaaatgagttctagtttaaaaaatcaggcagcaaatgctagggaacttcaaaaagttcatggaaaaactgaaagataaaaataggccagggctgggcacagtggctcaaggctgtaatcccagcactttgggagactgaggtgggtggatcacttgaggtcaggagttcaagaccagcctggccaacatggtgaaacccatctctactaaaaatacaaaaaactagccaggcatggtggtgcatgcctgtaatcccagctacctgggaggctgagacaggagaatcacatgaacccaggagggggaggttgcagtgaaccaagattataccattgcaccccagcctgggtgacagagcaagacttcgtctcaaaaaaaaaaaaaaaaaggacaggtgtggtggctcacacctgtaatcctgatactttgggaggccgaggcagcaggatcactggagcccaggaggtcgaggctgcagtgagccatgatcttgccactatactccagcctgggcaataaagcgagaccctgtctcaaaaaagaaaacagataaaaatataaaacataaactttatttttcaacataagctccatcaagtttaagacactttcgtaagcaatgacgccagccacttagtccattgcaaaataactgatggtcctggatatttaatcatgttaatgcagtctgtttcttaactaaagaaaaatgggtgccctttaaagtttttttttttttttaaagattaggaaacaggaagtcagaagaagcaaaattagacctcctaaggtagatgcctaatgatttaccatcaaaattcaaaattttccttgttttatgagaggaatgagcaggagcattgtcttagtggagaagcaatctctggtgaagcttacctgggcatttttctgctaaaactttggctgtctctaaacattctcatattttttttttctttttgtagagataggtcttgctatgttgcccagactggtcttgaactcctggcctcaatggatcctcctgccttggccaccaaaagtgctgagactacaggcataagccactgtacccagcctcataacacctttataataagcagacgttattgttctttggctctccagaaagtcaacaagaaaaatgctttgagcatcccaaaaaatagttgccatgaccttgcttttgactagtccacttttattttgactggaccacttccacctcttggtagctattgctctgtttgtgctttgttttcgggattattctggtaaagccatgtttcatctcctgttacaattcttggaagaaatccttcaggatcttgatcccacttgtttaaaatttttattgaaagacaactgaaattttaagtagaaaacccaccaggagaacaaaagtactcttgtctgtagctgatctgggtgcaatagtttcggtacccatcaagtggaaagtttgctcaagtttaatttttctgtcagcattgtgtaagctgaaccaactgagacatctatgatgttggatattgtattagtccattctcacactgctataaagaactacatgaggtcgggcgtggtggctcacacctgtaatcccagcactttgggaggccaagacaggtggatcacctgagatcaggagttcgagacaaacctggccaacatggtgaaaccccatatctactaaaaatacaaaaatttgctgggcatgatgacaaacacctgtaatccctgctactcacaaggctgaggcaggagaatcacttgaacctgggaggcggagcttgcagtgaaccgagagagcaccactgcattccagtctgggtgacaagagtgaaactctgtcctcccaaaaaagaattacctgagagtgcgtactgtataaagaaaagaagcttgactcagttccacaggctctacaggaagcatggctgggaggctcaggaaacttaaaatcatgggagaaggggaagaaagcacatcttcacatggccagcaggagacagcaagtgaagagggaggtgctacacactttcaaacaaccagatcttgtgagaactctatcatgggacagcactagggcgatggtgctaaaccatcagaagccatgcacatgatccaatcatctccctccatgtccctcctccaacacttcctgtcattacacttctgcatgagatttgggtggggacacacagccaaaccatattagatattgtctgtgctttttttcttcacaaattgctgtgaatggtctgctgctacgggcttcatcttcaacattgtctcatctcttaaaatgagttatccatttgtaaactgcagatctccttggggtattgtctccataacctttatgtgaagcatcaatgatttcaccattcttccacccaaacctcaccataaatttgatgtgtgttcttccttcaattttagcagaatttatgtttctctgataaaagagctcttttctaaatgtcttatcatagttagtgtccctcactagatcctgttcagacatgttacaaaaagtttattctggtgcaaaaaaaaaattgaaattcatacacacttttttataatacatattttccatgaaaatttagaagaacacttatatagatgaatgatagattatcaaagttttcctagatttgtcaggctttgttcttcacggttttcaaatgaaagggcctggagaaaccgaagaactaaaagggttgcagaaagagtcctaaggggaaagaaaaactgatatactcacatcttcgacctaggcaacaaaagttatgagtcaagatatttggtcacataactaaagataacttaggttttatgacatttttgttttttgttttgtttttgtcagttaaaatagggaaattttaactgaaatatcaatgaacagtcccattccctatcctcaccattggtacagcggatcttgtttttcttaatgtggtacatattaataaaatttatgagacctaaggtctactgcatttgaaagattaaccgacataaatggtatacttttataaaactcgttaaaatgacaaaaaggtttcacatttttgaggaacaaatgatctaaaatacttaatacaaattggcattaccttgaacacattgcatcatgattacatgaaagagctgctgaaatggtcatgtgttcagagactactacatctgtaggcttaatagtaaacgtttggttggttggttggtcggctggttggtttgctgcttagcatcaggacacccaccccttgtgtgggaaatatacaagtgtgtgagtctatgggttgaaatccaaaaagcctgatgctttttctcattcctggcaaccaagggatatgaccaaattgggtcaattgaatgcccttgcccctaactgtgaacagagagtagtgttacaaacaaggaataaaagattagaatcaatgccagtgtctttccattgccccatcgtgtcagggtccaagtgtccagtagctgtggtcccttaaccagcctgtacctttggccgtggcaccagctacctactttccctatgtccccaagttatctggtaaccattcaggaattttttttcctacttaggtatacaaaaaacagtgtcagtttttgcttgacagattaaatcatccttcagagatgcaggaaaactattagcagccaagggatgctgccaaggccagtgtctgggctctgcagttttctaacttgtgatattgggtcaccccactaagctccaggagagcagcgactgcatctggcttaatcattatgggatggccagctcccaattccatgccctaggcaaagagacattcagtgaatattgatttgacttcgacttgattgaacaaaatggtaacactgaactctaggtttcctcagtgtctgttacagatttcttgatcctgactgcttttaatttttttttttttagcaagaaataactaacgaatgatgacactaagctttaaattcaagtaaataggaggcttttttttttcgcataagcagaaatgaggaaatcaagaggaagagattagatttctgttgtgataaatcgaatctgttaaatgccatgactttttaattgtcttaatcacaagttaaaccggttgtgttgctgcttagatggctatatatttgtttaaaagtacagcagtccctcctactggactttgatcctacaaaaacaactgttatctaactcaccctcagactgtcactggaacacctgcatgaagaatgttctttcattttttaaaaacgattttgcatatatgatttatttcagctttcaaaatgattagaaaactttttattgttctacttttgttgcttgtgactatagaagaagcaaggatgtcatcgctcagttttctgaatatagagaagactgaaatactatttttcacaaagactgaagaaaccatccttgtaagttcaagctacgaaaataaacggcctaattccagccacctctttgtgaaaatagaagatcctaaaatactacaaatggtgaatgtggccaagaagatctcatcagatgctacaaactttaccataaatctggtgactgatgaagaaggagaaacaaatgtgactattcaactctgggattctgaaggtaggcaagaaagactcattgaagaaatcaagaatgtgaaagtcaaagtgctcaaacaaaaagacagtctactccaggcaccaatgcatattgatagaaatatcctaatgcttattttaccactaatactattgaataagtgtgcatttggttgtaagattgaattacagctgtttcaaacagtatggaagagacctttgccagtaattcttggggcagttacacagttttttctgatgccattttgcgggtttcttttgtctcagattgtggcattgcctgaggcgcaagcttttggagttgtaatgacctgcacgtgcccaggagggggtgggggctatctctttgctctgcttctagatggagatttcacattggccattttgatgacttgcacatcaacattattggctctgatcatgatgcctgtcaattcttatatatacagtaggatattagggttgtcaggtacattccatattcctgtttctaaaattgtgtcaacactccttttcatacttgtgccagtatcaattggaatagtcatcaagcatagaatacctgaaaaagcaagcttcttagagagaataattagacctctgagttttattttaatgttcgtaggaatttatttgactttcacagtgggattagtgttcttaaaaacagataatc

SEQ ID NO: 11929 - DNA, 6000 bp, Homo sapiens
gctcatccttgccttcctacttcactaacttacttgggacaaaatagcttctcatgcatctcttttccagtcattaggctgaagtcactttttattcatctacgtttgatcatccagagcatttttttttcttttgagatagggcctcgctctgttgctaaggctggagtgcactgatgcaatcatggctcacagcaggccttgacctccaggctcaagcgatcctcccacctcaagggatcctcccacctcagcttcccaagttgctggaactagaagcacatactactatgtctggctaattttaaatttttttgtagagatggggtcttgccattttgcccaggctggtctcaaactccagggctcaaatgattcccttgctttgggtctcccaaagtgttgggattacaggcatgagccaccttgcctagcccagagcatgattttcataaggaattaaactcaggggtctaaactcaagatacccacctagctcctggtctgtgacttcaggatgttcatggtggaactttagagttctgcaccttgcccttcggccctctccttcagcagacaaggtggcctcttccagtccagggttcgtgcccccaacccactctagttcccatctcctctcatcctcagtacctgttctatcaatgaaccatcccttcctctcaacctcacctaccaacccagatgcttgcctgcccacacatttttaaagaagcctctacccttacctcccacttgctagacagctacatttctgaaaagagttgtccacgcttactgtctcccactccgtcctcaacccaccgcaatctggcttccaatccctccactccatcgagacagctctggtaaaagttatcagccttctcattgtcaaatgaaatgaacacttgctttctggtcctttcttgatgaaatttcctgtgacatttgtgaatgttgctcattccttccttgtaaaagcaatttcttcccatgccccctggttctcctctggttctcttcttctcattattcactctcccaacagcttgaactggcaagaaagacagtgcagggtggtgaagagcctggactccaatgctccttgatatggtttggctgtgtccccacccaaatttcatcttgaattcccatatgcattcccctgcacaaactctctctctctttgcctgctgccatccacgtaagacatgacttgctcctccttgtcttctgctgtgattgtaaggcttccccagctgcgtggaactgtaagtccaattaaatgtctttcttttgtaaatttcccagtctcacgtatgtctttatcagaagcctgaaaatggactaatacactcctctactcactagtggttggccttgggcaagttactcaacactcctgtgcctcagtttcctcaactgcaagatggtgtaaggctttttagtctcattgttttccatgtctgaacatgcatcatgttctcagatcatgctgaacctggtagagtcacccacatatattatgtgttcatgctcagtctttactcaggcacttgggagtgcccagccagtatctgtgaatatatgcatgaacactactctggattgggtttccccagaagtataccttgagacaaggagatgggtgcagttactttatttgggatcccaagaacaaataaggaagtgagaaagtaaggcaaggaagggagaagaggcaaaatcaaagagtgacttaatgagggagtgactgctgggggcaactggactcattcctactggggaattcctctgaggaactgccttgagagcatttgagaattgatcttccttagggaaggggaggctgacacattcatccactgtttggttaaggactgacccagggctgttggaaacttccaggctaggcaagatcccacagcccttgagaaagcctcctggtagagaggagaaagggggcctgctttggatagacagtttctctgtacagagggcagctcattgcagctgccggtgagctcagaggtgggcccaggggacatggagccgagcatcactaacactcacgcttgttactctggttggcaggcctgtgcccccttatctagctacataggtcccatctcctccttgaaagttcgttcaagagcacccacttcttggaagcattttccaacttatctccaccctactccaccttcaatgttctgaatagccctggataccctggacatgactctataagagtacttatctctctgcttactagatagagctttcctgtctttcttagcaagaatagttctttttcatcattgcacatgtagggcccagatttttttagcacattacaggcacttaaccgatgccttaaaatgaattcaagttcaccttgctcagggacccactcagagcaagtggtcaacaaatgtggactcctttcctccatctgatttaggagaacagtcatctagtgagtatacaatatgacaaatatattctttaaacagaaatgccaaggaagcacaaaggagggagtaattaactgggactataccaatgagactatagttacctcatttgacagtcttaattacttaggttttttttttttttttttttttttttttttttgagacggagtctcactctgtcaccctgtctgggatgcaatggcatgatctcagctcactgcaacctctgcctcccgggttcaagcgattctcctgcctcagcctctggagaagctgggattacaggtgcccaccaccacgcccggcaattttttgtatttttagtagacacggggtttcaccatgttggccagactggtctcaaactcctgaccttaggtgatctacctgctcggcctcccaaagtgctgggattacaggcgtgagccaccgcgcctggcctacttatagttttagttttccagaagcactaatagagccatctggtgctccttccaccgcactgggcgttcccttttgaatctctccaccaaagaggaagccacagggagctgcgggaccgagtgaaccaccctacctcaggcagaggtcccatctgcaactctagtttgtttgcttctttcatttattcaacacgtgtttatcgatggtctcatatgggccagcactgttctaaggaaacaggcaaaggtactgctgtaatgcagtttacccatgcagtggggagagtggggggcagataaaaaataagcaaccaatcatgtaggctacattaaacagtgacaagggctatgaagcaatcaaacaggatgcgctatgtttgggagaggtggaggtggggtgtaggtgccagagacaagcagatcacatggttggggaaaacctatctgcggagctgacttctgggctgtgagctgcgtgccaagaacagccatacaagggttcttccaggcagaggggacggcagctacagtgggcctggagcaggaccctgggactcctggtgcccagctcagagctgtcctactgcttctggccacggagagagaattgcagaaaaggaacaatgctgggtctaaaactggtatctgttccttacttggagtaaacgagctggtacccaactttcagttcccagcaggttcatttcaggcttctgttttcgctcatgagcatgttgttccctcttcaaagtctgattgggtttcaaaggaatctgaaacacttacagcaaaaccaccaagctgcatcctccaggtagacacccccgaaatgtggcatttccgtgggaaaccacaatgaatcactcattggctgcccgacctctctgcccagtcagagattgattttggttttcccaaactttgtaaatccgctccagactgtttaacaacccccactccccactacacccagactctcagattaggagcaaaatcccaaattttgtgaggttttctgtttcggatttcaccagaagggggtctgccacagccactaaccatttcctctgcagagagccgtttctgaaatgctgcaaagaaaaacaatcacccaatgattaggagggaaattaagttctaaagaaagactactgtctctgactttgaaagtagacatagatatgcacaatatacatcccacaaattaaaatcctcctttctctgatgtcttttaatggtaataataaggacaagcatggctatcatttatttgggcgtttccaatgtgccagtccctgtctaaacattcagcttccagatcaaacctatgagggtggaattaacatccatttcataaatggaaactgaggctcaggaaagttgagcgagttactcaaggtaacatgagtagaaaaaaggccatattccaaccggacacagagcctgcagcccacacaattactctccatactgttcctatactatcctgactgggaaggtcctgttcccttggcactgggcaaaaataaaattataagagcagagaggaagtggtgaaagggggcagcctggtgaaatcattcctttactgaaaataggggtaacggccaggacagtgcaggtccatcctctgcagatggaagacaggcacgtcctttgccgctgtcccggccttagaaaggcaccttccgcgtccagggttttctgtggataaatcccaccccttccacctcaggcggggaggaggccggccggccggggcatggggcggaaggcgaaggacgcccgaccccggccgaggtctggggcccctcccacgcccccctcgtggctgccggcgggccaagggttaagcgaggcgggagcccccggcgcggagcggctcggggccgggaatgcttagtcaggattccgatttcctgtcgaagtgtttggatttcctgaaacccgcgccctccgccgccgagcgggatcgtgcgagccgctcgcgtcgccgcggcctcctccccctcggcacatggtcgcccgccccttcctgcgccgcgctcggctcccgcgcctcgcctggcctggccgctgccgcgggcgagcactgtgcgctgggcagccccgggcccgcgcctcccgcccagccggcgcttcccggtcgcagttcgctttcccacccgagagccgcgagcgcccggccgaacccgcgatggaataatgcccagcggcccgccaggtcccggtgagttgcggggcgctcgggcgcgctcggcggggccgggcggagtcgcccacagtcgcgggcgccccctgcccagtctctcgcgcgaagaagggcgccgggacggggcgcggggcgggctcccggctcctctcgcagcggggtgtccttctccgcggggagggcgccggccctgggctggggcgtgtgcgggacgcgcggccaggctctgcggggccgggcgaggccgcccggtgggggggggaggtctcctcgcctccagctcgggagagggggcccctgcagtggggccggggacggggcccgccctggggggtttcgcgtccccctccgggggagggcccgggacgacgtgcttggcggcccggaccccgccgatggggcgccctcccggcattgtctctggtgcagccgaggaaagttccccgcggcccccggcccctacccggacccggcgctgcttggcaggccccaggccacttgcctaaagcaaaagaagagaaacgaaagggaagggggtggggggagtcctacttggagcttggggttggctcctgggcggaccgtgaagtggcttgtgttttctgcttgtaccattttgggacctgctgcgttttctgagagcgacatgaagtttcaaagaaaaaagaaacttgccggtgtccggttttctgcggtttgatacatcccaagaggttcatcttgggcacttctaaagcagtttcctttaataatgtggttttccagtagctcagggagaaggatggtcaactgcagaccatcatcgttaacttgacctcaactttacctgtactcgtcaggaaagcaaaagaactttctctcgcat

SEQ ID NO: 11930 - DNA, 6000 bp, Homo sapiens
atgtggtacatttacacaatggatactattcagctttaaatcaaaaacaggacattctgtcactcatgacaacctgaatgaacttagagaacattatgttaagtgaaataagccaggcatagagagacaaataccatatgatctcacttgtatgtagaatctaagaaagtcaaacatagaagtagagaatagaaagggagttgccagatacacggtgggggtagagggaggttgacagggaaaaggggagacattggtcaatgggtataaagttacagttaggaagaataagttctagtgttccgttgcacagtatggtgactatagttaatactgtatattttaaaatagtgaaaagaattttaaatgttcccactacaaaggaatgatttttttaaaaaaaggaatagcctgacaaagacaaggcaaaaaagaatatgtatatattatatacatatatatatatttgagatgatagatatgctaattacccagatctgatcatttcacaatgtgtacaggtatccagacatcacattgtaccccataaatatgtacaattactatttgtcaattaaacaaaaccaaccagaagttgaagagattgcttacaaagaaagttagtcaaaccaccagcacacacttcctgaaccacaatagatgccttaagacaagaggaatagaaattttaaaacgcaatcgtaggccaggcgcagtggcacatgcctgtaatcccagcactttgggaggccaaggtgggcagatcacctgaggtcaggagtttgagaccagcctggccaacatggtgaaaccccgtctctactaaaaatacaaaaattagccaggcgtggtggcgtgcacctgtaatcccagctattcaggaggctgaggcagaagaatcacttgaacccaggaggcagaggtcgcagtgagccgagattgcaccactgcactccagcctgggtaacacagcgagactccgtctcaagaaaaaaaaaaagatgcaactgtaaagttagaattgtattcccaactaaacactcattcacaggtgagggcaaaaataatattttaaaaataaagatcaggacagaaattaatgaagaacagaaaaccaatagagaaaatcaacaaaacaagttggttctttgaaaatattagcaaaatgggcaaacctttaactagaatgacagagaaaaaagacacaaattactaaaatcaggaatgaaagagggcacattactaccaaacttacagggaataaagaaaagatactgtaagggaatactatgaacagttgtttgccaaaaaattagacaacttagctaaaatgcacagatttctatagcttactaaacaaagtatttttcccagttgtctttttttgtgtgtcaaaaccatcagatgacaacagaaatgaacaattgaggcctctaaagctcttctctttcagctgacaatgtagggagctagtacttgagccctctgacatgatttcgggttgaatagaaccttcacattccttccaatcctcttaaatttgttaagccatcccaaaacagaaaattcattttttcccaataaagcaccagagaaatctggtcactgacctccagacagactgtaagaaaagtgcgcctaaggccagcatggtggctcacgcctataatcccagccctttgggaggccgaggtgggtggattgcctgaggtcaggagtttgagaccagcctggtcaacatggcgaaaccccctctctactaaaaatacaaaaattagccaggcgtggtggcgtgcccctgtattcacagctactcgggaggttgaagcaggagaatcatttgaacccaggaggtggaggttgcagtgagccaagatcatgccattgcactccagcctgggcaacaagagtgaaactccatctcaaaaaaaagaaaaatgaaaagctggccttaagacctggggtgcagagggattttacctcatctacgtggtcaagttgcttaccttgtcaccacaaaccgcacagagggctttcatctggagtccccagcccactgtctgcacaatcagggctagaatctcatttctctggcttatttcccaaggctgttctagtcacctcagctacgggagatctggctatgtatcttttggcaggtagctatggtgtcttgtcagaaggaaaacagtagcaatgaaaatgtcagatttttgtgctaagttcccttaaatattgcccaacaccaaacttttagtgagccagcccgttcattcatccagcaaatatttattgagactctgttatatgcaagatgttactttaggagatacaggtatatagggaaatctcgtgtaatcaaggcagattaaggtctaataaggttggagattaaagtgaaataattttaagggaaaaaatataagtaccataaaccatataaagttttaattctgtggatcacaacctaataatggtcatgaagtcaacttagtgggtttgttatcacttttttttttttaaattgaactataacaaaatatcattgcaatgcatatctttatggatattttgtgaaatttttgtttgccgtattgttacttatattggagttgcagtgttaaatgtttttaatgtgggttacagtcaaaaataggaaagggtagttcaaacatgcttcagaaaaatccacaagcttgcaggcgagaggtgactttggagagttagaattttgacaagtgaaaatgggtaatgagaggaaaaagtggagagcagaggccggtcgcagtggctcacgcctgtaatctcagcactttgggaggccgaggtgggcagatcatttgagcttggagttggagatcagcctggcctacatggtgaaaccttgtctctaataaaaatacaaatactagccaggcagggtggcgggctcctgtaatcccagctactcaggaggctgtggcaggagaaccacttgaacctgggagggggaggttacagtgaaccgagattgcaccactgcactccagcctgggctacagagactctgtctcaaaaaaaaaaaaaaaaaaaaaagtggagagcagagagaagtgggcctccaagcctggcaccaggaatgagaaactgagaactacccagcaacaaggaaggatttaagagatgcctaaagaattttgtgtgtgggtagatatggagagttaagaccttttgttaataattaattgtattccctaatggattactgatagcttatcagctctgcttgcctatgtggactttgacagctccacctttagtgtggttgaaaacaagtgagaacgccatgataggcccggtggtggggtgtctggtcctgccccctctctgccgagcaatctccttgaagggtgcctagttctcctgtggacagtattgacaacttgcctggaaaagccatgggattgctctccagctttggttttaagagatttaacactccattaggatatgtgtttacgggcttcatacccttcagagctctgtgtgttggaagcatacttatttcactttatctctgggtgggcttctcactccttttccagtgcttcaacaaaaggtgtggcggggactggcccctttctcacagcccactgcagtgggatgagagtcccaaacggatgacataatgtctggaaagcaccgagtttaaccaagagagaaatagggttattacaaagatgaaggggctctgagggaaattctgcaagagatatcattactttgaaatcacttggaaaataaatgagaggaatatcaccctgcccccatacccactgcagcactgtaattacggggtgaggataattgaattttagaaacgcccggggcccagctacactcttcaaaagtaatatgaagaatctgaccccctctggcctggcgaagagcaagctcctgagttcttgctaccggctccagcgactgtctgctttccttttctccttagcgccgccatcacgggggtcctccccgcaagacctgcagagagtgggatgttgcccccttccctgcgcaaatttagagacagctagtgccgtctggggaccagtcactgtgctaggatcagctcgagtactaagccgcgacagttgggctagaaagcccttcctccgagccccccaaggcccaggtggcagcgggttcagctcatagaggaaattgtcctgatgtcctgcagaacagaacaatgggagtggaaagggtggtttattttctcaagaaatcgactacatttcccaggcctgatatacatctcaatgggactgtcccacagaggaagagtctcctcggaacttcttcacccccaaattaacatttctcccaactttgggttagtagggttctttaggcgtctgatcattgtgggaagcggtgcggcatcaagtctgaaaagtgaatataatatggtttatttggaactcgaccaggaaattttggttcttttggctggtggaaatatgcagaagaaacaccatctaagggcgcgtccccttctgaagtacctttccgaactggggagggaagagaaaagctttttgggtgaaccagaagtggtaaaatcacattcaaatagagtgggtaggactctcctccagggggtgtggggtggaggctaggcggtgagagcttcccgcgcccagggagcaggtcttcacgggaggtttccggaggcaggaggagcctgcgggtcctcgggagtcacggccggatgaaggatgggagcgggcgccgaccacagccagggccgcgaggcgcaggagggcgcaggctggccaggtccccagcctgccggccccacgtggcagccccggggcgagcggggcgggccgggggcgggtccggccgctgacgcgccgggtatatagccgggcatgcgcgcggtgccggggcccggacgcagtgaggggggtcggcgcgcgtgtctacgcggacgcaccggctaagctgcttctgccgccgccggccgcctgggaccttgcggtgaggctgcgcggggccgaggccgcctccgagcgccaggtgagggcggggacgccaagggccgcgggatgggcagcggcggaggagccccgcaccccaggctggggcagtgggtgggggcggggacagccctgcgccgaggaccgggcgccgctcccgggcaccggcacacgcccggacggctgggtggaggctgcacctggccgtggtgccgcgctggcgaggggagaggtcaaggcgcggcctgtccgcctggagggtgcgggatgctagagccgcagaagggtgcccagagcgtgggtcgccgcgccgaaggctgagccaggctcccggattccccgcgcggacacggacgcagaacgcagacagtaggtggccaatccgaggggcggctcttggggcggctctatggggctctggggtctggactttgcttttcaggagctgcgtccccgggcccccgccggtccatctcccctctgaaggtacatgtacccaatcttccggctgagcgaatctccaacctggcttgcccacgaggatggctttctggctatttttggtccttaatgaccaagttaggtggtcgggttcaggctgccccctcttggtgggtgagggcagtgggacaaagtcgccatccgagcagtttcatcatctgatcctgaggtccagttgagccgggaaaatttcgtcagctctggactaggggttcacttttgaggatctggtgcttgccagggcctgggttccagagacaggcttctctaaacagttaaagggctcggctgtacaggaggactccggacacaattggggagtggctaagtgctctcttgtggcccgaatggaagcgtggggttaggagcagctttgacctgacccttcttcctggagcaagcctggtttgggtttacgtctttagtggctctcccctaggagccccaggccattgggacggctgtgctcctgctgagg

SEQ ID NO: 11931 - DNA, 6000 bp, Homo sapiens
atacaatgagtgatttagtcactctgcaaaaggccccacctctcagtactaccacaatgaagattaagtttcaacatatgaattttgtagaactctcaggccacagcagagaccacttgtacttggcgtggtctgtatggcattatgtgtttctgcaattgtgactatttgggggtaaagaaaaaggagaagagacagatttctatcatgggtggagaaagtagaaaagttttctgagacagagactcactgggaaagttagaccaatattagcagcagtcttttggaatgtaggtcttcacagtgtgtctcatgtttggtttaaagcacttccaaaatatcagacagttatgtctgaatggaatcacacaaatgtatcacgaagtcaaatataattttttttttttttagtttctaaaatgtgtgggttcttgttcctatatataactttctgttcttcagagaagagccacatagaaagggcaggcattggtcttatagggatcaccttataggatctaaaccaatacatgccttacactttacttacaatacagcataaaatgcctctgctaatgacttgagcattgtgtttcttggatctgtgatcacttattattttaacctttcaaagccaatagttttagagcattcaactcaaacgacttttattggcctggaaatgttttattgcagtttggctgacattttcttttaataatgtcattagcactccttaaaaatgaattctgttggggtatatagtactacctttgttttgagaaaatgttatgattttgtttgtacatgaggtgggtcccatagctacaaacattagcaatatgtttctgattcaacagaaagatctttctgattctacaggcacgcttccatttctattaagcataaatagtttggttggtaaaaagacccgaatttagatgtactttttcagaattaagttgaattctcaacatcttttaagagggagtccagcttctgagtcactaggcttaattaaaatctctagcacttagtcagtttatatgccttacctattttgtaggtttagctctcgtaactgttgttatgctgacactggtttccagtgggtcactgaaatcaaattaatgcaggcctctgaaaagtcagacatcaattgtgttcattcattaagattcccatattttaaaaggtacaaaataaggaaaagtgattctgtttaaccttgaagtatcctgaatggatggacatagactacgagcattttagtggaaaaataaaaattatttgtaagaaaaatcctaaagaacaaaaaccaaaagcaaaataagaacaaaattcctttctataccaattcttttctgaatacgtaaagactcaaggtccaaactccatttcctaggcctttggaaatgcttttagagcgtactcaatactgtacattctgtactactatcgagagcactcaatttcttgtgcattcaatttcttggtccaagtgcggtagttctcaaagtctggtgtccaccatcaggcctaggaacctgctaaaagtgtcaagtcttgagcctcactctagacatcccaaactagaaacttgatgggtggggcctgcaatttgtgttttaacaagtcctcagccgggcgcagtggctcacttctgtaatcccagcactttgggaggccgaggcgggtggatcacgaggtcaggagttcaagaccagcctggccaaaatggtgaaactccatctctactaaaattacaaaaaattagctgggcgtggtggggggggtgcctgtaagcccagctactaaggaagctgaggcagagaattgcttgaacccgggagacagaggttgcagtgagctgagatcgtgccactgcactccagcctgggcaacagagtgagactccatctcagaaaacaaaacaaacaaacaaacaaaaaacaaaaacaagtcctccaggcactctttggtttgctctaaagtttgggaacttctggcctagagcattgttctcaagtatttgtgtacacctacaccacaagctcctggagaagcttgacttaacatgagtctctcactcaggccgtgagatttggaggcagtaaatgcaggaagctgtgtgggaatctgtatatatatatatataaagtaggtgattctggtgcaggtggtctgtagaacacaatttgagaaattctgccttgaagtggaatttaagtgttgacaaaattagcatttccccccacaaaatcctcctccataactaagcaaaaacctttgaactctgacttacaaatatctatagctttcacttagcctgcagagtgcctgcttctgaagagctatgcaggcttccctcatcactgccataggggactgaagcttctgtgtgctccaggtgtgaggctttgcctgcctctgctacaggtgtgcacctgtttcaacacagggatgtatgctcaaaggatgcggcataacccacacctccacagaatgtacagtattgagtatgctcagccaagacaaaacacaaggagagatgtcatttttatttgccctgagatgatagctggaggaagactgctttgagcaaagaggtttgatccctgcatatcctgccagaggaataccctgttctaagcaaggtgacctttcaagcaagttttgagaattactgatttagtatgcaaggtatgcataaatatatctaactgtgatttggggtcagacacacactgcatatcttttttccattgaaccttttatagatcagaggtgaaaaaagagattttttaatgcagaaaggtgaagtttgtgatggcaaaaaaagggattacttgtgattttattaaatcagtcatatgttttcttcaaggtattgggaccaaattcatgcattaataacattactttgttttcattgtatttgtttttattgtcatctgacatttaaggcaattaatactgtatttctacttatgttaataataaaaaatacctttaaataattttattccagtaaaatgtatgaattaatttaaaggaaaatgttaagtaaatattagtgcagatggcaatattctgaagatgccacatgaataatcaaagtgtgggaaaccctgacattattttcatgagttcagcataatccattttaccacttttccaatgctgagctttatatttgttttctgttataaacagtgcttcaaaaaacctcttgtagctaaatatttttcatatccataatggttctcttaggagaattcacagatgtggaattgttggaagaaagggcaataattatattattttaaagtttaaaattagtgtccattaaccatttccctaagattttatgaagacatttaggaagttagtaaagcagtatttatgacctacgggaatactttcttccttgttactcaaagggttgcttaaggcagtggccttcaagtgtgttctgggaccaaatgacaatttctccccaaccagcaaagccctgtggtggggaaaaggcttggtggaagatctggtttgtagttaatgttaagtaacctttccacttaattagctttgtgatctcgtgcaagacacaacttctctaagctataattttctcatccagaaaattatactgaaaataatactttgtttatctcaccaagttgtgaagattaaatagagtgatatgtgtgaaaatagcttgtaaatgaagcatgatgtaaaatgttattggtattatgaaagcccaatatatgttctcctcttgagagattcttaaagcacaattctctgacttcacagatacgtcgtctgatgcaatacagatactttttagtatcatatggggttagcgtctagaaaaagtgaagggtatgaaataatgaagaatgaaattccagtgagactctatttctttacagattgctcctccctgtcccttactcaacactagaacctggtatagcgctgtaatcaatactctgtgtgtgtgtgtgtgtgtgtgtgtgtgtgtgtgtgtgtgtgtgtgtgtgtgtgtgtgttttagacaaggtttcattctgccgtccaggctggagtgcagtggtgcaatctcaactcattgcagcttcgatatcttgggtttaagcgatcatcccctgtcagcctcctgagtagttagaactacaggcacgcacaactacgcccagctaatttttgtattttttgtagagatagggtctcactatatagctcgggctggtctcaaactcctgggctcaagtgatcctcccacctcagcctcccaaagtgctgggattacaggcatgagccatctcgccctgccaacactaactctggactttcatttgagctttgctgcttatcatcaaatctcaatgaaaacattagttgctcagaagtcaccttacttgttaatctagaaatggtctggtggctcaggatttctgagtctgggctgggaccagagccagctactcctggcacctgtgttgctggggaaacatgatcttcactgagactctgttctcttcccataatgtacattatccaaatggtctcttgttgtgggtggattcgggtaaaaattgtcttcaccacgtggggcctcagtttcctcatctgcaaaaaaaaaggagttagatgagaatctggtcactagccggtcttctaggtctctccccacagttaagatcccataattctgcaggtcagtttatgacctgcaaagggattcttccctgagggccctcacaaggttttgaatggcagagcaaatggaaatgggggaatgtccttcccaacctcccaccatgggcaggagaggaagtgttgtccaagagggcctcagctggaccatctggaggagtgaggattccactctgtgacatcacaatatccagcccaggtttgaccttgacaactgggaaggagaaataacaggaggcgcagttactgatatagccaaggtgggacactactggagggagctagaagggatcagccagccatgcctccagttcaggtacttggcattgctaagctcagaacaggacttgccagtgtctagatgaaaaagaggagagatctcaaggtgagtgtgtctccaagcttaagaagaatagtataagcacagacggcttgtgccccagctgcgttagggtaatgtaaggttccacacgagcagaagcagagctgggcgcatcttgccaacagccaggctgcttgccatgaagccggacggtgaggacatttccgaggctgtagtccacttgtgctgctggtgatatatttctatttagaggtttttttctttcaatagctcctccccggatgacagggtagagtaaacaaaaataagttaactaaggaagtattttaatagaagccagtacaaaaacaaacaaaagtaataaaaggtgcaaagttgtattatgggttagcaagcaagactgactctaaggtcaagttttgaaagttcaaatcttgaaaggcaaaaggatacccctataaagagtaaaagagaagggccttttggttgagaagtaagtaaaacagctctgctggaacatataccggaccccccaccccgcccccagcaactcctgccagtgaaatcattgctggggatgcggacagttctgttttctttaccttgccttggggttttggcttctacaatacttgtttcttcctggagtcttggggccctgagaggctctgagtgacggcaaagaactgttctgtttaccagtggggcggagcatggggccagcgccaggccctgactcatccccatgtggactcccttgggtcttagcacactgcgaccccggagttggagcacaggacagctcaggcaggcacgctgagctctgcctgcaaggtcagagttgatggcgatgctccctcagtgggagtaagagtccatgttctgacaggtaggtcagttacccacaggggaccccaacagccatcgacaag

SEQ ID NO: 11932 - DNA, 6000 bp, Homo sapiens
cccgggcccgcccacccgcgcctcttgcccgcagatctccacgcggccggaggatctcggggagacagtctgctccctcaagttcgccgaccgagtgggtcaagtggagctggggccagcccggcgccgcagggtcccgcgctcctccgggacgccttcttccctcagcaccgacactccgctcaccgggaccccctgcacccctacgccgtcccctggcagtcctccatgccccagtcccgacaacggctcgggctcggctctcgcgcccgcagagggcctgcccctctagtcctgggtcgcggccctgcccatggggtctcaggccaggtctctgctggcagaggcggtagtaaagtccctgtaccccgtctcccagggcacaagctccctagcctctttggatccattgcccctgagctcccagagtcacccctccacctccgcagccagtgaagtgtgttgtgcctgctgaagtgatcaccccccgcccccagccctgcatcaggccacaggtcttggctttctccttatcaccatttgctgttatcacggcacacagcagggaatcccaggcccccccgccaagtggttacccaagtcaccactcctgacccaaaaatcaggcatggcattaaaacgttgcaaattcctttactgttatcccccccaccaccaggaccatgtagggtgcagtctttactccctaacccgtttcccgaaaaaggtgctacctcctttccagacagatgagagagggcaggacttcaggctggatccaccactgggctctccctcccccagcctggagcacgggaggggaggtgacggctggtgactgatggatgggtagtgggctgagaagaggggactaggaagggctattccaggctcagccctgctcctgcagctttgccgctgagtgtaggaaaaacaggcatgacagaccagggtgagggttgtgcccagctgggccacggccatgcgtggggtggcccaataaacaccgtggactcccagcaaggctgctgcctggtgtttcgaggctgctgtggtcgcagacagccgcctcgccttggctccctgtcaacaaggtgggggtgggagcgggagggaggagtggcccctgtcttaagagcctcacaggctgcaccaggagagcagccagcctgggccaggggccgccaggtcccgagggtggctgacccaaacgtcgtagatgcttttgttgggtggcaccccttggaagagggcgtctagatcgcagagcagccctgggggccctcgggtttcaggggccaccccccagtaggcagggctggttgacggacactggggacaggaggtgggtggtggtgccaagggcattaccacattgggagtgtagataggcaagtaggaggtgggcagctgcccccagagggaggccctgtgtcccccgctggaccgtcccccaggaactgcggtgccctgcagtaagtggagaggccaggccctaggctctggggagagggttgagggcccgatggctcccccctgcacagtctccccctccactctcgtggggccaggaagggggcagaggggccacagaggcctctcagaagagggaaggggtggggtgggcaccgcctcctccccactgttccctgtgcctgcaggaactgggctgctctgtggagctagccccggccagggtgccccctccccggaccctcctagcagggacttgatgctgaagccctcactgggtggtggcgggggactgggcggccggtatggccggccgtgcagcacgtaggggcccaggtccttggcgaaggctccacgcgcacctccgttctgccagcgccggcacagggcggtgttctgcagccggagcgcctcagctgggatcaggctcacgtcgaccgcccagaagttgcccttggcctggggctttgcagggtccttgggcacctgggtgtgggggtcagacatgggtggggctgcccaaccttggatgctcaggacttccgcgcgcgctccgcccccgggctccgaccctggcctgccccaccttgcggaagcatcggttggaggaaaggttgtggcgaatggagtctttccagccctcgtagtcttccctgaagaaggggaacacggcctggacctgacggatgatctgaaaccgccaggcggccggccggcgccgtgagcccagacggggagggggtagcgccctacccctcccccactaccgggctcaggggcgcgcggtgccggcccctgctgtccccgaagaaggacatttctgcgcggaagcgcggcagagagggcaaggggctcccggagaagggtcgtgccttgaggccctcagctctcaggactggtcccactggcatacctgggtgggctaggaaggggtgggggtcagggcttgaacctggaagtgggtggggaacgagtctggggaaagagagagtgggggccggggcccgctcacctgggccagcttcagtctgcgggagggagcggcctgaatcaccaaggcgatcatggccaagtaggtgtaggggggcttgtcatgtcgcaggtacctcttcttcctcctcttagggggctgggagggcgactctgcctctgggggccccaggcgggagccgctgcagggccccatgcgggacggtagacagcgtgggcaggggcctggccgggtggagggtgcagggcggtggggcagtgtagaaggcagggccgggacctgaggccgggctggggcaggcgggctggggcctttatcattcggatggaagggggaggggagggaagggaggaagaggctgtgggggaggggagcatgccgagggcttccacaattagcaggttttggttaatctggaagggaggggcagagagcattctagtgggggcttctcctgaggcctcagtctccacccctgagttgcctttgggtggccaggcccggcttcaaaggggctgcgatgacccatggctactttatcccgtcttccctggtcaggtttcaggaccccatttaacaaatgggggagtatttagcccatgccaagctcccaaggcgtggggcgctcctggagttcaagatctagcagctgctagtaggccctgaactatgggggctggatatccacccaggacatgatcaggtggagcttcctggaggagaaggccatgaagcccgcaccctaggaacaagagggggacacattgactcaactgatttcctgggagttgcttcaggagcccaggtggaccgctcacctcctcctccctagccatctctgctcctccacccaagcaaggctggtattgtgtatcctgccccaaagcccaggttctcctccctcacaaggggcaagtttgcccaagaggatagcagctctgggaattagcagcggtggttggtgctggcaccaggccaagggcccccagacacacgggggcccagggatatgcttttgcccttcactctgagaattcagcttttcttgtgcagcctccaccatgataacctcaaagggctgaaaatctgcagcatacggtggggtccagcacaccctgaggtgtggaggggagggacaggcagcaagtgtccaggaggaggaggcctgggccgcaaggggccttgtatgtggggtaccacactgctcctgccccccacacccccggtcgggtggtgccccttttccttctatctctgactctcccctcagacgccacgtggtttccctcaggactcctgccaccacctctctgctgtgttccctaggttatggctgcacaatcctgtgcctcatgaggctaatacttgtggccacttcaccccattcggtcagcaaggcgtcgttctttcctacaagtgtttgttgttgttgttgttttgagacaaggtctcactctgttgcccaggctggagtgcagtggtgcgatctgggccccgtgcagcctccacctcccccgctagggcgatcctcccgactcagcgtcccgggactacaggcgtgcgccacagagcccagctaatttcttaatttttggtagggaccgggcctgcctatgttgctcaggttggtctcccgggctcaagtgacccactggcctcggcctcctcccaaagtgctgggatcacagacgtgagccaccgggccgggcctttcccataattttttttttttttttgagacggagtctcactctgccgcccaggctggagtgcagtggcgtgatctcggctcactgcaagctccgcttcccgggttcatgccattctcctgcctcagcctcccgagtagctgggactacaggcgcccaccaccacgcccggctaatttttttgtatttttagtggagacggggtttcatcaggttagctaggatggtctcgatttcctgacctcgtgatctgcccgcctcggcctcccaaagtgctgggattacaggcgtgagacaccgcgcccggtctcccgtaagttttaaggcacccccctctccactggcgcttccttggtggggcgctggaggctccccaagttctgaccgctcttctccgaccgcactgtcctgggcccgaaaccacccccaaagctgccacccattccgctggcgcccgtcccgttgcccgcgatgactcggttttgtccagcataaatcaatgaccaccgtcccgggagccttggagcactttgagccattcccgtcccacccacgccccaaggaggtcccagccgcggaggactcgcccggccgcccgcagctgtccgcgttggcccccacccccgaccgtccctccccaggccccgcccccgacatttcctcctcccaggctccgcccccggctcccacggggcaccgcggcttccggctatgggtaccgcgggccggaagtgtagcgttgccatggcgagggccgggtgcggggcccgcccccgcagcgcctcagggagcgcggggcccactgacccgcggaagccagcggacccacttgtgcggcggtcggcgcggggcgcgaggtgaggcgcggactcccgggtcctgcggcgggagcggagcgagggagaggggccccggccagggagagcagtggcgggcccgggaaggaggggcactgggtcgacaccgagagaggaggccgggccggggaaggatgaggcagaggagagggaggaggccgggaagggcgggaggaggaggagaccgaagggagagaggaggctggcgacggaggaggccggggaggggccctcgggagacgcggctgccggcacgcgggcgcccagggcacaggtcccgccgggccgccttgggcgttgctggctgaggcccagggcagcaggtgccaacggtcaggaaaggcagggagccgaaggctgccggtgggcgcttcgcgttttgttccaaggcgaaggtgtgtggattctccgcagcccgtcggtcaggtagacagctccggaattgtcttcattttcagatgaggaaatcgaggccgcagagaagggacttacccaaacttaagctttgtgtgggccttggagctaggctgaaggagaaagtggagtctcactggggcaagttccttcaactttcagggattcaaatgacctcacttgtagtgcggggcgtccggaccacccctcaggaattgggatcagggcaagaattactaactaagcaagcaccccgcctgggagggagcgtccaggactggtgtgggcccctgtctgtaccagagcggaggcccggggcacggtgggattaatttccatgggtgcagagaggggagccgtgtacggagtcattctaggcttaggggagacagagcaaagttagccttccccaaacctctgtgccttccttttcttcctggattcctacctgggggtggaggtggaggcgggggtaccgctgcctttctcaaagtgtgtctagtccagcagtgagccctcctgggcgtcttggcgccccagttgcttcctggacgta

SEQ ID NO: 11933 - DNA, 6000 bp, Homo sapiens
agtcctcccacctcagcctcccaagtagttgggatgacaggtgtgtgtcactgcacccggcaagaatatcataagttatatctccagataaggttttcaaagttcccataatatcggaaaaataattgtctacttaggatgtctgagaccctgctaagcactttatataccttagctcgttgaattctcagaacactgagataggggttgtcattgcccccattttatagatatgaaaactgagactcagagaggagaaatactttaacaaggtctagtagcttcttcatggcagagacgggagcctatcttttttatgtgagaatcagcccataattcatgctcctgcaaaagaaatgccccatgctatcatcccctagaagttgttttgctcagattatccttctttacagggactatgttgcatgaaaataggctattttattttattttagtgagttggtcttaacttacttctcatcttgattggtatgcagccagtttgactctagatactatttatttacctccaaaatccaagccatcactaatgcatctgacctaacaaaggatactttgaaaataagcgaggtctctgaagactgtttattcccaaatctgagatcccagacttcgggaattactgtgcagccttccccgctccctcttttttcctcctcctagtgactaatttagagatatctgagtcgtggaatgaaagcagatgtatttatagtcatctttcacagaaaaggggagttcaaagggaattcacattggttgattattcactatgcatcagcctacttatccatattttctcattttatttcacacaataatctgaaacatagtttagaaaagaaggtgaataaacaagaaagtagagttttaagctcaggtccatgtaataaaaagtgtgttcccttcccactttagccattgtcgtcattccatgagggcatcgggagcctgtgatgaatgctgtcgctggctaacactgtggatcaaagctccttgtggtttcttgggcccacagagcacctctgactccccacccacactcccccacctctggtttctggtcagtcatcttgcaaatgcatccccccttggttataagacagatggatgagagtgaggtctgcaactggaaatgtaactgagagccaattccctgatggcaagtgggtcgttagcgccattgctgttcagaagaataagccaccactgttcctgctgcctttttttcaaggcgacaaagtgcatcctgccataatcatggtgttagaaacctcagtcagcagtgctcagagtaagaggcaggcatgaggaggacaagagtgctgaacagtcttattataatggcgacaacagagatgatgcttgctttatataaagccaggtgcacacaaatatgtgtgtgcgcacatttttcctggctttggggaggatggtgtatatttcggggcagctccacacaaagaaatccagcatttacgttttgcccatgtcagtctctatttgctttcagatatccaggaatgattttcagagtatttgagaaaatgagaggtgcagatggttttcactgaggcatggtttcaaatttaaagaggattatggcccagaaatggtgagtagaggtgtgaacctttgaaattgtaattgcagaccagtctgaggaggtatatacttaccaaagcacaatatctcattgtgagcatattcctttcttggccaaaggagatgggggaggagcagatacataacataatcttcaaatgaaactgaaacagcaattgatggcagcagtttggagtctttggtgaattcagtcaagaaagaaatccccagctgtctaccattgcagttagcttagcttgttgtaataatctttcttctttgcatctccagagctgactgtatacacaagtcggctcctgctgggaggaatctgtggtcattttgacacactcactcctttattttacaaaggatagcactaaggcccaagatgacagcatcagttactaggagggaaaactctggaacccagggcctcttggaattgaggcaattaaacactgacttttggcttttaataacagctcatatttattgagtctttactataatgccagatgaagaagatggaaggaaccaccacctcagtggaggtgacaggtgctagacgactacctggaatagatgggagaacaaaataaatgcaagaatccaagtctgaaattgtttccagcctagaggaaggaaggccttcttggagtgaagcctaagtgccgtgtgttgtcagtgctccatggggtaactgagtctcagagagcttaattagctcaactagcatgggccatatttgttccaagtcacagaattttccagatgcagagtgacttggttagtatgtggggaaggatggtaggattttctcctgggtagctcatacttcaaaagaccatgttctgtcaactatggcacatgagcaagtgacctccaggtatggatcttcagctgtctgctatcatcatctggctgtctcctctgaacttcaaacttggtgtgtcccaaaccaagcttttaaagtgctaatgaggacaaagtgggtgcctgtttatttatttactaattttttaaagaatgtgttttgaagttgacttctcaacttccctttgccagggaagaatatttatttatggacattccccttacaaaatttccctttaattagctggaacccttgttagctgaagcatggcctcttagaggacattgatgagcatctcgctggaggcacagtgcaggttcagtacagccaatagagggaggtgaacatctcacacttttctaatggctttcctgtgcacaaagcactttctcttccatcatcagtgaactcaacataacagccaggtcctggggttggtgtccttatcttttgctttcatgtgaggcagctgagggcccaagatgccatagacaacaggattatctgggtgacttactcttgtcattcttttctcaagatgtcaccttgtcagcaaagccttctctgcagattctttatactatagcgactccttcactttcttactttatatttactccactttatgtatttgtgagttgtctagttctgtcctagaaggtaagcttcatgagagcaggggccttggcattactcaatctccagggcacatagtgcttagtaaatatttgagagttaatgaggtgctgtattttgacagccactctgctacttctgtgtagcaggcccaaggctaagacaagatccctgctttggggcactcccttgtagtcaggggtaagaaccagagaacggatgtgaggcttaacagtgcaagatgggccgggcgcggtggctcacgcctgtaatcccagcactttgggaggccgaggcgggtggatcatgaggtcaggagatcgagaccatcctggctaacaaggtaaaacaccgtctctactaaaaatacaaaaaattagccgggcgcggtggcgggcgcctgtagtcccagctactcgggaggctgaggcaggagaatggcgtgaacccgggaagcggagcttgcagtgagccgagattgcgccactgcagtccgcagtccggcctgggcgacagagcgagactccgtctcaaaaaaaaaaaaaaaacagtgcaagatggcagaagcccaatcccgggggtgaggggtagggcgcggtgggtgtgtgtcgcagaggacaggctcagccttccatcctaaggctatcaaaggctctcctggcttgaattacaggtaccaatcctgtggcccttcccaaaggcctagctttttttttcttcttcttcttcttttaaaccaaattcatactcagcgaatggtgagaaattaaatggattcttcggactaagtagattgagctagttttaaaattagccatctgtcaaggccgaggagtgaggtggtactttttccaccgaaatttggcatctgcttagcatcgaacaccatttgcagctcgggcaatgccttttacattccctgaccctcggctttcctgcaagttaaaaaaaaaagtgcaaatgaaagattagaaaattattttttttaaaagcccccaaacccttcattcgtcttcacgctgcattgtagcgacctaaggcaactgcacaaaaccagcctgtaagcggtgaggagcaccctgcagagagatggggcgagcgggcagctgcaagcccgggccccgggaggccgcccctgcgcccagcgcttccttcgcggggtcggcggccctcgcagtagaaggcggctctcccggggcctcacttcctgcacccacacgcgactaaaaaagaacacgtacaacttttttgggcccccttcttgcaaaacgctcgcgcaacgagctcgctgaagtaaccgctccgggggcgaaccagggactcgggcttccggagcccccgtgccgcgcagccggggtcgggagcggcagcttcggagccaggccccaggggctgtgcgcgagcgggggcggggcggggcgggggccgggccgggggcggggcgcgggcggggagggaccgggggggcggggctgggggcggcgcgcgtgcgcagagcacttccttgtttggccccgtgactgcagcgcgagcgccgcccgcccgcccgcccgccgcgggagtgtgcgctcagtcagtcaggcccgcgccgccgcctgtcagcgcgtctgaggaggcagcgccgggcgccccagccgcccagcccgcgcacgccccagcggccggccggagcccagacccccgcgaagaccccgcgcgcagccgcgtcccctcccccgccgctgaggagctgccgccgccggcatgagcagagggaggcgggtcccggagagccccctgcctcgcgcgcggcttggagtttgaagggccccgcgccgagccccgccagcgccgccgccgcctgccttcgcccgcctccttccctccctctcgccgctgccggggacgggagccgcgcgccaggccgggcggcgggtggcgggctgcgcgccggggttcatgagcctccgggcggcccgcggccccgggagcctgcgccgtgactcaccccccgcccccgcttgtgtctcgtccctcccggcaggatgccggaccagatctctgtctcggagttcatcgccgagaccaccgaggactacaactcgcccaccacgtccagcttcaccacgcggctgcacaactgcaggaacaccgtcacgctgctggaggaggtaggtcgggccgggacccccgccgtccacgctcgccgctgccgccgcgcagctggaggatctcctctccgagctgggaggaaggggacgcgggggccgggggcgccacaccccctcagggagccgccgggtgaataagggacttcggacgggcggcgccttccccatctcctcgccctttctgggtcttgcgggttgaaaggcctggggactggaggtgggagaggactgagcgagctgtggacactccagggaggacagaagatggaagtcctgtccctggcatgcactgttcggcgcttccacatcttcgtgaccctcctgtaaccctcgaggtaggtggcgtcaggccaccgagggcccagaggcgaagtagtgcagccaaggtcaccagcaagggactaggagatgggcagtgaacgcacccctcagcggcccgactggaccaggcaggcgtagctgcggagacgagggccgttggaaaaatcccagaggacccagagagaactcaggctgggactgtatccactccaggagtcctccctgttagtctctggtgcctgaagcccagatggaaagagatctgtgcacataggtttccacccggcttccctaacccggagggtttggtagggcttagggctgctgcgccagcaggacctgcccgcagggcactccgaggctggacaaggagatcggaggccggtgcag

SEQ ID NO: 11934 - DNA, 6000 bp, Homo sapiens
tttgagcagtggctgccttggtggaataagcatgtaccccgaggagacagctttgatatctgtctgacaccaggtccttcgcacttggtgcagatttatatatatagatattagaaacggggtctcgcttcgttgcccaggctgctctcaaacttctcagctcaagcagtcctcccacctcggcctcccacagtgctgggattacaggtgtgagccaccgtgcccgaccatggctttatataatagcttttgctatgtttctgggcacgtgacctgcttgtgtcatcttcgatggtaaggctgaggtcttccagtgtgtgaagcacttccttggagcaggtgctcaatcaggtttgtggttttggtgaatgtcatgctgatccctccctgtcacccttccagcatcatcatggacacagccattatgcctctgagtcgcttccctccaagaaggaccaggaggagggggtgatggagaagctgcagaacggggacctggaccacatgattcctcagcactgcagcagtgagctggacggcaaggcgcccatggtggacgagaaggtcattgtgggctcgctctctgtgcaggtcagtgggccaccagctgcttggtggagcctctaagaggttgactcaggcttaccttgagggcacatggtccagcctttgacgctgtgggccctgggggtgtgctttctcctaggacctgcaggcttcccagagtgcttgctactggctgaaaggtgtccgctactctgatatcggcactctggcctggatgatcactctgagcgacggcctccataatttcatcgatggcctggccatcggtgcttccttcactgtgtcagttttccaaggcatcagcacctcggtggccatcctctgtgaggagttcccacatgagctaggtaagcgtgcgtcccccgttccactggtgctcccttgggtggtggtgtaggcccccttcctgtggccggttccttgctcccatctccctgtcttcacagtgcttattgtaactgatttaacacactcctaaagcttcatggaccctaatcaccttttttttggagacggagtctcgcactgttgcccaggccggagtgcagtgatgtgatctcggctcactgcaacctccacctcctgggttcaagcgattctcctgcctcagtctcccaagtagctgggattacagacgcctgccaccacactcggctaaattttttttttttttttggatttttagtagagacagggtttcactacgttggccaggctggtcttgaactccttacctcgtgatccgcccgcctcagcctcccaaagtgctgggattacaggcttgagccaccgaacgtggcctaaccaccatttcttaacgattaaatagataatttaaaatgatggggtttttacaggggtgtttgtttccttttagccccatatgcagtggctcagttctcacctatacagtggggttaataagagcacctccttttagaataatagtgaggattaaaggaaaacaaagggtgagagggacttcccatgtgccaggtgctattctgagcactcagtaaaggctctcttttgtagcctgttaatcttccaaaggctcaggtgcctggcaggtgcatggcagctggatgaaccagggggtaggagggacttagtttgatcagagggagagtgtaaaaagctagtaattactccagaggctttagggacgacgtagggtcaagttctggctttgccatatattgacttgtgacttcgggcaaatcacttctcacagtctcgacacttaacttctcgcagttttgattttgtttccatggtagttgtgaggaagggggttccttctgtttcactatgaatccagagagaaatgaggaggccagtgccagctggtcatctatttttaaaatcctgagaaagattttcagcctttaggctgggtatacggccagtttggcaaatggagacgggtcctgaacaggaagttcaagggcctgtcttgtcacttctgtcttgagtctagggctgtcttgatttttttcacccacacttttagcagtctgatgtcatcggtgccctctgtctcccacgaccttgtatgactggctctcactttgtcgccaggctggattcaaactcctgagctcaaacagtcctcccagctgagcctcctgagtagctgggatgacaggtgtgcattcaccatgcccatcttactcttccttcctcgtccctccccttttcattctcgctgctgtaggagactttgtcatcctgctcaacgctgggatgagcatccaacaagctctcttcttcaacttcctttctgcctgctgctgctacctgggtctggcctttggcatcctggccggcagccacttctctgccaactggatttttgcgctagctggaggaatgttcttgtatatttctctggctgatatggtaagtgttccacagttcactggatgagagggcggctaaggggatggatgttaggtaggtagtttttttttatttttatttttttgagatggagtctcactctgtctcccaggctggagtgcagtggcatgatctcagctcactgcaacctccgcgtcccgggttcaagtgattcgcctgcctcagcctcctgagtagctgggattacagacgtgtgccaccacgcctggctaatttttgtatttttagtagagatggggtttccccatattggccaggctagtctcgaactcccggcctcaggtgatccacccgcctcggcatcccaaagtgctgagattacaggcatgaaccaccgcacatggctggtagtttgtttttaataacatcttccttagctttctttcacataccacagagttcgtctgtttaaggtgtacctaccattcagcggtttttaagggggcattagattttaaaggaggaaaagtttatgtttttgttagcatatgtcattaaagaaaatgattataatttatctatggtctttattaattattatggaatggctgtatatagataagagacagaagaaaggaaagaaaattacgcataatcatacatcatactacccctaaaacaataatagcaatactttggtttgtttctttttttatctcaatgcattgggtgtgtctttttctttaattttttttttttagacagaacctcactcacctagcctggagtgcagtgtgtgatcataggtcactgcaaccttgaactccggagcttaagtgatcctcctccctcagtctcccaagcagctaggactacaggctccagccaccatgcccagctaattttttgaatttttatagaatggggtctctatgctgcctaggctggtcttgaacttgtggcctcaagggatcctcccatctcagcctctcaaagtgctgggattataggtgtgagccactgcatctagcttgttaataatatcttgataacaaaaagacctcttaaagtgtttaaagtccataataaggccaggcatggtggcaggcacctgtggagctactcaggaggctgaagtgggacaattgctcgagcccaggagtttgaggctgcagtgagctatgttcgcaccactgcactcgagcctgggcaagagcgagtggaaaaaaggaaaaaaaaaagtctataatataaagtttattttttatcagagtacatttatttttagccagcctctaaactcatccagagccacatacacgttgagtactttgttttacctagacagttgtaaagacatggtacctgctattgttaattttctttttttgttttgttttgttttggagatggagtctcgctctgttgcccaggcgggagtgcagtggtgtgatctccattcactgcagccttgccttccgggttcaagcaattctcctgcctcagcctcccaagtagctgggactacaggcctgcgccaccacgcccagctaatttttatgtttttagtagagacagggtttcaccatgttggtcaggctggtctcgaactcctgacctctagtgagccgctgcacctggccctgataattttctttgtcaaccaacctgatctatatctccatcactgaattgccctggacttacaagatgaagaaggaattgcagctgtgttgtttcttgcttctttcccagttccctgagatgaatgaggtctgtcaagaggatgaaaggaagggcagcatcttgattccatttatcatccagaacctgggcctcctgactggattcaccatcatggtggtcctcaccatgtattcaggacagatccagattgggtagggctctgccaagagcctgtgggactggaagtcgggccctgggctgcccgatcgccagcccgaggacttaccatccacaatgcaccacggaagaggccgttctatgaaaaactgacacagactgtattcctgcattcaaatgtcagccgtttgtaaaatgctgtatcctaggaataagctgccctggtaaccagtctctagctagtgcctcttgccctctcctcacctccttttctctcagtgactctggaacctgaatgcagcttacaagacaagcctgacttttttctctgattaccttggcctcctcttggaaccagtgctgaaaggttttgaatcctttacccaacaatgcaaaaatagagccaatggttataacttggctagaaatatcaagagttgaatccatagtgtggggcccatgactctagctgggcaccttggacctccagctggccaatagaagagacaggagacaggaagccttcccattttttcaaagtctgtttaattgcctattacttctctcaaagagaacctgaagtcagaacacatgagcagggtgagaggtgaggcaaggttcatcctgaatgggagaggaagtcgaaccactgctgtgtgtcttgtcaggatgctcacttgttcctactgagatgctggatattgattttgtaacagcacctggtgtttcacggctgtccgagtgagctaacgtggcggtgtggctgcctggacctcctctttcaggttaacgctgacagaatggaggctcaggctgtctgcaagaaaacagttggtttggctgtgattttgacctcctcttccccactgccatcttctaagagactttgtagctgcctcctagaagcacattctgagcacatttgagacctctgtgttagaggggagactgcacaaactatcctcccccaggttgagacgtctgcagagtggcaagctgacttgtagaaatggggtgccatttatgctctacttagacaagggtaatcagaaatggaatcagtgcaggcaaaatttaggatttgccgcttccataaatcaaagcatgactaatagggggtctctgaaatgtaagggcacaaacttcacttagggcatcgcagatgtttgcagaatggttggcctaatgattatgctacagatgggttttaaatgacccgtctaggttactgcttccttgcaaaaaaagtcgaatcctgcattgaattgaatatgaatttctctaactctctccagaaaatggatggagataacttgtctttaaaactgtaggccagccttagccactgtggagcccttgcctccgagctctggcttcaaggggagctcttctccaggttcactaggtgaattgatttattattatcatattgataatgtgagattctttagccactttggggagcctgtctctccagaagcctttcttagtggtgcccacagttggagcccaggggccatgtttgcaaactgattcatgtgcatggctgacaggagtactggttcactaccaatgcctgagcttttctcttacatagaaaaactgtccgctctcagtaatcacaagcagcatccgttttgttttctcttcttgggagacatctgtcaaaccaggaatattcttgaaaagaacgtgagcaggaaaaac

SEQ ID NO: 11935 - DNA, 6000 bp, Homo sapiens
ccagctacgtgggaggccaaggtgggaggactgcttgaccttgggaggtcgaggctacagcgagccgtgattgcaccactgcaccccagcctgggcaatagagtgagaccctgtctcttaaaaaacataataaaaaatcaacaacaaaacaaccaagtcttttagttataagttacaggaaccaactccaccaagcctaagcataactgggctattaaagcccccagagccagctggagggcaggcaatgtgggggcgctgggctggcccccagaaccagccggagggcaggtggtgtgggggcactgggccagcccgtcactgccggggctcccgtgctgaccgcccagatgccacccgctgcactgtggcactcgggctttcaccctgcgatgtgcggccagagggcaggcaggctcacttccctctggctccccagcactgtgagtccctctagctgacctgctctgggggttttagtagggtggcgtcctagaaatggggctgtcaaaaggtgtactttttttttttttttttttgatagggagtctctctctgtcacccaggctggggtgcagtggtgcgatctcagctcagtgcaagctccgcctcctggattcaagtgattcttctgcctcagcctcccaagtagctgggactacaggcgcctgccaccccacccagctaattttttgtatttttagtagagatggggttttaccttgttagcaaggatggtctcgatctcctgacctcgtgatctgcccacctcggcctcccaaagtgctgggattacaggcgtgagccactgtgcctaggtgcacattttaagtttggaggtgcaccttactgaggtgcaccgtacacacatccctgtgaaaggggagcctacagcaggtccccggcctttcgctccgcctgtagaagcaagttcccatcctctttctgcaccctcctcaccatttctctgagactcttccttcccctgcccctttcctctcttttctttctttgaatggcatgcggcctctacctgtcccttgtccctatctctgggtgaatagagtgacaccgcccctcaggctgtgggctctcgtcgcaccatggacactgggagatgggtactgtggtaaagtagtgaccggggcagctctgggtttaggcttggccttggtctccccatgtggaagatggggtgatggcaggtgcctgaggcagtgatgggagtagagagggcactgaggctctcgggcctggagctgtcctcacgggggctcctgggagcttgggctgggcctcccttcctgaatccacatggcccagcggtatgtaggcagtgaggggacggtgggtgggggtcggggacagtgcccagtatcctccatggggctcctcccgcctgggtcccacactcaggcagctggcctgggctttgaggagtggaatgaacccaccgggttatctgtttagaactggaatgaaccgacccgggaatctgtttgacattccaaggaggtttgggggaaggtttgtggagtagagggagccgccctgcccagccccctcagcctgggtgtgtccatttggtgggactacgagctggccaccaggctctcatggctcagccaaggggcaagtcttctcagctctggtgggctgttcctggtccatcttgtggctgggaggagtagacaaagcttccactagaagttctgctagggcagccaaggttcaggtaggagggaggcagtctttccttctggagccctcagcccactgccgtgggccttcggctggctgcttccttctgagggtgattcctgggcagggaggccagagggggacgcttagggctcagcctggggggaggtgggcactgggacaccccctggcacccactcttggggggccctgggctcactttgggtacctcgttttctcttagaggaggcagttggaccctcgagcaggacaggaacctgcccagagtcccatggagacattgggcagcttccagctaggaaggtgggcctgctagggtggggccaagtgccctgtgagccgtgctgggtggggtgggggaggtagagcctccccgcccgtgggcctccctctgcagccagggggactgggggggttcccactgtccagctgctgttctctgatgaattttcacggatgtgcctcggaatgagaaacaagacaggcgttccgtcgggagtgtggctgccatgctcaggctttctcttctgtaggacatgggcaacagaacatcttttttcctttttaaaaatctgttttaatttctcttacattaattattttttaaataatataaattgagatggggtctcgctgtattgcccaggctggtctcgaactcttgggctcaagcgaccagcctgcttaggcctcccaaagtgctgggattacaggtatgagccactgtgccccgccgatcttttgttctgtaagatgctggggacagtaggtggtgtctgttaaatctttttttttgagacaggatcgccctctgtctgccaggctggagtgcagggtgtgatctcagctcgctgcagcctctacctcccgggctcaagggatcctcccacctcagcctcccgaggaggtgggaccacaggcgcatgccaccagctaattttaaaattattctgtagagacagggtcttaccctgctgcccaggctggccttgaactcctgggttcaagtgatcttactaccttggcctcccaaagtgctggcatgagccactgttccctgacggttaaatcttaatctttccttcccgtggctggagagagactggggatgggcaagggcagcctgccttgctcttggcttgtgatctctttgggttggggtgggggtgagtagctactgcccaggtgggttctctggcaggtccagagatgctaatgacagaaaggtgaggatctcctcttgccagccctgtcaggaagagggtgtgggctgtgagtggctggcagggagggagggctctggcatgccaggtgtggtctgcctcctctgtcctcatggatgcggacctggcagcatgcctgcaagactggctctcctgcctctctggtacccatgctgtgtctctagagggcaaggggaggacttgggagcctgggcagggtgtctggccagtgtgtgcttgccctggcctctgcggtctacagagctggccaggcttaggagcaggctgctcggagggagagttactgcctggaaaagctctttacttggcaggcagaaagccaggtcagggccactggccttattggccgtgtcctcaggaagcctctgaggctaggcctacagggggggactatgtctagagtaggctgaacctgtaaagtggggctcccagataaattgggggcccctgagcaggaaggacctgactggcttaatttgacctggcccaggacagttccctttctgaaagaagggggcattctatgaaacacctgggtagaagtccagcagtgaagagttgggtcagtgtgtagatggccatgaggcctggctgggtggagaataggactcctggcaggcatcttctgcagagcacggagtgccttctttcttttctttcttcctttctttctttctcggagtctcgctctgtcacccaggctggagtgcagtggcgtgatcttggctcattgcaagctctgcctccctggttcacgccattctcctgcctcagcctcccgagtagctgggactacaggcacgtgccaccacgcccagctattttttttgtatttttagcagagatggggtttcaccctgttagctaggatggtctcgatctcctgacctcgtgatccacccgccttggcctcccaaagtgctgggattacaggcctgagccaccgcgcctggccaagcacagagtgccttctgaggtgaggcctgtggccagcccagcaaccacacttagtgtgtcgggcaggactagggccatagcaggtacataggcagggttgtgccccagccgaagctgtctgcctgcctgtctgtccccataggcctcaagccaggcaccaggtgggggcttttattgcagcctaggatggcagaggcattgtgggagcccatcaaggaagaggtctagagactgggcagtgagaggctggggtatcagtcaggacaggaggaggcggggcctacccttggaaggcaggagaggtggaggcccaggaggcggggcctgcccttggaaggcagtagcctgcaaagccctcaaggctgttccacgagacctcaccctgcccagccttagggcagcgcctggccctggaggagcagcctagcagggaacgcctcgctggggtgggcggccctttctggaaagggtgggtgggaggagcctgacatgcctttcccccgcccctctctgaacctggggcagaatgggggcagagtagctccccgtacccccaggactgttgacctgcagtgctctctgtggacaaagggtgggcctcacacagggcaggacctgagacagctggaagcctggtctcacctgaggcccagggcaggggctcccccgggccaccctgcctcaagccggccttgatatgcttccttgttccccacttctcaggtgtgagcagctgctggaagaggaggtgctcctgaagacactgcggccggcccgcctgtgcccttggtgccctggctgcctagagagcctcacccctgggccctggggccaggactccaggactctgactacctgccctcccccagcctcagcggctgcacctcctcgttagtactgatgcactgacctcggcacacagctgggaggggttgggggctgggtcatggctgctcccaggccccacccaggctcctgagcctagaaggtgaaaagaggactctcaggggctcacaggggctctcactgctggttggccctgccctcccttccccctcagcagggtgcccggaagctggaaccttgttatctgggtaattagtttcagaccctgcactgaggccggccaggtctcggggctgcctcccataggttgtgcaccctgaccccgagagggaggcgaggcgctgcttgtcgacagctagaggctggcctggggagcaggtttggggtgccctcccacactgccctccctgccccggcccatgccccccagggctgcctgggcctggttattgtgtggggcctcctgacccagccaagggcacgaagctctgggaaggggatgcccccgagggtgccagtccagctagctgccccacccctcaggcccagcctggcccccaagctccccactctggtgccccgagcagccctgtgggcaagcagccgccgccatggccgagcacctggagctgctggcagagatgcccatggtgggcaggatgagcacacaggagcggctgaagcatgcccagaagcggcgcgcccagcaggtgaagatgtgggcccaggctgagaaggaggcccagggcaagaagggtcctggggagcgtccccggaaggaggcagccagccaagggctcctgaagcaggtcctcttccctcccagtgttgtccttctggaggccgctgcccgaaatgacctggaagaaggtgagtgtggctgagcccagagcagctcccagcagacggcccactccctgctacctgggtgccgtctcatgccaaggctgggggctgggcctgtccacagctcctgggctccagcccccagatcttgcctggtctcttcaggctgggtggcccagggtgcccccatcaggcaagccccaagcagtgggcagccctgaggtgagcctgtgcgggacagccgtccttcaggcgggggctgcatgcagagggctcctgctgtgaggtgagctgaggccatgagtggacccccaggagcctgcagaaaaacctagtgcggggccccacgggagcaggggtggccggtagtcattgctgcttcttg

SEQ ID NO: 11936 - DNA, 6000 bp, Homo sapiens
aaagcagctggaactatcagggtgattaaaggagaaaccaggggacagagaggaagaggcactccacccaaaacatttaaagagacagcttgctttttttaaaattgccaattagccaggtgcaaaacaaaaacccatcatttagaaggtgatacctctattttcacttttctatttgcaaagaactggaagttcaacaaataaatgctcaaatcaaaactaatcaaaaattaaaactgttttaggaactgcatagacttctccgagccccaggccgatcctgctgtgtttaaccagcatgtactgacttgctgttttgcatgaggggactgacaaatttgtttatgctgcacattcattatgcagaagctgcagattttgctttacatcatgtttcctaaaaacatttttagactctgctgtcattctgcaagctgatgtgggttgggggtgcgtacagagtgcttgatggtttttggtgaagctcaattttgatccctacccatagtgtttgctttctggtgaaaataacttgatgatgcccaatcaccaatgcagggccaccctgatgatggggggagaggaagggcctgtagttaagagtacacagtatgctgggtgcctgacagacactcttcttcccgcccttcaagggtgaggaaatcaaggctcagcgaggttaagttactggccaaggtcaaccattttacaaagaaccgctgctctttttttccattcagtccattctttcaattaaaacccagtttctttctttaaggggaaaaataaagtgaggcgagtgaagaccatttatgactgccaggcagacaacgatgacgagctcacattcatcgagggagaagtgattatcgtcacaggggaagaggaccaggagtggtgggtacgtacgaatatccatccacttcatccgtacattcatacagcatgcctgggcaggcaccacattggagcctacagacagtgcagtaaaagagggctcttgagcacaaggaccctgtcagctgcatcactcacccaacagccattgcatttggtgtcttttctatgtcacacactattacatgctagaaaaacagccgtggagctggccgggcacagtggctcacgcctgtaatcccagcactttgggaggctgaggcggatggatctcgaggtcgggagttcgagaccagcctggccagcatggtgaaaccccgtgtctactaaaaatacaaaaaattaactgggcatggtggcacgcacctgtagtcccagctactcgggaggccaaggcaggagaatcgcttgaacccgggaggcacaggttgcagtgagatgagatcacaccactacactccagcctgggcaacagagcgagactccatctgaaaaaaaagaaaaacagccatggggctttgaagacaggtcaagagaattaacatttgtatgtactttacccatggtatcatgtaaccttgtgagttgtaggcattttctgatttttcatataaatactaaagcggaagaaagttgagcatgttgcctgtggtccctcagccagtaagcaggctaagtcaagattccagatcggccctgaccccagagcctatgtgctttgctcaccattccacactgtccccaggctgggaatcagaatgcccaagttcctgctcaggctgagcagttgacaagtcctcagactcaattcttaatccagtctgcagttctttctttgtcaaataggccaagacaccttctccacgtaattttaggaaaagattaaatgaaaatatctatgaaaactccttttacattaaaacctgcagctcaggcatcaggagggaaagacatcagcatcctcataggccctgctaggtacccaggctgtgagtgacctgcgagggcagtccacacatctattggttttcacgttgccagggagtaagtctcccgatgggaactgccaggccaaggtacagtgaataagccacctcttctgctctccttgttgatcatttcctgacatcagggtgaaaattccccttccttggcagcctgagccccgtcctgccaagagggactcagttctgtctgccaggaagggacctgaggctcgcagttgagccagcagtacctaagaatacccagaaatacatatgtatatacatgtgtgcacacacacataggcatgggcacacattcacctttgacttttcttccttcaggcctagacagtgacctcagattcttaatcacagctgtagggattttgtttggactcaactggggcaattttgccctccagggacatttacaatatctggaaatattgattgtcaggacctaggaagggggttgctaccaacaactagtagatggaagtttagtggccagggatgccactaaacatcctccagtactcagggagcccccacaagcaaggatgccagtagcaccatggttgagaaactggactgaagggatcagcctggggaggcccaggggtacctccagcctctgtcagcagagtggggccagcccctggcatgaagcctgtcagagagtccacttcatctcatgacgaggaggtgggctctgaagcccccccacgtgaatcagttactagctctatgggccttggataaagcatgtcccttctgtaagcctcactttcctctgaaaaataggacatgattaatcgtttctcacaaggatgttgaggaactcactttgtaatctgttaatattattataatcaagcagtgatcatgttctttgctaagcaactgatgactacagcagagatacctgcggggaatgggaagctgtcattggtgtccctagcatcattcctaggggacattgtgtgtgccaccattacgtgcctcgccagatgtaaagatggtgccacacacacatgctaactgtgatgtgaaattcacaaagacctcacacatgcatgatgccaactaagaccacacgcggtgggtgggcaagccttcaggagagctgggcaggcctggttgactctgttccactcttaaaaccaccttcctctctatcgatttggcattggaagccaatatgcacgattttgttttttctattgaaggcccattacatgattctctttagtgcaatcaatactaatctaattgaggtaattagaaaatttttacaggtaactggcttacaggccaatgcagcagacaataaaattgccattcgccaccatcagtctcaaactttcacagtattcttcctccacggtaaccagaaaacaagtgatagtacatagcagccttttttttttttttttactggctagaacaacactttactcacaaagagaagagacagaacaagattagctttgatttgagtatggtaccccgcagtgggtcttgccaggcagctgacacagcttaatggtctgtatgcatcctacctgggctgtgggcaaagaaaccccttccttcccaactaggaataggtaatagtactgggattggccaggtgccatagcagccttttcatttgcttttttttttttttttcttttttaaatgtatcacacaagcctggagagaagggattttctttagccccacttaacagagaaaaggcttagcaaggtttgtgtgaggtcacccagctgtaaaggcagccaggcgccctggttcagagcaaggactctagagccccacgcctgtgggagagcatgtcacctctctgggccactgtcccttcatctgtaaaatgaagattgtaaactgtataagaaatatccacctcagggggttgctgtgtgggtacagcaagatccatgtagaatgctgagcatattggaagttctgtcgtttgctctttccttatgtagtttatgaccgttaagctctctgtagttcactaaagggtgggaagaagggtaagcctgggattccaccgccaggtctgtgggcagactaggctgggctcttacccactgggtttgtcgtggggccactgcctgctgcctccatcctgaccactctcttttctccctgcagattggccacatcgaaggacagcctgaaaggaagggggtctttccagtgtcctttgttcatatcctgtctgactagcaaaacgcagaaccttaagattgtccacatccttcatgcaagactgctgccttcatgtaaccctgggcacagtgtgtatatagctgctgttacagagtaagaaactcatggaagggccacctcaggagggggatataatgtgtgttgtaaatatcctgtggttttctgccttcaccagtatgagggtagcctcggacccggcgcgccttactggtttgccaaagccatccttggcatctagcacttacatctctctatgctgttctacaagcaaacaaacaaaaataggagtataggaactgctggctttgcaaatagaagtggtctccagcaaccgttgaaaggcatagaattgactctgttcctaacaatgcagtattctcaattgtgttactgaaaatgcaacattagcaaagaggtgggttctgttttccaggtgaaacttttagctccatgacagaccagcctgtagttatctgtgtacacagtttacagctacaaaaacctactttggtatttattacagaaaagtgctcagttaaatgtaagtgttattccttcagcaaaatattcactgacccaaaactctttatggcattttacaatgcacacagcctcatgcaagtttagacaagtggatttatactgtcttatgagtgcccgcccctgatatattacctcattatgcaaaaataacatatctttcatgactattttgacaaaagtttaaaacacatatgaagttcaaatttcaggaaccaaggactgccagaaaatattagcctctacattacgcatgcatttagaagcttacctgaaatctgccttttataaaggaatagtatggataagtggaattgtacattttttaaacttgattgccattaaagcagaaattataaggttgcaacaatatttgtttctaatcactggctttctcaagagtatggattgacatattgtgttatgaatgcacatctctcagatgtgttgaagcatccattgcatccattttttattattttcttagttttgttcttggacaaatttaaacttttaaaagattattcaagatgaatttaaaagtcaacccttcacacagtttccctactgtatgtagaatccaggtgctgaaaccaagtgtttcttttcccatgctctttgttaaaccccaattatagataatttttccagtcttaagctctgtccaccttcaagtcaattcataaccaagtttttgaacgctgctatgaattgcactgtgaaaagcactcttccctctcagttttcttttcatcccagccatgtttatcagatccttaagaacattgtatttcagtcttttacatcagtctgaattttggaaaagaatgcaatagttgtactccacagtcagtggaactgttccctgagtccgaggctcatgtgtcattctggcactacatttgcttaaattgctattttggcaacagcacagaaaactaatatttttaagcagagaatcttggcaatgagtgagagatgttaatttcacagaagcacaactcccaacccaacccttaggaaaagccctcttccatcgttacagtgctcagtgaatattaatttagttctgcttaagtggttgctatacaaactttgaatagccacctaataaataaaccttgcatgacaaacctgcaaaatattttatcagctgttattggaaagtgattttaagcaattgcttcctcagtgtcagggcacatgtgaatttccacaccaaacagagcatgaggaaccagttgacatgctgggttgtgactggcagctttagcagcctcggtactgaagccacaccagtgtccggatggaagtctgcatctgaggttgctca

SEQ ID NO: 11937 - DNA, 6000 bp, Homo sapiens
ggtttatcttgttgaagtagccccagagcacgagcactgtgacagtgtgtcctctaaaggctacctagggccgtcccctcatagcactgcagagcattgtaagccaagatttggatgcttgttggggctgttagacatcgggaaagatctgcacagagacacgcaggactttgtggatctccgtgggttccaggacatgtatttttatgtctttgtgcagagggcatggtggttaagaaagcactgaatttaacgtcattcagaccaggctttgatttacaaagcaattcagcttctggctttgctgcttgcttctgtgggtcatgtttcctaatcgctgaaccccagtgtccttgtctgttacgtggagtaagtttcccagcttctgttaaaggaactggggaatgccaagtgcttagcaaggtctgcaatcggtaaatgctagctgctgtccatcatctctttgccttttcttttctaaatacaggcagacctcccccttgttttgacagtacaactcctgccatcgacagttcacagtctgctctgatggataaccactttctttgtacaacaggtttttagtcatttttgcctaagatccaccctgctcgccaaaatttaacatttgtctcttggtggagatttgagagttgtgaatctcaaagtagcacttttacaaaccgtcgttgtggctgatgccgaatccatccatgtggactcaaaagtatatattccactgaagagtgatattttatgtccccagattctgtgcgtgccccatacgtggatcctaaagcatgtgatgtccctgggtgtatcacagtaggggacttaagtgatgtgtgtgccccagggcctgtagttaagatactttagttggccacaggatatgcctgacagtttcattagcagcctgatgtttgggttgagagagtcagagttgggaaccctgctgatttataagtcttataattattatagctaaattttattgagtgctttctatatggttcaggtacttggcaagggccttgccatatcttatgctgttagatcctcaaagtaatctaatgaggtggataccaattttatagatgagaaaactgaaggtagagggagactgggttgcttgtctgtagttacttacaagcagctgtgcagaaattcaaggtaggtttgtctgacactgaaggccatgataagctgcgtcgctgctttgagtgattctagaatgttgactccagttaaataattcatccaagatcacattgctggtaagtggcagagccaggattcaggcaagcctgctctcagccactctgccgctgttcctctgtcgtaagcaaagcctcagggcatgtgatgcactgagattagtgtccgagccctgggtgcctgggtaagaaatggctgcagtgattggctgcttcttggtctggagaaaggagactcattttcccctctggataatttgtttagatcactaattaaattataaccatactaagggaggtggttaacaaaagaaaaatcgtcatcaatcttactttaagctttcatttatctgtgttctttctttctgtctttctctttctcttctctttcttttttttttttttttttttttgagatggaatcttgctctgtcccccaggctggagtgcagtggcactatctcggctcactgcaagctccacctcctgggttcaagtgactctcctgcctcatcctcccgagtagctgggattgtgtgtgcctggctaatttttgtatttttactacagacggggtttcaccgtgttggccaggctggtctcgaactcctgagctcaagtgatctgctggccttggtctcccgaagcgctgggattacaggcgtgagccactgtgcccggcctcatttgtctgtgttctttctcagttctaaactctgccacataattgccctgctttttaacttgccgttatgccatgactcatttatagctgcatactattccatgaaactgatatgatttacttgacccataacacatctttctgcatatagcctttttacttttggattacttctattaaagcaaattaattaattattaattgttaattgagggatttatatattttccttatcacataacttttcaagagtcccattataggctgggcgcagtagctcacgcctgtaatcccagcactttgggaggcggaggcgtgtgggtcacgaggtcaggagattgagaccatcctggctaacacagtgaaaccccgtctctactaaaaatacaaaaacaaaattagccgggcgtggtggcaggtgcctgtagtcccagctacttgggaggctgaggtgggagaatggtgtgaacccaggaggcggagcttgcagtgagccaagatctggccactgcactccagcctgggcgacagagcaagactccgtctcaaaaagaaaaaaaaagaaagagtcccattatttatgcagtcaatggtatcttattctattgcttagcctcactaacatgaaatgttttatcttaaaaaattctggccgggcacggtggcatacgcctacaatcccaacacttggggagcccgaggcaggaggatcatctgaggtcagcagttcgagaacagcctgaccaacatggtaaaaccctgtctctactaaaaatacaaaattagccgggtatggtggccagcgcctataatcccagctacttgggaggctgaggcaggagaattgcttgaacccaggaggtggaggtagcagtgagccgagatggcgccactgcactccagcctgggcaatagagtgagactccatttcaaaaaaaaaaaaaaaaaatgttgctattttaataagtagcaaaatggaaccagccaagttttaaatttatattctcaatactatagagaggctgttttttatgtttgtttactaatttgtacagtatagaaataaacctatgtcatatcaaatggtatatatttttgccagtctgtaatttttctcttttagttatggtgtttgtttgtttgtttgtttgtttattgagacagagtctcgctctgccgcccaggctggagtgcagtggcacaatcttggctcaccacaggctctgcctgcagggttcacgccattctcctgccttagcctcccgagtagctgggactacaggcgcccgccaccacacccggctaattttttctatttttagtagagatggggtttcactgtgttagccaggatggtctcgatctcctgacctcgtgacctgcctgccttggcctcccaaagtgctgggattacaggcatgagccactgcgcccggcctatttatttatttatttattttgagacggagtcttgctgtgtcgcccaggctggagtgcaatggcgcgatcttggctcactgcaacctctgcctcccaggttcaagcgattctcctgcctcagcctcctgaatagctgggattacagacgtgcaccaccatgcctggctaattttttgtatttttagtagagatgggattttaccatgttggctcagctggtctcgaactcctgaccttgtgatccacccacctcagcctcccaaagtgctgggattacaggcatgagccacagtgcccggccgatgtttattttttaatagctttatttcagagcatttcaaacatatataagtagacagggccgggcacagtggctcatgcctataatcccagcagtttgggaggccgaggtgggtggatcacttgagcccaggagtttgagacgagcgggcaaatatggtgaaaccccatctctactaaaaatacaaaaattagccaggcgtgatggcaaatgcctgtaatcccagctcctcaggaggctgaggcaggagaattgcgtgaacctgggaggtggaggttgcagtgagccgagatcgtgccactgcactttagcctgggagacagaaagactgtctcaaaaacaaacaaacaaacaaacaaacaaaaactagacagagagtctgatgaattcctatctacctgtcacttagttccagtgaatatcagctcatgcctgatcatgtctcatccacacccgtgtgctcataccccctcctttattattttgaagcagtccccagatataagatgtcaaatccatggttatttcagtacctctaaaacgacttctaaaaaatcataactggccgggtgcagtggctcacgcctgtaattccagcactttggggggccgaggtgggtggatcacctgaggtcacgagttcgagaccagcctggccaacatgatgaaacccgatctctactaaatatagaaaaaaattagttgggtgtggtggcgggcccctgtaataccagctacttgggaggcctgaggcaggagaatcacttgaacccaggaggcggaggttgcagtgagctgagattgcgccactgcactccagcctgggcaacgagtgaatctcccgtctcaaaaaaaaaaaaaaatcataaccgcattgctgtttgtttttttttttttcatttttcaatctagtcaaaactgttgaatttgtcctttttattcgtttttattctgtgctttcaaaagaagggtttttctcaaaggctaattcaagaaggagcagagaagcagagactgagggatagtctcaacatgttcagtgtgtggcgggcgggcctggcgcagttgccggcacacagggagaggcctcagcttcacctgcctttttctctcacaggtttattcagtcaccatgaagctgctgctgctgcacccggccttccagagctgcctcctgctgaccctgcttggcttatggagaaccacccctgaggctcacgcttcatccctgggtgcaccagctatcagcgctgcctccttcctgcaggatctaatacatcggtatggcgagggtgacagcctcactctgcagcagctgaaggccctactcaaccacctggatgtgggagtgggccggggtaatgtcacccagcacgtgcaaggacacaggaacctctccacggtaaggctcccctgtgagccagcagctctgctcagccccgtctctggcctctcagggttccctgtctagttgggcccagggcagcctggcagcttggcagaggtaggatgaggcagacaagtctcgatgatagagtggacaggctgattctttctctctcattgtctgaatcagcaaattctgagtcttctgcagcaccttctgaccccctgcataggtgttctgaagcccttaacaaaaggcagcctggggctgggcacagtggctcacgcctgtaatcccagcactttgggaggccaaggcgggtggattatctgaggtcaggggttcgagatcagcctggccaacatggtgaaaccccaactctactagaaatacaagaattagccaggcatggtggcggatgcctgtgatcccagccacttgggaggctgaggcaagagaatcgcttgaacccaggaggtggaggttgcagtgagccaagatcgagccattgcactccagcctgggcaacagagcgagaatctgtctcaaaacaaaacaaaataaaaggcagcctggaagtggggttctcagccccccagaatcttcctcagcgccgcacttgagtcactcagaaatactgagaaaacacggctcccaggacggtatttctcatagagtttaccattgacagagtccattacacactatcccgggtgagcccacagtccctcaaggtgcaggtgagattatctgcattttataggagaggacaccgagggtcccgcagtgagtccctgcagagaccagggctggaacgccaggtctttggattctgtgttctttcttccatatcatctctgctaatcagactctggggctatttgtggcagccaaatataagtcagccagcaaaatctttatatatcgactttgttccctgtgctggtgttgtgagaaatagagaaaaatg

SEQ ID NO: 11938 - DNA, 6000 bp, Homo sapiens
ctcggctctcgcgcccgcagagggcctgcccctctagtcctgggtcgcggccctgcccatggggtctcaggccaggtctctgctggcagaggcggtagtaaagtccctgtaccccgtctcccagggcacaagctccctagcctctttggatccattgcccctgagctcccagagtcacccctccacctccgcagccagtgaagtgtgttgtgcctgctgaagtgatcaccccccgcccccagccctgcatcaggccacaggtcttggctttctccttatcaccatttgctgttatcacggcacacagcagggaatcccaggcccccccgccaagtggttacccaagtcaccactcctgacccaaaaatcaggcatggcattaaaacgttgcaaattcctttactgttatcccccccaccaccaggaccatgtagggtgcagtctttactccctaacccgtttcccgaaaaaggtgctacctcctttccagacagatgagagagggcaggacttcaggctggatccaccactgggctctccctcccccagcctggagcacgggaggggaggtgacggctggtgactgatggatgggtagtgggctgagaagaggggactaggaagggctattccaggctcagccctgctcctgcagctttgccgctgagtgtaggaaaaacaggcatgacagaccagggtgagggttgtgcccagctgggccacggccatgcgtggggtggcccaataaacaccgtggactcccagcaaggctgctgcctggtgtttcgaggctgctgtggtcgcagacagccgcctcgccttggctccctgtcaacaaggtgggggtgggagcgggagggaggagtggcccctgtcttaagagcctcacaggctgcaccaggagagcagccagcctgggccaggggccgccaggtcccgagggtggctgacccaaacgtcgtagatgcttttgttgggtggcaccccttggaagagggcgtctagatcgcagagcagccctgggggccctcgggtttcaggggccaccccccagtaggcagggctggttgacggacactggggacaggaggtgggtggtggtgccaagggcattaccacattgggagtgtagataggcaagtaggaggtgggcagctgcccccagagggaggccctgtgtcccccgctggaccgtcccccaggaactgcggtgccctgcagtaagtggagaggccaggccctaggctctggggagagggttgagggcccgatggctcccccctgcacagtctccccctccactctcgtggggccaggaagggggcagaggggccacagaggcctctcagaagagggaaggggtggggtgggcaccgcctcctccccactgttccctgtgcctgcaggaactgggctgctctgtggagctagccccggccagggtgccccctccccggaccctcctagcagggacttgatgctgaagccctcactgggtggtggcgggggactgggcggccggtatggccggccgtgcagcacgtaggggcccaggtccttggcgaaggctccacgcgcacctccgttctgccagcgccggcacagggcggtgttctgcagccggagcgcctcagctgggatcaggctcacgtcgaccgcccagaagttgcccttggcctggggctttgcagggtccttgggcacctgggtgtgggggtcagacatgggtggggctgcccaaccttggatgctcaggacttccgcgcgcgctccgcccccgggctccgaccctggcctgccccaccttgcggaagcatcggttggaggaaaggttgtggcgaatggagtctttccagccctcgtagtcttccctgaagaaggggaacacggcctggacctgacggatgatctgaaaccgccaggcggccggccggcgccgtgagcccagacggggagggggtagcgccctacccctcccccactaccgggctcaggggcgcgcggtgccggcccctgctgtccccgaagaaggacatttctgcgcggaagcgcggcagagagggcaaggggctcccggagaagggtcgtgccttgaggccctcagctctcaggactggtcccactggcatacctgggtgggctaggaaggggtgggggtcagggcttgaacctggaagtgggtggggaacgagtctggggaaagagagagtgggggccggggcccgctcacctgggccagcttcagtctgcgggagggagcggcctgaatcaccaaggcgatcatggccaagtaggtgtaggggggcttgtcatgtcgcaggtacctcttcttcctcctcttagggggctgggagggcgactctgcctctgggggccccaggcgggagccgctgcagggccccatgcgggacggtagacagcgtgggcaggggcctggccgggtggagggtgcagggcggtggggcagtgtagaaggcagggccgggacctgaggccgggctggggcaggcgggctggggcctttatcattcggatggaagggggaggggagggaagggaggaagaggctgtgggggaggggagcatgccgagggcttccacaattagcaggttttggttaatctggaagggaggggcagagagcattctagtgggggcttctcctgaggcctcagtctccacccctgagttgcctttgggtggccaggcccggcttcaaaggggctgcgatgacccatggctactttatcccgtcttccctggtcaggtttcaggaccccatttaacaaatgggggagtatttagcccatgccaagctcccaaggcgtggggcgctcctggagttcaagatctagcagctgctagtaggccctgaactatgggggctggatatccacccaggacatgatcaggtggagcttcctggaggagaaggccatgaagcccgcaccctaggaacaagagggggacacattgactcaactgatttcctgggagttgcttcaggagcccaggtggaccgctcacctcctcctccctagccatctctgctcctccacccaagcaaggctggtattgtgtatcctgccccaaagcccaggttctcctccctcacaaggggcaagtttgcccaagaggatagcagctctgggaattagcagcggtggttggtgctggcaccaggccaagggcccccagacacacgggggcccagggatatgcttttgcccttcactctgagaattcagcttttcttgtgcagcctccaccatgataacctcaaagggctgaaaatctgcagcatacggtggggtccagcacaccctgaggtgtggaggggagggacaggcagcaagtgtccaggaggaggaggcctgggccgcaaggggccttgtatgtggggtaccacactgctcctgccccccacacccccggtcgggtggtgccccttttccttctatctctgactctcccctcagacgccacgtggtttccctcaggactcctgccaccacctctctgctgtgttccctaggttatggctgcacaatcctgtgcctcatgaggctaatacttgtggccacttcaccccattcggtcagcaaggcgtcgttctttcctacaagtgtttgttgttgttgttgttttgagacaaggtctcactctgttgcccaggctggagtgcagtggtgcgatctgggccccgtgcagcctccacctcccccgctagggcgatcctcccgactcagcgtcccgggactacaggcgtgcgccacagagcccagctaatttcttaatttttggtagggaccgggcctgcctatgttgctcaggttggtctcccgggctcaagtgacccactggcctcggcctcctcccaaagtgctgggatcacagacgtgagccaccgggccgggcctttcccataattttttttttttttttgagacggagtctcactctgccgcccaggctggagtgcagtggcgtgatctcggctcactgcaagctccgcttcccgggttcatgccattctcctgcctcagcctcccgagtagctgggactacaggcgcccaccaccacgcccggctaatttttttgtatttttagtggagacggggtttcatcaggttagctaggatggtctcgatttcctgacctcgtgatctgcccgcctcggcctcccaaagtgctgggattacaggcgtgagacaccgcgcccggtctcccgtaagttttaaggcacccccctctccactggcgcttccttggtggggcgctggaggctccccaagttctgaccgctcttctccgaccgcactgtcctgggcccgaaaccacccccaaagctgccacccattccgctggcgcccgtcccgttgcccgcgatgactcggttttgtccagcataaatcaatgaccaccgtcccgggagccttggagcactttgagccattcccgtcccacccacgccccaaggaggtcccagccgcggaggactcgcccggccgcccgcagctgtccgcgttggcccccacccccgaccgtccctccccaggccccgcccccgacatttcctcctcccaggctccgcccccggctcccacggggcaccgcggcttccggctatgggtaccgcgggccggaagtgtagcgttgccatggcgagggccgggtgcggggcccgcccccgcagcgcctcagggagcgcggggcccactgacccgcggaagccagcggacccacttgtgcggcggtcggcgcggggcgcgaggtgaggcgcggactcccgggtcctgcggcgggagcggagcgagggagaggggccccggccagggagagcagtggcgggcccgggaaggaggggcactgggtcgacaccgagagaggaggccgggccggggaaggatgaggcagaggagagggaggaggccgggaagggcgggaggaggaggagaccgaagggagagaggaggctggcgacggaggaggccggggaggggccctcgggagacgcggctgccggcacgcgggcgcccagggcacaggtcccgccgggccgccttgggcgttgctggctgaggcccagggcagcaggtgccaacggtcaggaaaggcagggagccgaaggctgccggtgggcgcttcgcgttttgttccaaggcgaaggtgtgtggattctccgcagcccgtcggtcaggtagacagctccggaattgtcttcattttcagatgaggaaatcgaggccgcagagaagggacttacccaaacttaagctttgtgtgggccttggagctaggctgaaggagaaagtggagtctcactggggcaagttccttcaactttcagggattcaaatgacctcacttgtagtgcggggcgtccggaccacccctcaggaattgggatcagggcaagaattactaactaagcaagcaccccgcctgggagggagcgtccaggactggtgtgggcccctgtctgtaccagagcggaggcccggggcacggtgggattaatttccatgggtgcagagaggggagccgtgtacggagtcattctaggcttaggggagacagagcaaagttagccttccccaaacctctgtgccttccttttcttcctggattcctacctgggggtggaggtggaggcgggggtaccgctgcctttctcaaagtgtgtctagtccagcagtgagccctcctgggcgtcttggcgccccagttgcttcctggacgtattggggtttctctgggagaagggtcttgcctgcagtaccctgggcctcctgaagaggcctctggttgcgctgcctgattcagggacccagagccacgactcgccgagaggagctccggcggcgtgcggctgggttgcctgaggggctgggggctgcctggtggacttgcacacatgctggctccatacctgtcactgtggtggacgctcagagctctacagggccagctgcctgcccctgccccaagtcccccgg

SEQ ID NO: 11939 - DNA, 6000 bp, Homo sapiens
aagaggcagcacgtacagaggttaagtccttcatctggagaatcagctggccacgttagcatccaaactcctctgctgctgagataaggttacttagaccagccatggtggctcgctcctataatcccagcagtttgggaggctgaggcgggaaggttgcttgagaccaggagttggagaccagcctgggaaatatagggagactccgcctctacaaaaaatacaaaaattaggcaagtgcggtagtgcatgcctgtagtgtcagctactcaggaggctggggtgggagaatcacttgagcctgggagcttgaggctgcagtgggctgtgatggtgccactgcactccagccttggcaatagaggaacaccctgtctcaaaaaataaataagttacttaggctgggtgcggtggctcacgcctgtaatcccaacactttgggaggctgaggtgggtggatcacttgaggtcaggagttcgagaacagcctgaccaacatgttgagaactccatctctactaaaaatacaaaaattagccaggcgtggtggcacgcacctgtaaaccgagctactcaggaggctgaggcaggagaatcgcttgaacccatgaggcagaggttgcagtgagctgagatcgcgccactgcactccagcctgggcaagagagcgagactctgtctcaaaaattaatactaataataaataaataaatacataaataaataaattgcttaaactctctgggcttcagagggttgttttgacaattatatgagataatgctcaataaaagttaaagcattgctactgtttattatgactaccacaatttagtgacatgatacttattagtatttgttaacaaaatgtccctgcttcaagccaagatgagttacagtggtgccccaagctcccttggcctggcgaagctctaccccgtggaaacaacagatcttactctgatgagctacctccccagctccctgcaaccttttctctccaggtttcaataccagaaggctgccttatgggggtatgcccctgggaccgagggcacagccggaggaaagaaaggaacaaggagggatttgctggggggtgtggtgaagggctgggccgggccaccctgtgactgtgacactgaccaaaacccccggccgaaatggaactggttaaaatccttattcactacctttggcacctctttccctctcccccctctctcagctctgccacatagtgccagcctgagcgtatacgcatgcacacacacacacacatgcacacgagcatgcacacatgcagcccccccacctcgttctccttctgccccttgccccccactgcctcaattacagctaattgagaggtaaataggctcatgacagcagttgtaatcagtgacaggtgaagcaaattaaatttcttacaccaaaaataacaggacgatttgcctgccacggcccgtcattcagatggccccctcttgggttgcgggggccgtgaacacatagcctgcgggtttcaaggtccagggttccctttgcttgactggttttccaggcagactccagggactcagcaaagcaagctgggggtggcgggtattatccataccaaatagaaaggaagtgccctggagtccctggaattgactgggctgggtgctggctgacttctcaatcctgtcacttgcatttaaccctcacagcagccctgcattctacactgtcctgtgcacagtggatagtcgcagccccaggcctgactgtggccaaggcacaagctcttggtctgctgctgggttgcctcctcctcccagccttgctacagctgtggacagaagtcacagtggtggtcagggtcaccttgctgtcctcccacactatgcatcacagtggcccagctctcctaggccaccgtttcttctggcccctgaaaaacacccatctgagctgggaggtgcttggcctgctctgctcacctggattgctgccatgctggagcaggggggttgcctgggacccgcccacccctcggaaagaggaaaggagtggcctgagcgccactgcccactgtcaacctcacctgcctccttcatcagcttcccaggcccctcccttgtgaagcaaatgctttccagggaaattctggctccagccttcatctggctgggcctccaagactatacttagaaagtgggagaggacacaggcgtgccaatgggccagctccagggagagctggcatcacccaagactcatgctgcagaaaaccaaaggcaagtcccccactcaaagtcccgctcccgccacccaatctggttaccccctgcctccccctgcttcctgagcccaagagcagtgtacgcgctcaggcccaatttcctgctgctgccttacaatattatagtttgatagaggattttcctacttatagactcccaaagggtatagctatatcagaaaaggaaaaagcgtatcaagcaaatgtgcttttcctgtacacacacacacacacacacacacacacacacacacacacacactgctctttttctctagcttctagatgtcttttaaacttagggcttcagaggtgtctgtgtgtgtgcatgcatgtggttttgtgtctgtgtatgtacgtgtgtatgtatgtgcatgtgtacgtgtgtatgcgtatatgtatagctgtgcatgtgtgactctatgtatgtgtgcatgtgtatatatgggggtgagtgtatgtgtgcatgcatgtgtatgtctgcatgtatatgtgtgactgtgcgtatgtaagtgcatgcatgtgtgtatgtgtgggtgtgagtctatgtatatatatgtttatgcatgcatatgtttatgtaaattgtgtgcatatatggggtgggttgagtgtatgtatgtgaatgtgtatgcgtatatatgtatatgtgtatgtgtgtatgtattgtgtgtatctgtgtgtatacataggggtaggtgtgagtgtgtgtatgtgtattatgtgcatatctgtgtgtatatgtgtatatatctgtgtgtatgtgtgtacgtatgtatatgtatatgtgtatgtatgtgtgtggggtgacaggtgtgagagtgtatgtgtatgtatgtgtatatctgtgtgtatatatatgtatgtgtgtatgtgtgtatttgtatatgtgtgtatacatgggggtaggtgtatgtatgtacatgtatgtacatgcgtatctgtgtgtatgtgtgtgtatatctgtataggtatatgtgtatgtgtgcgtgtataaatgggggtaggtgtgcctgtatggtgtatgtgtatatatgtgcatatctgtgtgtatgtgtgtatatatatgtatatgtgtgtgtatgtatttgtgtgtgtgtatacatgggggtaggtgtgtgtgtatgtgtacatatgtgcatctgtgtgtgtatatatgaatatttgtgtgtatgtgtgtatacatgggggtaggtgtgagtgtgcgtgtgggtatgtgtatatgtatgtgcatacctgtgtgtgtatatgtatatgtgtgtatgcatttgtgtgtgtgtgtatacatgagggtaggggtgtgtgtgtgtgtgtgtgtgtggatgtgtggatgtgggtgggaggggctgaagggtgtccgcatatggaaggtgctgctttccttccattctttcgttttatccccacccccacgggcaccagggcacctgctaacctcccagaagtgcctgtgatgcggatgaggactcagggcgcagacctgtctgagggaagaagtttccgggcgcagacctgtctgagggaagaagtttccgggtgcagacctgtctgaggaaagcttttctggctacaccttggggaagaccttggggaaaagaagtcagaaggatgggtagagaggtgagttcaccacggggcagtcacaacggagggctcagctgctcctcacccggggtgagatgagagggctaggccttgacgtccccacccttactccaaccccacacccagccagtgcctgggccccctccccaagctgggatggatgtgtgcctgggccagggcaagcctcaaagagggacgcagctctgcactctcaacagctggggagtgaaagcctcaccctagaggggaattcgggtcacccccgagtccccccacgccctcctttctctcccctcttctctgcactcatcattgccacgcccccggcctctgaaccctgccccacaaaccaaagcctaatggatgtggcagagtctctcaccagtccccatcccccaagccctccatggatggcactaaaaccaaacctcacatcccgggccaagctgcagcatgggctacattcacgcacctcctcctgccccacagccaactgtgtagacatttgtggacactcgccgccaggaagcaaactgtcggggagaaggaaccttgcttgaatgtctcccatgtgccttggcgtccagccagagtctgggctggtgagggaagagggctagagcggaggtggctgcttgtagttgttctgtgggttgcccgagagccagctcagctgtaggtgacccctgacaggtggccccatcttacccttcaatgcatcggccccagaagccaacccagcacccactggcccccggaggtgctcagtacgagggcaggaagggctctggatggggagtcagacttcctaggagttcgaggccagttctcccagttggccttgagcaaaccccttgacctccaggggcccagctcctcctacccacagggtcatggtgatccagaaaggacttgggctgcctggtgaggccattctaggcagtaaatgacagagaaagcggctgtttctaggctaccgtactcgacagagagaagagacgaaagacttgcgaccatgggggaggtggccatgagagctgagggctttccctgtcacagcccagtgaggcacacggaggccgtgaagacccccagcaccctgggggtggggggagccgggagcagggttagcatgagatggggttcctcctgctttatgtctccctgaagggcaggcacagtgacgggccctgttatctctcagaggccctgagaggaagggaagccagcaacgcctgccctgtggggagagaaggggtggtctttgcgtccagtccaatctgtccatctagggatggggtctcagggcactggttactccttagtcacttcggggcttaattacaaggagtgggggtggaggagggaaatggggagtgggtgaggggtgcgagccctggggctggttatcgcagccatgcttcagggtggcatcacaccatagcgagatccttgtgatgctttgccacaaagttcaggggtctgtcagtttcctagggctgccataatgagttacacagaccacgtggcttataacaacagtaattaattctctcccagttccaggggctgagagttcaagatcgaggtgtttggtccagggctccgttcccccagaaggctccaggggagatttcttcctcgcctctttcagcttctggtggccccaggtgttccttggcttgtattcacatcactcccatcttcgcctctgtctgcatggctatctcttccctgtctctgtgtctttatgcggtgtttccccctctgggtctctcttcttataaggacaccagtcctattggattaagagtcacttcctcttaactaattacatctgcaatgaccctatttccaaacaaggtcacattctgaaatcctgggagttaggacatcaacatgtcttttgcggggacacaattcaatccgttaaaaggggcactgggaggactgagattcaagagtgcaagcacaggtttgggacttgctaaacgcccgagtccctcctgctccgtccagacaggggcaaaccccatgaaaaggagagctgccagacgggggagggtcccggggagtgtctagcgagtgctcgtgaactccgagaggtt

SEQ ID NO: 11940 - DNA, 6000 bp, Homo sapiens
cagaaaccaaaatccatgaatgctcaagtctctgatataaaatggtgtggtatttgcacataacctatgtgcatcctcttgtatactttaagtcatctctggattactcttaatacctgatacaaggtaaatgctatagaagtagttatcgtactttatttgttttttacttgtgttattttttatggttgcattggtttttttttgtttgtttgttggttggttgattggatttttgttgttgttgttgttttgagacatgggtctcactctgtcacccaggagtgcagtggcgcgatcatggctcactgtagcctcgacctcctgggctcaagcagtcctcctgctttggcctcccaaagcactgggattatagatgtcagccaccacacccagcctgtattgttattttttattgttttattttccaaatatttttgatgttgtgaagggatgccagttttggtggttggttgggggtagggcctgaattttcctaactgaattttcctatcacttatttgttgctgagtttgctaccgctgtccctacaatagaactgttcaatggggttccagctgatgttgattttacttttttagagcctcctattcccttggatctgaaaccagcacttcccttgcatgtttacagacacgcagttccctatctttatggacacatatccactcctacagggtccacagtgccctgtagatcatggccgtaaagtatcagccctgattcctctttggctttgttttcagaagcctgtgacttctgaaccaaagtcagcctccaatctgaggctgggataatgacatatgctgaatggaagaagttggaactgattgttaaaatgtttgaacagcacaggaaacaggaagcaatgagaaacaaaagcaccctccagctctgagtcacagggccgtctcctctgccaggccatgtcagccacagcccagggtacatgtaattgggtaatagatattatttggcccggagaaaaagctgtccgtctgaggatgttgtatgccaaccactttaactagaaagataacagagccactatcaaagagcctcaaacttcaatttcagtctcagagagttctcaacaggatgctctggctagaaattattagttctttgcaagggctcggagtccactagtatagactgagctgttactttttactggcaatgcttcatttttaagttttgttcactattatttaaataataaatcaagaatcttccacaactttgccattgggcctaaccacttacataatcacaatgtacataaagtgttgtttttatgtttttaattgtggcaaaatatacatgacataaaatttaccattttaaccatttttaagtgtatggttcagtcgtgttaactatacccaccttattgtgcaactgaccaatctccagaagttttcatcttgcaaaactgaaactctacacctattaaacaatcacttcccatttccctcttccctcagaccctggaaaccaccatcatattttctatttctatgaaattgactgttatacttacatcatataaatggaattacatagtatttgtcctgtggtgactggcttatttcacttagcataatgtcctcaagattcatccgtgttatagcatgggtcataatttcctttattcatccattgagggacatgtaggttgctttcaccttttagctattgtgcataatgctaccgtgaatttacataaaggtttttttgttggtttttttttgagacagagtctcactctatcgcataggctggagtgcagtggagcgatcttggcttactgcaacgtctgcctccgtgttcaagtgattcttgtgcctcagcccctcaagtagttgggactacaggtgtgcagcaccacgcctggctaacttttgtatttttagtagagacaagattttgtcatgttggccaggcgggtcttgaactcctgacctcaagtaatccacctgcctcagcctcccaaagtggtgggattacaggcatgagccaccacgcccagccccaatttacaaaaagttttatattctacctttttactttctgtcataatatctgtgtgtatatacatataatataaattaaatatattatgtataacatattatagaatataaattacatgttgtatatgtaatctataaatataaattacatgttatatacgtaatctataaatataaattacaggttatatatgtaatctataaatataaattatatatttatttttatatatacagttttttccagtttgatatatagtcttcatcataacctttttttacatctgttttaagggccacatgacagtccttcaagctcatgcacttaaataatttctacagttggacatttgagatgtttgtagtttttctctaaatcctatgacaaaaattttgtacctatgatttccctcccttcccccatattttagcatacctttttagatagattccaaggaagtgaaattactgggtcaaaagcaacatacattttataacttaaaagataaaagatagaaagccgcattgctttctaaaagaatggtatttccctagctactaacagtgtatgtgaatttccattccacagtactcacagtttttttttttattctatgattaaagggaggaagttgagtgctcattcatttttaatggacaacaatttgattattaatagtgatgggcatttgtgaggagaccccagacttggccagcctgtgaatactagcatggttacagtaaactgaaaaaatatatctatttgatctaatatgtattatccctataatatatgagtatgtattagaaacatgcccaaatagtacgtaatccataaatgatagctactgttattgttgctgttattcttattattgcccaacatgtgatgattcttagtctatacctgctttcccaggccctcaatttcccaaaatcatgatttcccaatttttggggggcatccccagttaggtgctgtctcggaacattcctgtgaggctgctctacccaagccctctccctctagcgccctctattggacacaggtacactatgccggaggctgtcaaccctcagagttctaacactgtacttagggtggagggcatggtggcagaattgtcacctggactccaaaaaggatactgccttatgcccagagtcttgcaaatatctttattaatacagttcctccatcttttggccctaaccccctcattccctagaggctcaggccacaggccctgcatgtaagtggggggcagtgtgccatgctccctgtagggagtggacagtggcaccccagagatgtccacctcctaatcctggaacctgtgagtatgttgccttggtagtcccctatggtaaaagggactttgcagatatgattaaggatcttgagatggggaggtgatcttggaatatctgggtgggcccagggtcatcccgtgagtccttacaagtgaaagagggaggcagaaggctcagagtcagagggagagttgaatatgcattgctgctagctttgagggtaaaagtggctaggagccaagaaatgcaggagatctctggaagctggaaaaggcaaggaaacaaccatcccccagaatctccagaaggaatgcagccctgccgacacattcattttaacccggtgtgatgtattttggacttctgacctccagaactgcaagatactaaatacgtgttgttttaagccaccagattgtagtaatttgttacagcagcaaactatagcgatgaatacattctgctgatgtctttgtttcctatccctatttctcgctctaggtttacattttaaaactgtttccatctaggccgcgcgctgtggctcgcgtctgtaattccagcactttgagaggccaaggcaggaggatcacttgaggtcaggacttcgagaccagcctggccaacatggtgaaaccctgtctctactgaaaatacaaaaattagctgagcatggtggcatgcacctgtaatcccagctactcaggaggttgagattagaggattgcttgaacccaggtggtggaggttgcagtgagccaagatcatgccactgcactctagcctgggtgacatagcgagactctgtctcaaaaataaaaaaaataaaattaaaaaactattttctttttttttagcgttaaatcgaaagttccctagttaattcccacaattaggaggggcccaccagttccacaaataggaaatctctgcactgctcttgctcgtaaagtgtatttgctttttcataaattgcttatgttctttgagccaccaatggtttaatgtcagaataatatagatcattagagcctctcaagatcccacaaggaactgcactttctcctgtagttaaccatccagtcatccatgcaagaaatatttattggatgctaccatgtatcaggcactgagccagtattgagatgtgaagacacagtgcataatctaagcctttacagaggccacagatgttgggtttttatggcttgagaacaacatacattgtttctttccaggaagctaattggggtacatggagccactttgactaagtagcaaggaacaggaactgcacactggttccatcttggcttccaatttgtattcagacccaggcaagagttaaagagttcgatgatagataagcacagatgcaaaacagtacagtccagtgcctctttgcttaggctaatatctgccctctctttatcctctccagccctgccttcctgcctttgacgcagggagctaagggtctgaatgaaccctgttggaggttgcaattaaatctttgtggacaaaggcacacacacacacacatacacagaatcctcagataacaggaggcaataaatccaacagcacatccacgttcagagaacagtgtccctgctgtcttgctaacagctgccaatacctcactgagtgcctcacaccaacatgggctccaaggtaagatttttctctctccggacaaatttaatctttccttgtgatttgtgtctctgtcagaggattttgactgttaagtaaagtttactattgatttgttggcaaattcctggttttgtttgtttttgttttgggatttgggtgtgtgtgtttctctctctttgtagtacttacttcactcactatgttttttaattttccatggcttgtcttttattcttatccatacatatcctaagtcaatttgtattcagaaatacctcctttatatagagaaatgaaggatcttaagtaattgcatgcatttactggttaaaacttaactgagaatttggttcacttaggaccttggtcacgttaatatgtagtagtgagagggttcttccagccctgggcttagaacagagtacctcagtgtttggggtactcccaacacctgaggctgactattgaatttcagtgataatcatttaaaattatttacttctttaattacaaaagtagctcattattgaatatttagaaatacacagaagataactgaagtcattgattataaataactggcatttgagtatctctctactctctcaaaaatgtgcccatatatttatatttagacaattgagataaagttgaaaacacagtttaatttcccttttttacttaacgttatagtaatagtattttctgtatcattaaaattatttgaaaatataatttttaagagccgcttaataatccaccattaacatgtttgacttttttcactaagaaaaataattctgcaattgatcattttgagtataagtctttggctgcatctctgaccttttttcttttgtaggatgggttccttgtagtagagttactaagtcaaagagtatacaatttttagggcctgatagatttcatgatggtaatctattttaaaatttaaatgagtgatattgtt

SEQ ID NO: 11941 - DNA, 6000 bp, Homo sapiens
tgtatatttagtccatcactgaacaaaatgtcattatgtagcacaagactgtatctgactttttagggggatgtataaaaatttgaaaaaacagctaaatatatccccatcagcagataaataatctactcctctccacaaggttgtcccaaatacattttgtccaggagacccttgcccctatacatcaacacacagtagtcatgaaaaaatcagtaacttagagataagctcttaaaaaggtagtagtgcctcacctcatagaaaagtagatcttaactagaaaaaaaaattgagaaataaaataaaaagctcctctagaaagctatttctatccagggtctcataactctaaaaataccctcgtttgggttgagcactgtggcacacacctgtaaccccagcactttgatagggattgcttagggtcaggagttcaaaataagcctgggcaacatagtgaggccccatctctacaaaaaaaaatttttataattagcccattgctgtggcacatgcctatagttccagctacttggaaagctaaggtgggaggattccttgagcccaggagttcattgctgcggtgggctatgattgcaccagtgcattccagcctgggcaactgagatcctgtctctaaaacaaagcaaacaaagaaaaatcacccatggtcaacatcatcatttaggctaactgcattttttttttttttgagacagtctcactctgtcgcccagactggaacatagtggcatgatcttgactcaatgcaacctctgcctcccaggttcaagcaattctcgtgcctcagcctccaagtagctggaatttcgggaacctgccaccacacccagctaattttcgtatttttagtagagatggggtttcaccatgttggccaggctggtctcgaactcctgacctcaaatgatctgcctgcctcagcctcccagagtactgggattataggcgtgagccaccgcgcccggccgctaactgcatgttctctaaaacacagagaaaatctccctccagatttgaaacagagcagatgcactagaaggtgtaaagaaagcacaaaagcttcattaacggaattcacgacagaacttagaagaaaatcatacctgggaaggagaatcttgtgccaaaggagatttcctagcattctttatattttgctgccgagcaatgaaacgaatcagatggtttgtttcaggagagccccgagcaccgactgcagaacgtcgtctacattttttaaggtaggatgatgactttcctgtaatgaaactctcttataaattggaacaaaacaaggcaatcatcagtaaccacatccaatactcgtgatgtaccagcctgagagagaaaacatgataaacatgtgctacaaaaaactcagtggagagttactggcacagtcattcatatacaatcagtggaagaggaatctttttgtctgctgacttagtctatgctcctagaacagtgcctggtacatagaacagttattaaaagttgttgaataaatacatgaacacattttaagttttcatttttgtttcttatttcctacacacagatggcttttgcttttgactcagtatttttctttttctaaataagtcagttttatccccagcaactgaaaggtaagatctccacctaggtacatgcagtctcaggttcttaattcttcaagatgattgtttctttctgatacctaccatcagcactaccctgaattttggacatatgcctaagcacacaaaatgaatccagccttttaaaggtctaagagtgatgtttttgagaatgaaagttagggtggcgtgccactttcgccttgtcttatgtattacctggtctagtgccctgtgatattcaagacttccattatcctccaattctaaatgctattctctgatccaattccattctcatatagtatttccttcttttccatctaagtcagacttcacaagtaaacttcatttctactgctcgaaggacattagccagaatcaatcttctgtttgtgtttttttttttttttttttttttggagacagagtttcactcttgttgcccaggctggaatgcaatggtgcgatttcgactcacggtaacctctgcctcccaggttcaagcgattctcctgcctcaaactcctgagtagctgggattacaggcatgcaccaccatgcccggctaattttgtatttttagtagagacgaggtttctctatgttggtcaggctggtctcgaactcctgacctccggtgatctgcctgcctcggcctcccaaagcgctgggattacgggcttgagccactgagcccaaccctgtttgtgattgttaaaggaggtacatcctgctctttcagtattatattttcttaattgctcttaaactttctcttatttttgccataaatgaaaacaaaatgcattattactattcatatcatacaccctcctgtatcctaggtgacaggtcaaaaagtgactcacacacacattattttctagtattggcatcaagcacgactctgacttgggaacattatcatgctgggtgccctgcgattccgtgatccctgctatgctaaatgaactgtgcatgtgcaaagaagtctctctgaagaagcaagtttgcagagtaggcaatttaggtacctaaaatatgacagtacgtataaacaaataaagctgagttatattaaagttatttttaaacttgaaaagcattacaacagaatgacaacttttcttacctgcagagttcctaacaaagctttcaggtgtaattcccaattgctctacggttactgtggaaaagttcaaaggtgatttaaaagtatctggtgtgcaaggattaggaggtaattcggcatgcttctgaggagtcacaatcttcccagttcccaaaatgaaagaggcatttcctgaaacggacgacatattgtaggggtgaggacaactctctgtctaaaccttcaacttcacaaggaggcagatcatcacataccagcattattcattgcagactccttggtttcagggggcttgtcttttgaattggcatccatctaagaggtgaagaaaaacaatgaaaaataaccccaccagcaagatgaacgtgattcgatcacgtaccttattcaggactgaattgtaatacagtccatactggcatagaaacacacgtcacaggtttcattttttattttaatttctgtgggtatacagtagatgtataatttatggggtacatgaaatattttgatacaggcatgcaattcgtaataatcaaatcaaagtaaatgaggtagccattatctcaaatatttatcctttttgttataaacaatccaattatacttcgttatgtttaaatgcacaattaaattatggaccgccaccctgttgtgctagcaaatactagatcttattcattctttgtttttctacctattaaccatctccacttccttcccatccatccccaatacacttcccaccctgtgctaaccattcttttactctaagcgcgtacttttaaagccaaattaaacagaaagaaatggagaaaactgctgttcaggcaccaaagcagaccccaaaggataagccatggcttttcaaccgtagcgaaaacctgaatcataagggtacccctctcaagacgcagctctatccatttccagaaattctctcaacaggtccggatgcactcctggtcacccagagcagctcctgacaggagtactaattctgtgctgcagggtaagccgaacaaagtgcctagaaatgccccggagaaacagccccgtggcagcgcggatgcaatcctacctctcacgccgcacctgaaggcccgccaggcagacaggcttactcccagagccccgtggcaggcgagcgtcgcgtcggccgctccttccagaccccggctcctctgtccggaagggctctcctggcaaagcacccgcagccgggagccgctcttcgaacccggagcccgaggtcccgacggctgacctggactcacagcctgcgctgatcctggcctgcgctctgcccggcagcctcctccacccgcctcctccgcccgccgaccgattcaaatccccgaccccgcccctcggtaccgaatttactctacgaatcactccgccacctcccccttctccagtccgcgcacactccgagcgctcccaggcctctccctcggcactggagtggcttcctgggctcggagagggaccaccgcgagctgcagtcaacccgaggactacagacacctgccactgccttgtgacctcggggactacttttcaggagagtctcgcggagtaacgcttctcttagcgctttaactccgcctcccacctttctattggatgctgcaaacttcgaaaagactcattcaaccaatcctaacagagcgacgagctggctcttacccaatcagtccgtccctaccgcagccgtttcctagctgggccggcttgtgggcggggctaacgctggaggaggggctgactggtgcttgggtccctttcagcgctccacctcctttccccagaccccgccctcgtatgcagataagcgctacctaaactagagggtgcgcctgctcagtaacgctggaagccgccgtccggctccaggagcctctctgattggctgatgccccttcccgtctactagccttcagcgtctcttccctccctccgtcccggctaggttagccagagcccgcccgatactgggtgctgattggctggactctgtccggtgacgcgggttggttggtacggcagagtgtcagtctcggagaggtgggggaagggccccaggcaggctgaggagcctaggggcggggtgggaaggaggaccggccgaaccttgggtgtgggacagagtgcgtgcgtgtggtgtgtccccaagggcaggaaggtggcgaagggaggcgaatccgagtgggtggagggaggggaagggcgggaggagaaaaaggtgggaggaggaccaggtgggagggtggcggctcactcaggacccagcgggggcagcgcgatgaggcgggtgaccctgttcctgaacggcagccccaagaacggaaaggtaacgggggcgtgagggggcgcggcgggccgggggtcggggcgagggcggacggtgcggaaccggctggcggggcagcggtgaagttgggtagaggggctgggaggtgggcgtgcgcgggctgggggcgctcggggacagcacagggtccccgcggcctcctcccgaccctcaggacccccgtgcccgagcctgcccttcagtgcctcagctgcctgggggccggcgcggttcggcccgggggctccgggtctcccggatgcttggtgcggggggcgcggggacgggggcgcggggagggccgcggtcacctgggcgcccgggcggtcgcgcctcttcccgcctctccccgagaccccgctcccgcctgcgggaggaggcgcgccggctccggtgctgagtaatgatctgctcggaaagtggcggcgagcaccagagcctgtggagatgggtcagggagacagaagtaaactgcccgtggataaacaaaatctcccatccgaggtcgcagacaggatttttaaaatgggggcattttcttgttgatttttgccctcctctctgagatgcctcaagcccccacgccccgccgccgccaaacttctctgtactctttttattattttgccttattttgattccctagaggacgggtacagcagacccaaaagggatcgatttgacagtcgcctttgctgtgttaggcctttgcggagagtgtggtgctcagtgttcttccagcgctggagcaagccaaaacgaattctcttccttcccagccttttgccccacccatgaaagttgttctgctcctttgggaaattttcactgttcgaggcagacatttattgcgttgctaa

SEQ ID NO: 11942 - DNA, 6000 bp, Homo sapiens
gtgatgtgcccaattattgcatcacttagttcatagcactgactggaagaaatgagacttcaagaattggggggccagacacggtggctcatgcctgtaatcccagcactttgggagtcgaggcgggcagatcatctgatatcgggagtttaagaccagcctgaccaacgtggtgaaactccatctctactaaaaatacaaaattagccggatattgtggcgcatgcccgtaatcccagtgactcgggaggctgaggcaggagaatcgcttgaactcgggaggcagaggttgtgctgagccgagatcgcaccatggcactccagcctgggcagcaagagcgaaactccatctcaacagcaacagcaacaacaacaaaatgaattgggaaggtttccatgataaatgccatggagccttccttaccaatgaaaaatgtttctctttctctgcctgatgagcctgttcctgcctaagctgaaaatcctgtcacatccttgcctgaaggatacaccacacaccccaggtaaaccagttttcttcatgatccaccccctccctgcctctagacttcaactagagtcagatccctacatgtcctggcaggtggggcatgggaaaacctgagaagaaacgtaaaacacaccccaagtctgcaagattctgcttgtttgtggtcacaatctggtgaatatacacaggaatagactcttgaggtcctagaccaaggacagaaagttgaagtggagtttggctgacaggggtgtgctttctaaagatttgggtttagtctacaaagtcgaacagctggagaaagtactcacagtttgctcaactggtagtccatgcaaagtgaagatgagataccagaaattagttcaatgtaatggaagacttggaggaacaggaatattggaatggatttcttaatatatgacctgctcgccttcctcctgatgtggaaggactcatcagagacctctttttccaagaccttgagaggtgcattggtgaggaagaaccatcatctcaattacaggaaagtgcaggaagtggtttgaaccttcagtccgaaggttagagttagggaaacttctcagtgcatggctgtattagtccatcctcacattgctgtaaatacctgagactgggtaatttataaagaaaagagtcttaattggctcacggtttgcaggctgtacaggaagcatggctggggaggcctcaggaaacttacggttatggcagaaagcaaaggggaagcaggcacgtcttcacattgctacaacagaaggaagaagagagaagggggagattctacactctcttaaacaccagatcctgtgagaactcactcactatcatgagaagagcaagggagaaatccacccttacgatccagtcaccttccaccacaccccacctccaacattggggattacaatttaacacgcgatttaggtggcaacacaaatccaaacctatcaatggcacatgtccatcatctgtctgctgaaggaggaagcaagaggaagctgtgtagtgccccctacctaacaaaaccataaatgcaattaatacaatgtctccagaggaatcccaaggattagggccaccagcaaaggctgtaaggatgcagaagtggtaattttgatgatctccaaatgctacctaaggtagatgggtctcatagaatgtcagtggttcattgtaaacttaagtgattccgattacagaagctgttcccaatgtggcccgaatgctcatcttcccagcagtagtggcaaaccctggtctctggatgtgctggcagagcccagaggttcaaattattcacttggtggcaagttgattgtagtgaatgccttatatgcttgagaaggcagcaatctggcttttgtggaatacagtagatgcttattctggagaatggctggagaggaaaccaatacatacccactctaacctcatgatctattactacaatgagcactgtacctgtctgtattttcttactggctttgctaatttatttcatattctgcccaccccattactttctatgtgtgtattttgagtgaacgttatgatttattccatagaaaacagaatttcaaggtggcacatgtgtcaggaattagagcaggaggctggacttggagctggatggtcactggtgagacttggggttctatccctgtggagttagggtggggttagggggaggctttttgcttgtgtgaggaatggttgcattctgctagattctacatttgtatgtttggcatccactatatgcacggccaaactaacagccaactttgttacatctcccctgcaatcagcttttgcaggtgcactacagttatagtacaagccctctgcctaatcttgactcagtatccccaacagcaccatttgtctaactctcacacaccgagccagtattcctcctgccacaaatcacctcagagctaggtactgggcaattagagaccatccctatagctcagagcccaccaagattattccaactatctcatcgcaagctgcttccttgcactgccctggttttcccggggaaacctcataaaggctcggggccaggcttcccacattgtgccctccacctcctgacactccctggtgctgctctgtgtggccctgcgggaatgtgccacccctcctgtttctagggatctgtgagtataaactccttcctttatgacagtcacttctgtgtctgcatgtcttaccaaacctgattaaaacaaattctgggtgaaaattttaggacaattagatgtaaacattttttttcaaagtgtgatgatggaaagtcgagtgtgcactgatgttaggagccaaagagctagatttcgtgtggcggggaggggggtgctttccagcattgaaacaactttcaaatatttcaggaatgtcccccctcttgaagtgggcagagcccaccttccacatagaagctcaaaaccccagattcctgcttccttggccttcctggcatctggtttgggagcacatgctttaatcagatgcatctgtttcgacctttgtatgcagagctagtgacacaaaggagcagggctggaggagaattaactgtggcagcggtggcagcagcagggatggctgcttccagggacagcggtgacagcggcacccatgacggtgccaggttcacatgcagctctgtagcagcaggacccaccatgctggccgcggggcagaggcttccctcttctccctgctctccaagcagcccctccagatttctaggtgcttctgtgaaccacccgttgttcctcaataaaaccattctccacttaaagtaattggtaggtttttattgcttgcaaccaagaatcctgatggatacaagctgtgattttcttttcttttctttcctttcctttcctttcttttcttttttcttatttcttccctccttcccttccttccttccttcagtctccaaatgaaaaatgtatacatctaactttatatatatgtaaatatggtaaaatattaacatttattaattatgaatagtggaaatatgagtgtttatggttttttggtattttatgtcttttaattctctcaaaagatgattctagcaatcgcatgcacatgtgtacacacaatgcacgtgtgtgtttgtgtttatttgtgctaattgactcctcatagtaaacctatgaggcaggagccattgttcacatcctctttttacatctgaggaaactgaggcataggaagctgaagaggcctgtccaggattatgcagctgttcaagagcagagctagaaattcagcctcagcagtctgtggccgggtcatgtccagggcctttgcttttaacaaaataagggagatgagctagcaagtagcttgagggaaaggccgaaagcagagtgtttttagggtggaggatgagcttctttaggggctgaagggaaggaacgagtggggcagagagggaggatctgagaaagcccaggctgttaatagatggggtgatgtcaagatcacagtgggccaggattcgccatgcacaggaggagacaggagtactcatctgatactagagaaaaggaggcttcaccggaaaatcaaaggcaaggtcacctgcaaggaggctgacggggtgacagagaagcagccacaccgggtggccgcgcaagtgaccggtggtcctctagggtggtggggggaggggtctcacaggggaggagggcaaggagagaaccgtgggctggctggcagctctgtccttactccaatttttccgatgctatttactgacttagaaggtaaatacattccaaggttcttcaagttctttacagctgggcttgttccaaggctggaatttgtgaagtggattcacatacagtgaagctgtattgacagacagacccaggacccaggacccagaacctgtgggtgcactcaggggccccaggcagtgatcctggagcccaggggtccagagagcagggaagggagcatcgtggtgactggacagagctgcatctgtccccaccggacataggctggagagtcacaggctcctcctccttcccctccagagaggctgtgtgtgtgtgtgtgtgtgtgtatgtgtgtgtgtgtgtgagagagagagagaacagcgtgagcctgtgtgcttgtgtgctgagccctcatcccctcctggggccaggcttgggtttcacctgcagaatcgcttgtgctgggctgcctgggctgtcctcagtggcacctgcatgaagccgttctggctgccagagctggacagccccaggaaaacccacctctctgcagagcttgcccagctgtccccgggaagccaaatgcctctcatgtaagtcttctgctcgacggggtgtctcctaaaccctcactcttcagcctctgtttgaccatgaaatgaagtgactgagctctattctgtacctgccactctatttctggggtgacttttgtcagctgcccagaatctccaagccaggctggttctctgcatcctttcaatgacctgttttcttctgtaaccacaggtaagaaaggtacccaaggcttatgttgagggcggcatgcatgtggagagcttgtggatatggggtcaaagaaatactagcagtttctgggtactcaggagggggttatgtctgaatgctggatgtcacctgctcctagaaatattttagtctcctggttgtccctgctggagctgtccacagccaggtgacgatgaacacctcctggctaggatggctagcccagtctcaggaatagtggctttgttacactgtatctgctcctatgtctttactactgctgtccattcttttgttcatttatttactcattctgtaaattgtctatgtcctttaaaagggctaaaagacagcaatgctatttactgacttagaaggtaaataccttccaaggttcttcaagttctttacagctgggcttgttccaaggctggcatttgtgaagtggattcctccatcagctggtgtggttgttcagatgaccttcaagatcccacccaaccttgagtgttaaacttctgtgattgagcaaaacagatataaaagctagaattacactctctagcccctaagcaccttgagtgcatttatttggaagaagaaatcatactggtttctctaatggaggggcttctttgggagtgtaatgttgccagttgtgaaaaagctgagacctgtatgcttggggaggttctggacagcagaaaggaaccaggtgggatggaagcagccttttgggagaaggaaatgttagtaaaaagaggagaatgtggactggtgggtgagaagttgaaaacagaattagtagaaccatggacagggaagtgagctcaaatcaccttgacctccacggaaccaggattcaggcaggctagagatgctgcagtgagtgtgggggtggggtgggggtggcctgga

SEQ ID NO: 11943 - DNA, 6000 bp, Homo sapiens
agaatgttctcattttgagtttaaagagaactgacagttggataaaggtcaacaaaaatgttcattcgtgcagtttctatgccaaaaaaccctcaaacttcaaacaagagcatagccaattttatagaaccatatcaaatcatctttattttcagagcagaatgagccactggatttaatttagcaaatggggctggaggggaagcttgaaataatttttataataaaagttttggccgggcacggtgcctcatctctgtgatcccagcactttgggaggccgaggtgggcggatcatgaggtcaggagttcgagaccagcctggccaacatggtgaaatcctgtctgtactaaaaatataaaaattagccaggcatggtggcaggtgcctgtagtcccagctactaaggaggctgaggcaggagaatcgcttgaacctgggagggggaggttgtagtgagccgagattgcaccactgcactccagcctggggtgacagagtgagactctgtctcaaaaagaaaaaaaaaaaagtttcatattaaacagtatcaacctctttttttttcagaaaacctccaaattgaaatgagcttctatgaataaaacagaaaaagaaacccaacaattattccctgaagtctatcagtttcctaacacattagctctttagaatgtattgtttatttatttatttatttatttttttgaggcagggtctcatctcactctgttgcccaggctggagtacagtgatgcaatcacagctcactgcagccttgacctcctgcactcaagtgatcctctcacctcagcctcccaagtaactgggactacaggcatgcaccaccacagccagccaagaatgtaggatttttttttttttttttttttttgagatgcagtcttgctctgtcacacaggctagagtgcactggcgcgatctgggcttgctgctagctccacctctcaggttcatgccattctcctgcctcagcctcccaagtatctgggactacaggcacccgccaccacgcccggctaatttttttgtattttttagtagagatggggtttcaccatgttagccaggatggtctcgatctcctgacctcgtgatccatccacctcggcctcccaaagtgctgggattacaggtgtgagccactgcgtccagccccaagaatgtataattttttaatagggatagtatagagtgattggggacagatactgggggaaactgtgaaaccaactataattaccctccatgcagggctggctttttatggatctgtgagttcccagaagtcatatgcaaaattctgtttaatcctcatacgtatatggggaggtatttctttctttttttttttttttttgtgacagagtctcattctgtcacccagtatggaatatagtggtgtgatcttggttcactgcaacctccacctcctgggctcaagtgattctcctgcctcagccttcagagtagctggaactacaggtgtgcaccaccacacctggctaatttttttgtatttttagtagagatggggtttcaccatgttggccaggctggtgtcgagctccttacctcaggtgatccgcccacctcggcctcccaaagtgctgtgattagaggcgtgagccaccacacccggcaggatccatagtttcaatctgactcatggacctgaaaaagttaagatccactgctgcttcttatttctctttaaaaatggctacgaggaattaggggtaacatggagtgggaaataaggggcaggagacaccaaagctcttccagtattaattagcctctttccgtccaaggctccatgtatccctccacctcccttcatcctttccacctcactaaaccatggacagcactctaaagtttagactgtttcaacaatatagctgaacaaaaactaattcctggaatatgaacatgaagcagtatcaagcaacatcaggaaaagatagaatgtctttaaatcttttttcttttttttttcttttttgaaaacatatttattttctccctatccatgtgtttgcttttaacttctatctctgcaattttctcttcttttcttttcttttgagactccgtctcactttgtcaccaggctggagcccagtggtgtggtctcagctcactgcagcttccacctcccgggttcaagcgattctcctgcctgagcctcctgagtagccaggattacaggcgagtgtcaccacacccggctaatttttgtatttttaatagcaacggggtttcaccatgttggtcaggctggtctcaaactcctgacctcaagtgatcctcggtcctcggcctcccaaaatgctgggattacaggcgtgagtcactgtgtctggcctgatttttgcaattttcaaaaagagtttggagcaggataaaaacacataattcaatgacaaatctcgagcatttttctgatgatgggggcatagtttaaatgttttctttgaatggagaatgtattttctttataagcacttaaactgtatccttataagctcaggctccaagaataacttaaatattgtgttacctatttgaactggcaagagagtgaataataattacatgcaaaattggtagagagagattcaatgattactaaatttaatcacatttttctgatgaggacaggctgaggtagcttcagtgagttgcccagtgtcccccaggcgagtctcaggaccagagtccagctctgggtttgtctgactccagagtccatattctctctcctgcattcctcgcctctgcagagctcttctgcaacctccagacatgaagccccccatcctcctgctctgcacccttggtatacggggacgcagttcacctactcctagaatggagcaagcgctgacttttggcgtattccaaaggactcctcctctagagtggctttttttttttttttttttttgagaatgggtctctgtcacccagtctggagtacagtgacacgatcaaggctgtctgtagcctcgaactcctgagctcaggtgatcctcctacctcagcctctcaagtaggtggaactacaagtgcatgccaccatgcccagctaattgttttgtgtaatttttgtagagacagggtttcaccatgttgctcaggctggtcttgaactgagctcaagggatctgcccgccttggcctcccaaagtgttgggattataggcgtgagccaccacgcctggtctttcttgagttctaactcctgtttaaccaacactgatatctggtcagaggcccaattaattagaaaccccctgacatggccgggtgcggtggctcacgcctgtaatctcagcactttgggaggctgaggcaggcagatcacgaggtcaggagatctaggccatcctggctaactgggtgaaaccccatctctactaaaaatacaaaaaatcagtagggcgtggtggtgggcgcctgtagtcccaggtactcgagaggctgaggcaggagaatggcgtgaacccgggaggcggagcttgtagtgagcagaggtcatgccagtgaactccagcctgggcgacagagcgagacttcgtctcaaaaaaaaaaaaaaaaaaagaaacccactgacattaaacttatacagaaaagaggaaaattataagaaaaccagtttaacagggatatttatttatttatttatttatttttgagacagggtctcactctgccacccaggctggagtgcagtgatgacatctgagctcactgcagcctctgtctctcgcgttcaagtgattctcctgcctcagcctcctgggtagctgggactacaggtgtgcaccaccatgcctggataatttgtgtatttttagtagagatggggtttcactgtgttagccaggatggtctcgagctcctgacctcgtgatctgcctgcctcggcctcccaaagtgctgggattacaggcatgagccacttcgcctagcccatttatttatttttgagacagggtcttgctctgtcttccaggctggagtgctgtggtgtgatctcagctcactgcagctttgatctaccgggctcaagtgatcctctcaccttagcctcccaagtagctggggccacaggcatgcccaccacgcccagctaattttctattttttgtagagatgaggtttcactatgttgcccaggctggtctcaaactcctggccttaagagatcctctgccttgtcctcccaaagtgctgggattaatgcatgatccaccatgctttgcaataagaatatttaaataaatgtgaaaatatccaggtggtatccattcctctcattctctgacatctagtctctagtcatggatcatcactgaactcaaaaaagagaaggcactggaaaccctggagtcagaaaaaagcaaaacaaaaacaaatttctgttctctccaagctgcactcattaagacagaaatgaggattcatattttagaaagttttctaacaaggttgagccttgattaactggagaactccatgagtcagaacaaacttgttgggacctagcatgagctttacctgtagttggagctcagtgaattcccctaagattacggttgagattgcaccacagaaagatctcagccactcacaggtgttcatcctcccggggtcctgtctgccccagcatttcttttctgcttttcttcccctttcttgcatgaagagacatctaggctgtcaggaaatgtgatgactcatctgacatcagatcgaatcttttttattcgcccttcatgtctgcctcagtctctgatcctggtaataaccgtgtgaagtcccggggatgttttgatttctgagaagacacacacggattgcagtgggcttctgatgatgtcaaggttggatgcatgtggctgactgatagctctttgttttccacaatcctttgcctaggaaaaaggaatccaagtgtgttttaaccatgctgaccagcaaggggcagggattccttcatgggggcttgtgtctctggctgtgtgtgttcacacctttctttaaaggtaggtttcatttctgctttatcttctattccctttttagctacatgtgtttactctcttttctagttgtgcttgagaagatatattaataaaagtttctatggtctgcataggagccaccactgttacaactgctaattaatctatttggtttttatttgttaggtgtaatacaaaagatgaaatctgaggggtagggtggggaggagaggaccaggaaacatagtgcaaacccaattaaaatataataaggagaatgatacagttttctattcatctcccctgtggctgtattgagcttatttatttgtagttatgtttaatattttttcaaagtggtaatttatttgttagctgatactattactcagtcaatgaacccttccattttgtaggtaatcatgtttgtttggggaaacatcacgtgattatgctgaaactatcccatgagtaagatcattcattttaaaagttacaacttagaaacggaccactgctgttctgctgaacaaaatcacatttctatgctgttaggtttgcaggggacttgcttttcaaggctgatggagggtttatctgctataaaatgtcttaaagaggaagaaaatgggtaatgaggaggattatttattgtctgtcatggagaaatatgttcatcatgattaattatgatggcaagaatgatgttttaccttaaatttgtccttcctgctaaaactctagtgtctcagtgtttcctaaggtattcgtcaggcaactctttccatttagtaatttaacagagatctttccatttatgttgcctgatgagcttttcaatccctttccattttttttctttcaatgtgtaaatccctttgagaaatttgtggagtcctatgttagatatcaaatttaaattctgtgaggaaattgtagagg

SEQ ID NO: 11944 - DNA, 6000 bp, Homo sapiens
ggccactactatactgatagcaaagctatacaaagatatcacaaaaagaggcaactacagatcaatattcttcttgagcctaaacacagaaatctttgacaaaatattagcaacctgaatccagtaacatatgaaaaggttggtttaatattagaatatctattaatataaaataatgtaagtgagaaaaaaacatgtgatcatcttaatagttgtagagacagtatcagacaaaattaaacacccactcttgataaaaacaaattataaaatattttcctcaacctgataatagacatctatgaaaatcctactttaatgtcatatttaatgttgaaagatattgctttccccctaagattgggaaaaaggtaaggatatccactctctcctcttctattcaacaatgtcctagagcttctaatcagtgactgaggtgggaaaaaaaattaaaggcatacaattgcaaaaggaagaagcaaactgtctttattagcattgtcttatatgtttaagattctaaaaagtctcttaaaaatctactagaattaataagcaaagttagtaatactgtagaaaacaagatcacttggaaaattcaattgtatttctgtaaacagcaaatcatctgatggtaaaattaagaaaatcatttcatttaaaatagcttaaaattaataaaatccttaggaatacatttaaccaaaaatatgcatgaactgtacatagaaaactacaaagcactgctgagagaatcaagacagatatatataaactgaaaatataccatgtttatggatcagaagactcaatattttaaacatggcccttcccaccaaatcaatctatagactaaatgcaacaggcatacccagaaacaatgcttcatcagccatcaaggcatccttccatctagtcaagttgacacctaatattaaccatcatactacccatctgacaagagattaataacctgaatatataagtcaagaccatgtggtattggcttaaatatagagatattaatcaatggaagaagataggggtctagaaacaaactcttacatttgtagtcaattgatttttgacaatggtttgaaggcagttctatgagggatgtatagtttttttaacaactagtaacagttgtatatccatatgcaataaaaatgaacttagacctctaccccacaacccgaacaaaaaattaactcaaaattgatctagttaagagctgacacttctagaagaaaatactgaagagaagctttttaattttgaattggcaaaagtttctatggcacccaaaacacaatataggaaattaacaaattagacttttatcaaaattaaaagttttgcttttcaaaaggcactattaagaaaataaagagaaataacagcttctgaaaaaactttgcaaattatttatctgtttaaagagttatatttagaataaagaactcttacaatttaatagtaagaagacaacgcaatttaaaaagaggcaaaagaatttaataaatatttcatcaagaaaatatatgagtgaataataagacatgctaatatggacaatatcattagccattagggaaatactaattagagactcaatggtatataccattagaatgatcataataaaaaaagattgacaatactaagttttgtgaggctatggagtaagtagaatcctcatacactgctggaggccatataaaatggtacatccactttggaaggtaattaggcattttcatacaaagctaaacacatacttatcacattactcagcaaatccactactaggtatctctctaaacaagagaaataaaaatgtatgtccacagatttgtatgaaaatgttcagagcagcattatttataatagacccaaactggaaataattcaaatgtctaccaactgataaataggtaaagaaaacatggtatacccatacaatggaatactattgatcaataaaaaggaagaaactactgatatatagtacaatgtgggttaatctcaagtgtattatactaagcaaaagaagccagatactaaatattacatagtgtatgactccatgtatctgaaatttctagagaaggctaaactatagagatagaaagtgtgctccaaagacagattgaaggttgcttaggggtctgggttggggagggatttactgcatctgggtctaaggaaactttttggattgatggagatattctaaaactggattgtggagatagttgtatacttgtataaatttactacaagtcatcaaactgtgcactttccatgggtgcattttatgttttgtttcataaaagatgctattttccttagcatgtatattgggccccttttcattaataacatatctggattagtgactttaaaaataaatatttttataattaatttataaacaaaacatttttaaatttaaggaacaaaataattaaggagaattttggtaatttagatttttttcataaaatgttattgagcaatatgtgcatataactatattttccttgataatttaaataaaattatttattattattacttttcattttcttgaataaggtcctgtgtaatgtcaaattgtaatttgataataaaaattaccttcagaaaatttctaggaaggtttcttttctctaataagtatcattttaagagtataactgatataaaaagcttgcacattactgctattcatcaataaacttcaaatgaaataagatcttgattgtaaatagctagataccatcttgttcctgtttacattttgcattttaagaccaagatttgcaattaatcttgcaattagaggaagttgccctgcctgcctatgaaaaagatatttttgatgggtaggaaataatttaatgattaagaagaaacagtcatgggaattcctgagaggtcttaggaagacactgcctgaaaaatgcctaaaaggaacaagacccccataatattttttaaaaattaaactatcttttaatctatttgcttttataagcagaaagcaggaaaaaaatcatatctataatattaaccaactgtatttttcagtgttaaagacagagaagacaaattaaaaagaatacatgctttggagaatgtcagtggggtagagaagcaagaatgcagactccaggggatattacaaaggaggggtgctgttggcctggagccacccttctcccagaattcccctcaaccatccattgctggagttccctgcactggcccacgctgcccccccccccacccctgtcaccccctgtctctcggggccaacagggccatctgatgcttgctgccatgacatgcccactgccccagcttccaaaatgatcacttcgaacatcctctttattcagtttttgccttagtgaccctttccagctaagtgttgtgagaaaagcaatcgatcaaaataatcaatgataaaaaataaaaagtcttaatattcctatgaggcatttccattttaaaacattaaactggtatatggaaaatatcaggtaggcagcaatggctcaatgagagttattctttttacccaaccctgggattcttttctttattggtttctccaaatgcattacctccttcaactaaatcatagcaagttgtgcaactgattcttatcttgcataccctgaacacagatgctgatgagaaaagagtgcaaaggtgaagttgaacacctgtatcctccagcaagccatactcatggactcatgatgtggttaagttcaatattatccttccaaggaattccactccaggggtggaattgatggcaacctgccatatccattggaagatttagggggacctttcatggttcctcaatatcatcatgtccactctgcctagccctaagctcagcccaccacagcccctaggtcagagagtccacaaaccgttgctgagtgcacctatgccagttcctggatccacgggggtcttgagttaagtgctggagatgagcaggtgaatacgacaatccagggccttcaggaagcaccgtctgtcaaagcaaaagactgtcaaagctacattctgtcctgtgcaaggtataatcagccttagaaaggtttcttgcgttctagccttgtaaacctgaacttacggcaacagttcccttgtctgtaccagacagttcccttgtctgtacgtaaaagtagaaccagcctcttcgattgagacacttcgattgacacttaatgaagagcagtcctataaatataagtctctcaaatgaagctgggggcaaacaaacttgcaccagtcagcagtggcttacgtttaacctcacctttttattaaccacccttaaacaccaaagtgtgagggggatcactgttattatccacaggaaatgagacctgatattcacagggacttaatctagtccctcaaaccagtgctaggatgtagctattgtcccaaacgtttggaatgagaagttttgttaaaaacgttatttccaaatcaaagaggccgccagaagaaggtgcacgtggtgggaaacacaggtctgtaggattttagttagaaaaaactcctgaaaactaaaaatctttccaatatacccagtcattccctcttcctctctctttacaccccccaccctccacccaacacacacacacacacacacacacacacacacacacacacacacacactcacatgcaaggttggggggcagggcaaggggcctcttagtttattataacaaattctctgcaatccaccccgacctgacacgcttgactccgtcagtgcgctgctgcagctgcaggacagcgggacgggcgagtcactttgtccctgaaggggcgagtccaaggcagacgcggcgccgccgccctctttgcgaaggagctccgcgtttctacctcctctccgcgccccgcctgcttcctgcactacaaaagtagcgcgggcctgagaactccttccagaagttctccagggcttccgcagagcgactttttcgctgcctgtgagctgcagcgcgggagagctcgggctcgcgcggaccccagcgcctggcaggctgacagcgctctctcgccccaggtgcccgcgcgcgtggtgagcagctgcaccaggtggcgtccggggtggggtcaatgaagcgcagcctgaggaagatgtggcgccctggagaaaagaaggagccccagggcgttgtctatgaggatgtgccggacgacacggaggatttcaaggaatcgcttaaggtactctgggggctcgcgggtctggaggggttccgacgtgcgggcgggggtcggctggaggtttccttgggggcagcccttggtttggagaaagcgtgggggttgcaagctttggggtgtgtgcacaatccaagaggtgaccctactaatgacgcgcccacacagcgcctgctttatctattttgtttgcttgtttgtccaaccgaattcttgctcctggacgggcaactgcagtccagggaaacctactcaaaaagtatctgtatcatctggcacaagatcgggcagctgcctaaaatcaggacaatttggaatgtgtgccgtttcacttggacctttccgtagattttgtttagaaccaaatagccgaatgactgtatctggtagtcgttggataactatttaagagttctgggggttgagaagccttctggtctaacagagtgaaacagataaaccaattgtctgcacttagagcgttgcagaaaatgtccccaataaaacggaggcaggagtggcaaattccttctccaggggtaggagcttcaggaaacgctgtgggggaggtgaccttttgaagatgggtgagtgacctgaggctctaggatgggcacttctattacttatgcagttatcggacctaaaggcagcactagctactacctgatggcttagtctaagggatagaggctgttgggtgctcagagcccaccac

SEQ ID NO: 11945 - DNA, 6000 bp, Homo sapiens
aaaacttcctctaagtatcagttgctataattccacttcataagatcattagtcaatatcatcaagaaaaataaatatactcagaaatgttctttgaatatttattttttgaatgcaaagttaacgttttgctaatcctacaataattaaaagaacataaaatcaatgccatcagtttcttttgagactgatatggtctacatagtatatataaagaaaattgtatatgtttcatgtttattgttaatactcaacagtagtttaacaagtctttgttatgtatctactatattaagggcactgtgctggccacataaactgctaactattgtaataccttaattcactggatgttgtttctgatgtctggacctttcaacatctgcctggaatatctctcatctttcaaaacctgtcatgagcattagctcctccgcagagctttactccccattttacagtccattcacacaaaggcagacttggtcacctgctcttctctgcttaggtggcatggctcgcacactgccattatggaagctgtcttgagattgtctataaaccttccatctttccgtcccaaaaggtgagtgtgcacaggcagatgccatattttggtcatctctgtataccccacagcagctagctgagcacctgacacacactaagaagccaaatcttcactgctcaatagaattatatgctttaatatacagagtattttaaatttgagtgcttcagaaaacacaatttgttttattcaattgattggcaaatatttgttgagaatttaacttacagcagggaatttttgtctgtcatcttattccttggcttgtgtaatctagcctgttattccagcttccattttgtagatgagcacctaaaccttgttcgcaggtaaccagacattgctagtaacttttttctctaaagtcttataattttttttaaaaaagctcataatttactcacctgttttcctgccttattaagtatattcagcgtagttaatttttcagaacttggtcagtgttcaggtttgttaccaggttattatcttctcctaaaaatacacagccctgaacctgagatgggggaaaacttctgggagtttcccttcaattactgttttaggttatctactgtaaaccagctattccctttatactcggtggttgctcttctcttattgaaataatattcagactacttgaacttaattcagaaagatcttggaaaattgcctaaatgtttctttctagtagacataggggaaaatataaccttagttggttttataaccttaatttgtttccaataatttgccaaaaacaaacaagtcttcaacccttgaccccgtccagaagcagaggagactgtgatttgagaattaccagaagaaagtcctcctcgttcaaaattgcccccagtgggaatgtctgaaattccatcattaaagattccctcaaagaaagatagcatttcccaaacctgactcctattaagtgaaaactttattacagatcctatttgaataattcataagaataatacttaaatatgttccaacctgaaactagatataatcttcatttgcttataatttttatagaaccataaagctaaaacttgtttgaaaatttaacataaaacttaaaaatcaataagattaaaacaatgctgtctgtaagatggctaatgctctgctgaaaataaaattactagtcacaacaagaatatggaactgtttgctaatgatgataatctttttgttttagcatagctttattaccatctgatttgtattttacgtgttatattcctatgtgccatctgtataccatctacggtatctaagacaccatttgttttaaaacataccattattttatgcatgcttctctcagcctatcccaacttcagcctgcaatggctactaataaaaaacaatgaggctacaacatttgcattcttccagggagattttttccacttctcttacacactgcatctaccacagagaatctcttcactgttaatctagaactaagagatggtctataccatcttcttcctgttatttattcaacaaacattcatggagtacctagaatatgtcaagcactgagctgggcacaggaatctgaaggtggccaaagcatagtctctgcctgcaggagcttatgctctaatagagaaaatagacctggacatggctgtaaaatgagaagtgacaaagtagagatctctgtatggcacagatacaattgcaacaaaaagacaggattataggtatagctgtccatggtagaagagaggaacggtaggagaaggaaacaccaagcttaagctagatagacaagaagtggaacagcgttgcaggcaggggaacagtacacatgagcaaagacatgggtacaggcaagaaaaagcagagaagttcaagctattttaaattactgattatggcaagagccaaaagagaggtcggggttacagattaaactagagttaggcaaaggtcaatgatataaggccgggaatgtcctggtaaggagtttatacatttatgctgtagagaaggaggagtggctgaggggcttcagttagacaaacagtccgttatattgaagaaaaattgtttttattcccattgtcatacactacctcagcaatatggcaacttggtacaaaaaaattaaattgttattggtgaaattctagtaagccatttcacccagaataagcaaccctccttcttcccttatcttcttgctgattagaagagctcctctgtggaagaccacaaatcacagaatttaaaaccagaagaaaacaaacattgttttttcccaacctagttatttccaggttaaggcaagagatttactttagtccacagagctactaaagtgaaaaagaatgatccaaaattcatgtccttcattccagaattctttctagttgtccattttccaaactttgagacctctgatctagacaaaataaaagtagtcatttataattttaatgcccatgttaatgccactctattgtcaaaaatcaggttgttggaggtattttaaatcattttaaaggtgcttgaattatttaataatatctccatcccatttattctgacctgtgacaaatctaaagggttaaattgtcaaaacagactagccagaatcacagatcttacatagcaccaaactttattaatgattcgttggctacaagccgccatcaggaataaacaaaacattcattttgggaaaaaccccaaactgtcagacacagcatccaaacaaaacagaccatttttctcctgcagttggcatattttggttttgcatttacaagtaatttttgagcattgtctgcaaaaacatttctcacaaaaagaaggcagtttggtttggggacatcttcgttccacattctcttacagagcttacatagcacctctctctccattctccagccagcctgctaaattccaggcttatttacaataagcaatctagacagaccagaaatgtcctgctaaaaaagtttcataaatagggactccctggtatctttccactgataaatactatgagatttatacgaaagtctggtgaggtcattttttcctctgcaggtcttaggaagggaaaaaattagtcacaggctggctgttaacaccttcccttcctttggcttagcttctatgcttatacccaaagttcaaaatgtaatcaattacaggattacaggattatctgaaaagttcctaaaatggccctatacatatttgataatctattcagaattatttctgaagcaataatggaaccaaaacaccccccaccattttttaacaaaaataaatagctttgtgtttccaggccatataagtcaaatcatgtattcaattacgttatttattaggtaagtttatttttgataaaatggttgaatctaaaattaaaacttctaatttattttaaaaatccataagggaactgcgattttggtaatatgaaatctaaattaaaatgctttcttcataaatacttaaaggcttttttctgtattaactgtaataaacgtatcttaaaatacataactagtatctcaaggaaatttccagattgcaaaaatacagagggcaagaagtatttgatgggttgacttaggctgccctgggtgtgggtgtgtaccttgttgcataaaggctttggttttaatttgaaactgcagaagataagtgctctcattaaaaacaaaaacaaaaacagaacccctttaaaaaaaatcatgcgtctttggtgcactaaaaaatctcatccaacagcatagaacatcaactttgtctgggctccgggcaaaggggaaaaaaaagttctctttaacaaatcttagtcttgtatctttgcctcacacaggtttggggtcaaaagtgacacacacacacacagaggcagagtagaataagcagatttttttttgtttagccatgtggaaatcaaccaccagaagaacagaaaaagaaagcttaaaaatagtggcctaacattgcaggaccagagaaggggattttgaggagtgaatgagttgcttcatatcataagccctcatggattttttttaatcatttccatattactttgcataaagttagacagataaagataagtaggtgggtaattagaaggaaaaaaaaagaaagaaaacaatgtgttgtgtgatcacatttaaaccattcaaatcaactatgaagctgtgtttaatcctctacttctaaattattcacaagatcattttgactccctaaagttcataaacagagtgcaaatcacccaagcagaagtattttgctgcttttaagccaaagccctgactagctaaggagttgcctgtaggaattaaccagaacaaaatcctgattaaacagctaattggcttgtctactaaagaaaaggaaaacaaagtacatttctctaccttaaggcacagtcataaatacagagggttttcagaaccacctcagagaagatgtttaaatcgctgacaaaagtcaacaaggtgaagcctataggagagaacaatgagaatgaacaaagttctcgtcggaatgaagaaggctctcacccaagtaatcagtctcagcaaaccacagcacaggtatgtcctctacattcctatgcaagccttgattttcatcatttcttatctggtaatagcatttaatcactgctacgatatatgattgtttagtagttttacctggcaccatctggtacatgtactgtgtcgggcttatcttcattaatttatatattctgtatgtatttgttcataaaaagaataataaatgtttaggagactatactaggatttggaaaagccaagtaagacttctcattgctgattttcacttctaccatcatccaaaatgaaaccatttctcaaatattaaattggttacttgattgagtttcaacaaagaacatcaagtatcctggtcttcataaaccacatgttaacaataaatctctagagcaataggaaacctattggctctcaattgagagcgattttaccactcaagggacatttggcaaatctggggacactttcagttgtcatagctccggggtggggatgttactggcatccagtgggtaaagtctgcagatgctgctcaacatcctatcatgtacaggacagccctccacaacgtagaattatacactacaaaattttaatactgccaaggtggaggaactttaaacaagccttttcacaagttctaaatatatttttctgcaaaatgtatatgataatttctgctttgttatgagaactagagacagtaatatataaagcacatggtaggtactttacaagtggctattattattattaataagaatttgtgtttctgtgacaggtttaagtcctaagtgatcattacaagagcaatatttacttagaactatccacaga

SEQ ID NO: 11946 - DNA, 6000 bp, Homo sapiens
catgtctgttagcagaacaaaggctctgagaagtcttgcacttgcccccgtttaacccaatgtttctcaaactgtgtaaccacacaacacacttgttcacatcctgaagaggaggctgggaacccctggatgagcatggctgcctgtcttgggagtgcttttctccggaatctgacactgctggaggtctaaagttatcagctgtgccatcaactgtgcaaatgtcactggccttgagaaatcagctaagagcagagtgaggaatatctactttgggcagggaggccactgaggaagaggagactcatcacagactctctctgtgatttggggccactggactccttggtgccttaccttccttgaaaggacataggtcagtgttaagtccaggaatggccttatgtgtacccctgtgttcaagattctctggctgtactagatcccagccaaagacagtgctgagatcaatgagcgatgtctgccccgggcagaggtggagggaagggcaggctgtacgccaggatcagtgagcccacccatggccccactcccctctttagccttccccatctgtaaaatgggtatgatgagtgtgcacccctgcctattttcaaagatgtgggcattaatgtgacaaagcgttgaacataccaaggaatcaggatgtcgtggagcagcagacagcccaccctggcccagacacactgcggtgatgtggaagaagtactggcctgggaattgggtcctcccttactcactgtgggaccaggataaactgctgggcctctctgggtaagaacaggggctgcaggcacacccactgtgtgtaaagaatgaagcaaacaagtaggcagcaagcagatagagttataaaaccatgatgttctttattagctaataaggtacatctgtttttacagaaactgaggtccaagggaggcccatgttggggctgctggagggcgcagacaggctgtaaacacagcgcatgggcaccaggagcaccggacaggcttgggaccaactgactgtggcttaagcccacaagagaatgcacttgctcaccccagttgggtggctcgcgtgtgcgccacgtgcctgcattggggttctcaaagagtcgggaaggacccgcctccctcctcaggtcacctatctgctgacagccctacccagaggagggctctgattggttgaggtgggccttcacacgtccaaatccagccaatcaccgtggctctggggaattctggactctgattggccacacctcagttccacacgcttctcgaggtggggctagagttgggacacccagacccacccgggctgccagggaggcaggcacgcagaggcgctgcccccagccagactctctgggctgctgtgtggcacacaccatccgggatggatgctggggatgtagggaggatgcttgattgagccccaggctttgctcccaggagctcccattccacccgcaggtccagcgccttggaaagtggcacatgtggggtgtggacgggcggacgaggaaccctctgcttccacggctcagacactgcctgggaggtcctgagtccacgggtctattcccacgggtggaagagaggaagaaccagggtctgggggctggtaggtggccactcaaggcactctaagcttggggccagaaagcagcgggggtccttaagccacggagaggcttccagggctggctccacatcggaatcactgtgggatcctgggcacgtgatcctgtcttgctggaagttttcccatctgtaaaacaaggggtttggagtaattcatctcagaggtccttccagtactcatacagcggttgcgctttcctgaaaggctgtatgcaaatggagttccgtaaaccaaatcgaagtggctctgcagagcgcggcgtctgccggcgcgcccctcccccgcccgcgctgccgcggggacagcctggacttccccgcagcgaggccggctgcgcggccgccgcgtgggtcggagtccagtgccccctggtggcgccgaggcgggcaggcggcttccggaccgcgcggaggcccgacggctgtgactcaggggtggcgccgctgccagggcggcgggaggcctgactggggttccgtcgtgggctgagccacggcgcaattaattaccagctgctgggaatccttgtcgcccgctcgcggtgactcacccggcagccaggctcacttgccgagcgcgggggccttggtttccaaaatgaatctggggagagtgcctgctcggggtagggctccccgctccctcgccccagggcgcccgcagacccagcgaggacctgacggctcagacgtagcccacagcgcgggctccccttccctggtgggcacccgtgatccctgaaagtggggtgcagagcgtcccagctgggaggcctcggtgaatcactggggtcccagaccctctgggcccggggtccctgaggccagggagcccgagcaccgctccagggggcgacccacagaagggactggtctcctggagcccgcgagctgcccgagggttaggtctgattccccagccaccccttggccagctgctagcctgccgccaggcaactctttcccatctccatcccttccttggctggggtcaggagaggaagaggagcccaggggtctctgaggcttgggtctgtccttttggagctccagggctccaggcgggattcaggaagccgaaggtcaaggaaaagcccctcgatagcctaaagggagagggcggggagggggaggaggtaaaggaggccaaaatgggaaggagataaagcctggagagggctcatctggaagcagggaataggtgcgccccagcccgagcctcgtgttcctaccccaggtggtctcgagggggctatcgcgtggctcagggctgcatccacggcgcaccttgcgcccagctgtggggaaccaaagagtgattatatatatcaaagagtgattatatatatatatatatatatatatatgtgtgtgtgtgtgtgtgtgtgtgtgtgtgtgtgtgtgtgtgtgtattttttttttttccttcagtaaagcaacagagaggttactgggtcgggggattgcgatgtctttccccgctgtcctgactccaaaagtggcggcccatgctgtccttagcgctctccagggaaacgactcgggtctgcaggtgctggcccaagcgggctgtgccgctgggaggcgagggggccgaggcagccctcgggaccccaccactccacgaggccatgtccctggccaatgacacgctcccgcgccgggtggctaggtggggggtggggggtggggaagacttcgtgaaccgctgctgccgctctcctgtgtgcccatggccccctccccttctgctccccactctctgcccaatctgcctgaagctgtcagcctgccatctctggctgaatcccgttttcctcctccaaccccgagtccctcaaactctccacccgccagggctgcttgcgctcttggggagcggggctagaaggacccaagaagccgcgtttatcctcccatcccccgccaaaacccgccggcggctccgcccccgccccctccctggcggctcaggccgcccctcccgggctccctccgcgtgcgccctgcgccgcgctgggtctgcagcgggagctgccacagcagcctcgccagctggctggggaccaggcgggaggtggcgcgccctggaggctgcgggagggagggagggagggaggcccggcctcggcgtagcccggcccccgctccccgaggccctcccgccggagcggggctgccaagcgcacacacacacacacacacacacgcacatacacacgcgcacacacacattcgggctcccaacggcgcgcacgcacgtagcgcccggggcagaccagcgcggcggccgcctcccgggacgcccggacgccggagggccccgacccccgcgcggctcatgcgcccgcgtccgccccgctgctccgcgaggcccgcgggacccctcccgccgccgccgccgcgcccgccgcccccggaggagcgggctggccgaccgccaccgcgccgtcccccggccgcccccgaagccgctccatcgcggtccctgccgtcctggggccgcgccccgctcccgcgccttgggggttgagccgagcaaacttcgcgcaccggccgacgcccggcggggaccccgctgcgcacccgcgcgcccgggtgggcgctgggcgcgcggacctttggggagcgggctgcccctcccgctgcacctgctcggccccctccccgcttgcaggggactccagagacaccgccacttcgcaaacttttcctccccaccaccgagagggggcgaggaggggtaaaaggggaagcaggttccgctgggcgcgcggacctgcaggctccttgctgggcaccgccacccgcgagctggacccacaggggtaccgggccccgcggccgccctccggccgctttctggctccggttcccgtccctgcgtttcccgcgggagcggggggcggggtgcggagggcagcaaggcccgcgcggtacccagcggggccgccctgcatggccctgcgcagtggggcgggctgcttcggccgggtctggcgcagggtgtcggggttcccggacgcctggccccggcgctcgagcagcctcctgtgcctgtccgccttctcggctgagcccgggcccgcgccgcccctgccccgccagccgcctcgcggtggcggtggctgtggcggccccagcggagggggccccccccagcctccccgccccccgcctccccgctgctgctgctgctgctgccgccgccgcttacaacttggaggcggcggcggcggcggcggaggaggaggcggcggcggccgccgggcgctgcagtgggacgcgcgcggctgtgagcctgcgggacatgccccccgcgccggctccttgctggcggccatgaagaggcagaacgtgcggactctgtccctcatcgtctgcaccttcacctacctgctggtgggcgccgccgtgttcgacgccctcgagtcggaccacgagatgcgcgaggaggagaaactcaaagccgaggagatccggatcaaggggaagtacaacatcagcagcgaggactaccggcagctggagctggtgatcctgcagtcggaaccgcaccgcgccggcgtccagtggaaattcgccggctccttctactttgcgatcacggtcatcaccaccataggtaagggctgggcgcgccgctgggctcccgcgccccgggaggagtccggggaggcggctgagcgcgccgcgccgggctgggtgcagggcgtcgagggttaaacgcagcctcccttgggggccttcccgcagcgccccctcctctctagggagccccccctccgcggcgcctccgagcctcacccttcggggaccccacccggtgctctccaccgcgctggtgtctgggccgggcgtgcgagccccgagcgagtgtgcctgagccgggagggcggaggcgccacttttgcgaagagagtggagcgctaagaataatcccatagcagacacccacccacccaccgccccggcgcgggctgggctgcgcggggctctgagccttacacttactacctctctgggagttggagagggctggcctggcacccatggctcctagagggactcaggtggcaggggagtgcgcctggggcgtgagaggcactgaccctccgtagcccctgggccccgctccaggcttctctgagctcagatttcatctctcttccccccgcccggctccttttttcccctgagttccagttctggagcttggacttcccaggcccctgggaggagagagtttgctctctggtgcttgcgttgggggtggcagcccctcaattgctctcagtagaggtggagagtgggggcagggcagaacctgcccactccctag

SEQ ID NO: 11947 - DNA, 6000 bp, Homo sapiens
aaaactatactaaacttccaagatttttctctgaacgaggccacagggggttaccttggctcagcgggtgacctgggctgggagcctgctcccttggggacagcatctccctgggcctctgcactcagatgctctgggtgtttccctggatggcagctctgagcactgtcattgtgccctggacacgaaagacgcttagcaaacatccctcaaaggaaggcattgagagtcccttcccagctctaaaattctgattctattgatttgacaggagaatgccatgggtattggtatcaggatttggactgagaaagccctttccacacttcccaagagtttagatagcagtgtgggtgggaaatgagaatgtgagaacgagtgcattatttggctgtagttctgaggtggtgaaggccagtcttttttttttttttttttttttttttttttgagatggagtttcactcttgttgcccaggctggagtgcaatggcacgatctctgctcaatgcaatcaccacctcccgggttcaagttattctcctgcctcagcctcctgagtagctgggattacaggtgccctccaccatgcccagctaatgtttttgtatttttagtagagacagggtttcaccatgttggccaagctggtctcaaactcctgacctcaggtgatccacctgcttcagcctcccaaagtgttgggattacaggtgtgagccactgcgctcagccaatgaaagccagtcttgataaggacattaagtgtgaatctagagcgagctaactggacaggactagagggacaggaagcaaaggatggatccttcctgcagcagctgacttcctccacggttttctcatcaccttcttgcttcaggtctttctggattacctgggactggtgttgtcaggtcctttcagaagaaagaccttcagataacagaatgttgtgaaatttccattaaaaaaattttttttaacagataaggatcttggtctgtcactcaggctgtggtacagtgtatgatcatagctcattgtagccttgacctcccatcccaggctcaagccatccatccttccacctctgcctgctcagtagtcaggactacaggaggccaccatcaccctcagctaattaaaaatgttttttttagagacagggtctcactatgttgctcagcctacacttgtactcctcgcctcacaggatagtctgaagttgtggctctaatattcatatgtatatgaataaacgtgagttttgcctgtatagcttttaaactcctttcttttctttctttttgttttgttttatttgagagggagtttcactctgtcgcccaggctagagtgaagtggggcaatctcagctcactgcaacctctacctcccaggttcaagcaattctcctgcctcagtctcctgagtagctggtactacaggcatgtgccaccatgctcggctaatttttgtatttttagtagagacggggtttcaccatgttggccaggctggtctcgaactccttatctcgggtgatccacccgcccgagcctcccaaagtgctaggattataggtgcaaggcaccgcacctggtctaaactcctttcttttcttttcttcttttatttaattaattaattaattaattaatttttgagacggagtctcactctgtcgccaggctggagtgcagtggcatgatcttggctcagtgcgaactccgcctcccaggttcaagtgattctcctccctcagcctcccgagtagctgggactacaggcgcacaccaccacgcccagctaatttttgtatttttagtagagacggggtttcaccatgttggccaggatggtctcgatctcttggccttgtgatctgcctgccttggcctcccaaagtgctgggattacaggcgtgagccactgcgcccagccaactcctttattttcatgtgttatttactgatgaacattttctataagccaggtaaattatgcactatggttacattatttgtttgtttttggagatggtgtctccctctgtcgtccaggctgtagcgcagtggcgcaatcacagctcacagcagccttgacctccctgggctcaagtgatcttcccacctcagcctctcaagtagctgggactacaggcacatgccacccatgcctggctaatttttgtattttttgtagagatggggttcaacatattgcctaggcttgtctcaaactcctgggctcaagcaatccactgcctcagtcttccaaactgctaggattacaggagtgagccatggcacccggcctggatacattatttgatttaatatccactacaatcctgagtagatattaagttagttctgtttcacagatgtggaaactgaggcagagagaggttaatgcttgcctaagaccacagagttggcaaagctgagacacaaattcagctctttggactcctaagctcactttatttcgcctactaggttatactaccttgcttatgacattgaccatatttggcctcattcagcagatatttgtccaagtcttacattatgagtctcttggggacatgtatcttacttatctcttattaacttcaaatacctttcacacagcggtcaaatctgatatttgccttttgattcaagcagcaacttggtattgtgtactgtggagtatcacagactttgtgggggactttttgtctctttttatttcaaaaaaaattttaaactcagtggaaaatttcaagaatagtgcaatgaacacacatatacgttccacctcgattaaccaattgttaacattttatcatatttgctttttctttttttctggatcatttgagggttagttgcagctacatgatatttcacttctaaatacttcagcatgcatctcctaaaatcaaggccatttctgcataaccaacgtacactatccttagaattttttttttttttttagacggagtcttgccctgtcacccaggctggagtgcaatggcacgatcttggctcactgcaacgtccacctccggggttcaagttgattctcctgcttcagcctccccagtagctgggattacaggcacccgccaccatgcccagctaattttctgtatttttactagagtcggagtttcaccatgttggccaggctggtctcgaactcctgacctcaagtgatccgcccccctcggcctcccaaagtgctaggattacaggcgtgagccaccgcgcccggggccccctcagaaaattttacattgttgccacactaatctactctccattcaaatttccccgattgtcccaataacgttcctcagtagctggttttgtttgtttggtttttattcagggtctaatttaggatcacacattgcttttagtgccatatcttttgcttcctttttttttttttttttttttttgagacggagtctcgctctgtcgcccaggctggagtgcagtggcgcgatctcggctcactgcaagctccgcctcccgggttcacgccattctcctgcctcagcctcccgagtagctgggactacaggcgcccgccaccacgcccggctaattttttgtatttttagtagaggcggggtttcactgtgttagccaggatggtctcgatctcctgacctcatgatccgcccgcctctgcctcccaaagtgctgggattacaggctgcttcctttaacctagagcagttcactagcctttttcctaatctttcatgaaactgacatttttgaagactgggcagttgtcttgcaggtctctcagtttggatttgcctgattgtttcgtcctgaagagaggcaaattacacacttttacaagaatattatctctgtgtccctctctgtgcctcacaccaggggcatatgtcagtccctaccatcccccgtttgatcagtctctttgatgtgaaggtacccttttctctttagtgagtaatctatgggggtgatactttgaaaccatatgaacatcctcaacggtccactgatcatttcagcctgaatcaattattatcatggtggttccaagacgatgattttctatttctgtcatctattctacctttattagttggtcttctcctctacagaagagctttttctcctccacatcctctgcccctttgaattatcatctctcactacttgtgggatcttgaatcaatcacttactccctggggacctgtgtattctcatccttaagacgagatgacctaagagtgacactcttgaagtctggtcagtctgaaatgaaattcccataagaggctgggcgtgggctcaggcctgtgatcccagcactctggtaggcgcaggcgggcggatcacttatgccgtggagttcgagaccagcctggaaacatagggagattcccgtctttaccaaaaaaaaaaaaaaaaaaaaattaaattagccgggcgtggtggcgcgcttctgtggaccctcctactcaggaggcttaggcaggaggacggcttgagcccaggaggtcgaggctccagtgagccaagatcgcgccactacactccggcctgcggcatgcctcaaacctggggtccggcaccctgcggccttttcgcggccgcacccatggcaacagttaactagcaacctcgcgcattctcgcgagaatgagtcccctcaagggcacaggtgcggtccccagcctcttgggcccccagtcaacctcactgtccacaccgagccctcctgcgcacgcgcgctgcggagccggacagttggtggtgctggcttggcccggctgttcgtctccgcgccttgctccgaagcgcgcgaccgtggcgcgacacgccggcgcacaggcgctctcggggaggggcggcgcgcaggcgcggctgggggtgcgaggctgcgcaggcgcggacggcgttggtttgaagaccttcagcgttgccctggcggagcagagacaggccctcggggtggaggtgaggagagctgaggccgcgcgggctccagtcccggagagcggtgggccgcggccgagcagagcgccaggcgggaggcgggcctaacggaggctctgtgggcagggagcaggctaccggggcgcggggggccggggccgctcgctcccgccgggacccgcccgggccacctcaggcgatggagccgcagcacggcggggcaagtggcctccgggcgcgggcagcgacctatcccgccggcgtgtggaccgcactttcctcccaggggtcagctagaaaggagatcggttctagggaagttggatcctcgaaccccacacccatctcccgcccgcccctgccccctccttacggccgagggagggtgccctgcgtgcaattcaaaacggagaagcgaggaacgaaaagggctctgtactggctgtcaagttagtggctttgtaaagcagtagcaaccggcttaacgcctttccccgtctgcgtctcctgcagcctctgtgcagtgtgcacatctatgggcaggtgcattctgtagagctggtggagacgtgtggttgtagctttactctcgaggaacatgaagtttctgttgttctcgatttttgcttgatcatactagcagtgcatttcccatcagagtcataggcctgaaaaagtcagcttgaactaggcagaattgaggtcagttagtatactaaaccagctacgtgacttttgcatagtatctcgtactggttttgaaaaataacaaaacaaaatgctgaaatattgtaaatagtccctagacgtatatatagtgcttctaaacatttaagtgtatcttttctcggcagtatgaaaaaccagactgtaaagctttaacatttctatttcaatatatactgcctgcatttctatacttacttcccaaattacagacttctggcaaaatttcaacaaatatcaacatcagttgtaatcataaagagtaatatcaaattgcaattgggataatat

SEQ ID NO: 11948 - DNA, 6000 bp, Homo sapiens
cgcgcgggccttctcggctacagctcttctgggtttgtgctgccctcctggcaagcggtacgtggaagggcagagctgttaaaccaacagcccattgccttccagtgcttagtttgtgatttactcgggctgttactacctttttatttaaaatttgaggagcaaataccgtctgaagcacacaccctttaaaggttaaaggcctgcagtgtgaggagtgagccaccagagggcacccgagccccacaactcaccctggtctaaggcccccgcaaggcccagcccagggaggccgtgcagcgcgtccaggagcctgcggcttctgaggtctgatcccaggaaagaattggacacttatttaaaagccgggtacggtagctcacgcctgtaatcccagcactttgggagggcgaggtggaaggatctcttgagctcaggagttcaagaccagcctgggcaacatggcaaggccctgtctctgcctaaaaaataaaagccatggttttcccatctctaccaatagtgagaggtgtggctattgaaaaaatgtcatttgtgtggatagagcccaggaagaaaaagggttggctgattggattaaagtgttatcctgcccagtggtggatgtaataagatttaaaccaaaacaattacctctagagtgaaattttaggcatcaagagatgagaggttatttaggagggcagtgagaatttcaaattcagatactttggatcctgaatccagaccttctgaatcctgtgaacgctgacagcatccctgctccctcccacaaaacctccctactggtagtgagaagaggatcggagtatttgaaatgctggctggcttagagccaggcaggctacagcaggaatgactgaggttagacataaggaaggccccgaggaagggagcactggtaaaccctgatgggtgactgaggaagggggagctcatggacctccagaaggcagggagtgtgttctctccatgataaactggcacactctggttagtgggattgcttattaagtatcatggtacagagacggtgagagcactgggctgtgggaggtgtggtcccagccccaatcccgcccccacctcactgtgacttcacctccccaggtgttggtgaggagcaggtaactcacaagtaagctttttatagaggaaagacagttcccttagacttgtttttttttgttttttgtttttgttttgttttgagacagagtttcgctcttgtcccccaggctggagtgcaaatggcgctatcttggctcactgcaacctccacctcccgggttcaagcgattctcctgccttagcttcccaagtagcgtagctgggattacaggcacgggttgccacgcccagctaagttttgtatttgtaatagagatagggtttcaccatgtcggccaggctggtctcaaactcctgacctcctgtgatctgcctgcctcggcctcccaaagtgctgggattataggcgtgagccaccgtgcacagccaggcttctttttttctcatctaaactccttgctttttaatcttttctcataagtcttcctttctagatcccgggtctctcgatgtccccacaataaacatatttaacttcctaactgtgttgtcctaaacaaaacagtgccctaagacggctccagacaggctggggtgctgctaggagtgccattcgtagggtgaccaagtgactgtcagtatcatgtagttgtattctttgcagttaaggcaattaattaaataaatacctcaatgtgattttgtttttctaactgtaaaaagatatagaaataaaataataaagcaaaaagacattttgtcccaattcacataaatgtggccaagaactaagccaatctatcttaccagcatgggcccagcaccccacacttctgaggtcgctgggtattgtgattctgtcctgcatggtagataagcgggtacggtttcacactggaagggaccttggcaattgggctggctctcttatttttgttatttgcaaatccactaagtgtatcttccatgccttcaagatgttaaatgtgttagatccacgcagcccaccactaaagaccctcttccaggcttgacatccgtttgttaatccacacccttgtttacagttgcttaattagttctgagtccccttacatgtactacagaaccaaccacaatgctcctttttgtccccttagaggtcatgaaataatttctcaaagtttctccttttctcatcattaataccaaaatgtccttttctttaaaaaatcttttgtctttcctgccttaataacctttttaatggtgttgttttatattctaaaaagtaaaagttataaaaagctcagttgaagggtgttgactcatacatcaactgggtgaccacaatgctatcatgcatgttagtgtgtgtgcttgtgtgtgtgcactggaaggaagtaaagcattgatggtgattggattagaatcatggactgtaagtggtcttgaaatgtagtattaggattacactgctttcatgattactaaatgccaatcagaacttacatcttcaattgaaagcacacctggccgggctcgcacagtggctcacacctgtaatcccagctctttgggaggatgaggcagttggatcactggaggttgggagttcgagactagcctggccaatatggtgaaaccctgtttctactaaaaatataaaaattacctgcacgtgctggtggacacctgtaatcccagctactcaggaggctgaggcaggagaattgcttgaacctgggaggtgaaggttgtagtgaggcgagattgcgccactgcactccagcctgggcaacagagcaagacagcctcttttcctgtgtctatttgatgtccgcttttccccccaaagtctaaactcaatggagagatgatttgaggtttctacagtgggatggtgaagagttgagtatctttgcagggagaaaggtggctgtaaagtgagacagaaaagaacttcccaaggcataggaaggggctggcaggtccttctggcagcaggaccgtgccctgctcagggttgcactcaaggggtgcagtcctcagcaggccagggttgtgtgggacccagggaggcagggtcctgttaccaaggcctccggtattggcagaatcctgggtcttggcagaatccttggcatcggagaaggcaaagagcaaccgagctgttggctccatgggaccgtgtgggtggggcatggaccccagctgtggtcaaggcagcctggaggatacaagactgtgccatattttggggaccacaaaaggcttccagattcagttgctcccctagggagaaggctgcagggcctgcaatgactgagattggatttccagccagttccatggaaggctagcttcattttattcaatttcttgaaaataaaggtgaaacttcctgcacacttggattggcggtggctgatttactcctgagaccattacaaattctcagcaggctgggagcacagttgagatggataggaggaaatcagtgcatggctccttccttcctccttgcattcccacaacgttctcaagcatttgcaggtgtcaggccctggacacagagagatacagaggagactccagagggctggagaccaagccctcctgcaggagctggtggtctaggaagggaggccaggcagggcagcgacattgtgatgtgaggggctctgagacaggggccctgaggaacagacagggctcaagagctcagggtcccggggtcctgggctagacctcttttccacacatgatgcctccttaccgagcaccctctgggtgtctcaaactcactaatggcacacagaggagggttaaattaagaaatttaaaaattggactaaatcactgccgctaagacagaattcctccatgccctggagtgggttcctccagcactcagttcccaaccagataggtcttggctcccacctggccctcttgtctgtctagccctgactttgtacttgccattcatttgatgtatcatgcatttatcaagggccctctgggtgtgcacagcactgaactagatgaaatctgatcaactgtgaagaagaaaggatggtgttattagtgtccaagtctcatacataaaacaccactaacctcccaccctactgtcccctgcagtgaccagaaggtgggcctggtggggtcaagggagccacagagaatgtgctgatattaacacatgtgggaaccagcagaatagggaggctccaggacatactcatgacttcaggtccaactggaaaagagaatagagaggctgggcgcagtggttcatgcctgtaatcccaccactttgggaggccaaggcgggcggatctcctgaggtcaggagttcaagaccaacctggccaacatggtgaaaccctgtctctacaaaaatacaaaaattagctgggcatgatggcaggtgcctataatcccagctactcaggaggctgaggtgggagaatggcttgaacctgggagacggaggttgcagtgagccgagattgcaccattgcactccagcctgggtgacagagtgagactccatatcaaaaaaaaaaaaaaaagaataaaaagaaaaagaaaagagaatagagaaataacggggatgagaaacttttcactatggatgtggtaaagtgtggttcttctgtacgcagatctccaactgtaagaaaaatagcacagaacattcagaagttgtctagtttcatcctttctccagtgccccgcatctcttgcaagggagtaaattaataagtcaggagttaggacccagagatatgttttagacttacacgatctgacagctgactgcaaatcaatgaagtgcactttgagaagcggcacactcggcgagaggggttgagattgttttattccactccaggtgttgctgtcctcttgggttccacttcggattttgaacccctgtattttcttttcaaaacccccttttccagtggaaatgctctgttgttaaaaaggaagaaactgtctttctgaaactgacatcacgatgctcccagattttatgctggttctcatcgtccttggcatcccttcctcaggtaagcacaagtcacagtaaattaaaactacagttgcagaattatttaagcagaggaggcaaaactatggtgttgataatgttagaattacaatatgtaatgcacaagatacatttaggataacctttaaaatgtggcccaaatgagtaattctgtgagatgtggggttttttttgctgaagaaatcatatctatgattttcataatgtttatgtttttgtcatttgctgcgtttctccttctgaatcactatgagcttggtaagaaaatacaaaagcaggaaaaacattattgaatgcactgagcattactcagagaattgttcaaatatttggcacagaaatttactatatcaacatttttctatcatatttaccaataatttctatatctgcatgtagatatttaattttgtccaatatgccctgtaggcctatatattttaataaatctgtgtatgtaggtagatttagcatgtttatatatcacaattaaacaccaatgtatcaaaactctatgtgttttatgtgactattatcaactgaaaatagaggaatttttgataaggataaaggacaaataaaaggaaaaagtgaaagatagagacagagatgcagagaaagaacaaaaagagaaaaagaaaggggaataaagtactgaaaggctttggggattggtcatttgcacctgccaatttcctgggtttgggaatcttttcactttttgtgtaacttgagaacagaaagttttcccccattgaatcagaaaccatctgaaaccgcagccagatggtgagaaaagtgtcagttcactagcaatttgtattaatttctcagtagtattt

SEQ ID NO: 11949 - DNA, 6000 bp, Homo sapiens
ttttactagcaggaacagaagtcagggtgggggaccctggcacctggtatgcagtttttgacccagaaaatgccatggtgatttcttccagtaaatatatcacatgtggaacattaccacttaataagaagtttccaacaacctcctgttattctccagcattccagctggctttttttgtatcagctctacaggtgagctatatggagatatagtaggattcccacccctgcatcttttatatttaccctacttgtttgccaagatgtgccttctttcctgaagacttaagtttccatatggtgtccttctccccagacagagcagccttcagtaatcttattgtgtagatatgctggtaatgaactctcttatagttttacttcatttgaaaatgtctttgttttgcctttcttgaaggataatttctctggatatggaattttcagtgagcagtcttagttctttacagccgtgcttccactgcttcctggcctctgttgcttatgtttagatgtaagcaatattatattattgttcccctgtatgtggtatattatttctctctggctactttcattatcttctctgactttaagcagcttgactctggcgtgtggttttctttgtatttgtcctgcctggggttcactgaatttcttgaatctataagtttgtgtctttcatcaaatttggctattttttttttttttttgagatggagtctcgctctgtcacccaggttggagtgcagtggcacaatcatggctcattgcaacctccaccacctgggttcaagtgattctcctgcctcagcctcctgtgtagttagggctacaggtgtgtgccaccacacctggctaatttttgtatttttacaaaattagtagagatggggtttcaccatgttggccaggctggtctcaaactcctggcctcaagtgatccatctgccttggcctcccaaagtgctgggattacaggtgtgaagcactgcacccaacctaaatttggctacttttggccattatttcttctttttgtctgattctctttccttctgggacaccttttgatattgccctacagctccccccaggctttattttcaatcttctttattcctctctgctcttcagattggataatttcaattgatatatctattatttcagcttctctgtttccccaccctgtcctttctggcctaactttgtcatatcatctcttctttcataaggactaaggggtttcagaggggtgtcagagctcagcgctagctgggattgagggccagagaggatggggggaaggccttctggaggcaaacatgtgatgtcatttttcaagtgagagtttggcccatgggggtaggtaggttatggcacatattcacaccaccggagacagacagactgagccacaggcaatgaagccctgatggagaagtgtgagctagagccgtcagaggcagcttcatgcaggaaggagcggcagaggatcctggggtctggtaggtccctactgtgtatcagactcttggctcggagctgtctgatctcggcggatccatacaacgccacctaagaacaattatgccatgtaacagataaagacacatgggtttgaaaaaacttatggaacccaaggtaaagcagcaagctaagtgaccatgaacatgtgacagggtcccatcagggaaatctatcttgatgggcaggattttagatgttggaagaccaggtacatccttcaaaatttctgtccaaaaaaacactgtccatgatccaggtttttattctgggtagtgttagtcccacagtttgaacctactgagtctcttgttccttctgccatattgggaagatcccatcctggctctgacattgtcactgaccagcttgggtgaccctgcagctgacttcacctattcaacatcattgccttcatttcgaatgtgaggaaatacagtcttgacttggattccctgcagcaaccacgcaatgaagttgcatcaagaatttcaaaagtgcttacacacataaggtctttaagggttgtttcctcatttctatccaggctccattcacagagtggtgcaaatttattcattcctttattaaataaatattttactttctaggtatgggggaatacagcagcgaacaaaacatttttaaaagtatgcatttgtggcatttacatctcactctacaattgcctctcttgattcaaagtctctgcttttgagcctcattcttggcagttgaaaactctgggctgaaatcccaactctgaagaaatcaagctaccctgctaactcagttttcttgtcagtggggttggaatcattatggttgtttagaggctagaattaggtgatgtatgtaagaggattcagcactgtgcctggcccatggcaggtatcattctttgaaaatccactcttcatgtcaatccatagtggacatagagaggtttctcccttgggcttggtacttttggagttctcttagtagtgaatctgcttttttctttttaaagcctttatgtggctctaagatggcattcgaatgttcctccatcccctctcagtggcatagtgcaagtgacattggttcttctttttctcttcccttccatcccagcacatcccaactccctccctactgaaatgttcctacccccctgccatcccctaacctcatgtgacttctgagaaagtggctctcctttgttctcctccctccaatatatggccacgcccctctaccctgcagaggaaattcccccagtaccaggtccctctgcattgcactgcactgcaccaagtcgaccctcccttcccccaacctctagacccctcctcacttgctctctctgttcttctcatccccttcccacaggttatgggcacgctgcacctggcaccgatgcgggcaaggccttctgcatgttctacgccgtgctgggcatcccgctgacactggtcatgttccagagcctgggcgagcgcatgaacaccttcgtgcgctacctgctgaagcgcattaagaagtgctgtggcatgcgcaacactgacgtgtctatggagaacatggtgactgtgggcttcttctcctgcatggggacgctgtgcatcggggcggccgccttctcccagtgtgaggagtggagcttcttccacgcctactactactgcttcatcacgttgactaccattgggttcggggactacgtggccctgcagaccaagggtgccctgcagaagaagccgctctacgtggcctttagctttatgtatatcctggtggggctgacggtcatcggggccttcctcaacctggtcgtcctcaggttcttgaccatgaacagtgaggatgagcggcgggatgctgaagagagggcatccctcgccggaaaccgcaacagcatggtcattcacatccctgaggagccgcggcccagccggcccaggtacaaggcggacgtcccggacctgcagtctgtgtgctcctgcacctgctaccgctcgcaggactatggcggccgctcggtggcaccgcagaactccttcagcgccaagcttgccccccactacttccactccatctcttacaagatcgaggagatctcaccaagcacattaaaaaacagcctcttcccatcgcctattagctccatctctcctgggttacacagctttaccgaccaccagaggctgatgaaacgccggaagtccgtttaggtgtggggagggaaatgggacagaaaagtcatttgtcatagttggtgttaatttccattggtccaactcgtcttttcttatttatttattattattattgtcatcattattactttctctccttcctcctttcttggtctcttggtctcattttcccccacctttccagccagacagagcaggccaaagggaaatacaggcccatcctcctctgaaactcacatctgagcatgaagcatggatctcctccttccttcccagcagactatgccttacatttctcaccccacccaccccatcatctctgcagtggttttcccgggacagatgtgagaccaagaccacggagacagagctgagaggatacccaccccaaagctgcacatcacgctcagccttcaatcgcctacccttagtggtgtctctgacctaactcctttctcttttcctaaggactgagtgactgtgtgtgtgttgtgtgtgtgcttctgtgtgcacgtgtgtcgtgacaaaacgggaagtattaggtattccgttttctttcccatcacacatcatagcctgcttttggctgcttccaaacaaaacgggaagacaaaacccacaaggtttttgatttatcgtattttgccaaatcaagcatgtttcattaagcagttcttatccctgatgtgtcatggccatattttctaaatgctaggttctaaattatattaatgttttttaggggcgggtgggcaagacgacccaaaccatcttagcttgccagttcagacattttttaaaaagcatgcactttgttaaactggtatgcgctatcaacaaaaaaactagaaatggaataatccaaagccaataacattaacttataaaagacatttttaattttgtcacctccagttccaacaatttaccatgcaactggaattgtcaggggaaacgggaaaattgttggaaccccagagtatctatttccctcttattgatgattttgtgcagcacctaccctgcataaataagaattatagtgttggaatgcttgggtgagaatgggtattagtatgtggctgtggttccttttcctcatgaaaattgacagggcattcctcattaaaaatacatatctatttcaagaaatatcgtctctaattgcatttgatttgtaaatagggtaaagttcacattggtctcaggaagagtttagaggcaaggagctatgtcttggcctactgggaacttgccaatctcaggggaaaattttgtctgagtagtgtagaaattcctccctactctcaataggggatgaccccaaagggaagacctgctatcctcttgggggaggtggtggggtagttcaggctgtagaatatggcacagtggaggctcttacagtaacaggcttaaaggacagtttgacctccagattcactgaggggactttaatttccctcattaccatccctgccattttctaaaaatcacccattcatccatcctcccattcctcttttgtaaatgaagttcatggctcttgcatggaaatggaccttggctatactcagaaggaacacggtttactggcctgtctcaaggccccaacgagatctcccagaaaggaggctttgctccctagaaagagtagacctacaggatttcttaaaggagacaacacctgaatgccaccagtcccaagcatttgggccaatgggctgaaacactggagcattcaagactcctctgaaaaggctgtgcatgtactttaatgctacatcccatgttgaaatttccccttcgtccaggacacagggccttcgaaggagtctgcgaacctcagattctctaggccaaagttgacagttctcaaccttcaaggtctttattgattcacttgttttaagattttgtttaatgggaggccctacttggggctctaaaatctgtccagagaatagcagcagttcaattttttttttcctcttggatgagattgttgactctagggggtcagaggtataaaagccctaatgcatttgcagaatgctttatgcttcagaagagtgtgcctggaataaatgtggggttctcatgaaaacctttgtaagaggtgccttcaaatggttggggggtgtgatctgatctatgacgacaccaaggcactgagagggtgatttgctcagtgtcacaggctggctgttgacagaactgagacaggtgtctcagtctggagcccaggagagtccaaggagctgact

SEQ ID NO: 11950 - DNA, 6000 bp, Homo sapiens
ccctcggagctttgaaaacattattgtataatatcccgtgctctagatgggaagcatgctggggttgattattattcctcactcgataggtccctctagggtttcagtttcccagtcagtaataagaagtatcgacgaaaagagtcaaactctgcaaaatatttgaggagatgtattctgagccaaatatgagtgatcatgacctgtgacacagccctcaggagatcctgaggacatgtgcctaaggtggtcagggcacagcctagttttatacattagggagacaggagacatcaatcaaatacatgtaaggtttacagtggttcttttttttttttttttttttttgagatgaagtctcgctctgtcacccaggctggagtgcagtggctccatctcggctcactgcaagctccgcctcccgggttcacgccattctcctgcctcagcctccgtagtagctgggactacaggcgcctgccagcatgcccagctaattttttgtatttttagtagagatggggtttcaccgtgttagccaggatggtctcaatctcctgacctcgtgatctgcccaccttggcctcccaaagtgctggaattacagtcgtgagccaccgcgcccggtctacaatggttctatctggaagggcaggacaactcaaagcaggggggttggagggggtttccaagtcataggtagattttaaaattttctgattagcaattggttgaaatagttattatcaatagaaaggagtgtctggttgacaatgaggggttgtggagatcaaggttttatcatgcagatgaagcctccaagtagcaggcttcagagagaagagattgcaaatgttccttatcagacttctgatcagtgttgatgttaattctggttggcttttcctgaattccaaaaaggaggagggtatagtgaggcatgtctgagccccacttccatcatggcctgaataggtttttcagattaattttgggctgccctggccaaaaggaggggaccattcagatggttgggaggccttagaattttagttttggtttataggagttatgattcatgcatgacctttgaagctctcccctgctctaaatttctatattttggataattttactggagctttcacagtttttaaaccacacaactcagtgtaactttgttcctttgggaaaattgaacctgctttatcagtacttcaggatgggatttgcaggaatacattgtgatgaaaatcaaggattctttgccttaaattattgatgggattgtggattcaaagggcaagccactattcctctcctttttattgagaatactattgactttaacacaccacttaactttaactcttagtttgctaggtaaatgatgtcaatctaaaataatcaaaagggtcagaatctagtttaagcagtttattcaagtgcaaagtttgaggacaaccctcccaggaaccacagattccaaagaatggaagtcagcgttccaaagttagaaatttgggatcacttttatagacaaagcttagggaagtttaacagaattttagcctctttctatataaggcttaatgcatagtcacaatgttctcattagtcaaggtggttcttttcttttggaaaaggtatatttaacattctacactgaagatggaactgtcatggggtccccgtttgggacaccatctggcctgagttaggtacaggataacaaaggaggcagttaatctatcacaatgatcagtgtttggaagagggaggtctggtctttcctagttaatgacagaacaaggacaatgagaaagagagttaagctataatctaagaaacagacgtgacaacaacatgccatataactcagatcacagccacatctctctcaaagcttaaagcgtttgggggtttccaacagcttttaagttttatttattttcacaatgattatactaatttcagaaaaatgtgtttagatatgaattcagtttcaaagtttgaaaaaatgccagtatgagccgggggggtggctcatgcctgtaattccagccacatggaaggctgaaacaggaggttcacttgagcccaggagttgaaagtttcagtgacctatgattgtgctgctgcactccagccaggagcggcagagtgagccctcatgtctaaagcaaaaacaaaacaaagttaaaggaaaaaaaaaaaggaaataccagcatgaaacaccttctacaggaagcttcttactgatcagacacagattcagaaaagattaagccttcacatgtgtacatgtagccaaggtgggagataataacagcttcaaacacagaaaagaacaagtatttatataacataataatcctaaggaagtaaccacaaatgatcactctaaggcaaagaaattttaattccaaatgtatagcaagaaaaatctatgtgcaaaatctgccaattaatccaagaagtggaagttgcaagaacgatttctctctgtatcacactgcagcaggatgagccgcagacaaaacctctcagacaccgagatgtagaagcaaaggctttattcagctgggagcatcggcaagctactgccttaaaatccaagctccccgagtgcacaatttctgtcccttttaaaggctcacaacactaaagatttcacgtgaaagggtcatgattgatttgagcaagcaaggggtacgtgacaggggctgcatgcactggtggtcagagagaaacagaacagggcagggagtttcacagcgttcttctatacaatgtctggaatctatgaataacatcggtttctaaattatgagttgatttttaactactgggtttaggccaggcaggcccaggcctagtttcaggcctggcgccaggctgcctgtctttggttttacttccttgttgttttttttttaaaacaggtactgagtataaaacaatgtgagaggatctctctcttccctcaacacgtgtgagtgtgggacacacgtgtgcaggcacacacacggggggccacagagagctgtccacattatgtgcagccttcagatttctgctcacacacccccgccactgctcctcctgaagccttcatagaacacatggcccccactgggctccctgtgttggaaagccagtggcatttccagtgtatgctgtatggtttagaatatcatttctattattaagtgaacctcattttcttagctataccagtatattctccatcatacccccaacaatatctaatagagcgtagtccacagtcaaggcttacttgatatttgttgattaattaaaccagataccaggaattttggatgaagttgtctaaaatggggacaaatgtgtactcttgctcagcccctccaaatatttctagctctgtgtgtgtaattttcagtattctccttagaaaaacattttcttacattaaaacaatctccaaaatactattatcatacttagcaaaattagtaattctacattcaagttccctgcctcaaaaatatcccaatttgatatttagcttgtctcaaataggatttgacccaagaccatttgttatgcctgttaaatcttttttttttttttttttgagacggagtcttgctctgtcgcccaggctggcacgatcttagctcactgcaagctttgcctcccgggttcatgctattctcccgcctcagcctcccgagtagctgggactacaggcacctaccaccacgcccagctaattttgtttttgtatttttagtagagatggggtttcactgtgttagccaggatggtctcgatctcctgaccttgtgatctgcccacctcagcctcccaaagtgctgggattacaggtgtgatcttaaatctattttaatctctttcttggcactgatttgttgaaaggaccagatccgttttccccaagtatatctccctatttggagtttgtctggttgcttgcttctggtggcatttaccttattcctttgtctcctgtattttcctgtaaactgaaagttacatctgtatccctaaacatatttcccctgggacagagtctcactctgtcaccaggctgcagtgcagtggcatgatctcggctcactgaaacctccacctcccaggttcaagcaattctcctgcctcagtctcttgagtagctgggattataggcttgtgccaccacgccaggctaatttttgtattttgagtagatatggggtttccccatattggccagctgatcttgaactcctggcctgaagcagtcctcccccctcagcctctcaaagagctgggattacaggcatgagctaccgcacccagctcaatctttttgttagggatgtgctatagatgataacatggtgttcatattataccatagtgaggagggaggctacttggctatctgatcattagagttaagattaatccctagattaaggtaatgcaagtctgatctctccactgtatccagtggtaaatcttgtggtctagcctgaggccacaacacacagcaaggttacaaaaactcttagctatgatcttggtccctttggagatggtgtatagccagccaacattggaacatagtaatttccagagagtaacattcttatgttggaatggacctttcggttgtgtcaaaattctttctctgaagcacctactgttatctacttaaattaattcatttaattaacacagtgattaccatatatgtttaacctgacatgtatttcttctttgtattaaaactttctgttcagtatgtcaatcaagtaccagtgaccataaaagtaacactatgtcactggctcatggacataatcttgggtttgggaaaactaggtgagagcagcaatccgtgcccagatgtggactgtcacccctccaggcagtgttgatggccatgggacagggcagcccggcctgctgtggaattagacatgctcgtctgaatgctcaaggacagtctcagctctgggcatcaagaggagagtcagccaggccagaagatcacagtgttcaaaaggaaacaatagaaggatgaaaactgtgacattaactcaggcaaacttaaagaaacagccctgtgaggaaagcgctattatcattcttgttttacagatgaaggttctcttcatctgcaaaattccatgaggtgggagtggggaaggattcaccctactttactcgggcacccccagtcattgtggcagccaaaacacccctttatacatttccaaacaccaatgggaaattgtatgagagtgtgtgtgcgtgtgtgtgtgtgtgtgtgtgtgtgtgtagaatgggtgcgatggcatctccagttgagaataactggtatctaaatgtattcaggatgctatataaaaataccatagattgggtggcttctaaactgcagaaatttattgctgacagttctggagactgggaagcccaaggaaaggtgctggcaggtctggtgtgtggtaagggttgcttcctggtttatagacagccctcctctccctgagtcctcacatggtggacggggtgagggaactctctggggtctcttttataacggcactaatcccattcacggagtctccaccctcatgacctaatcaccttccaaaggccccacctcctaacatcatcatattggagtttaggatttaaacttctgtgtttgagccaggcactgtggctcacgcttgtaatcccagcactttgggacaccgaggtaggtggatcacttgaggtcaggagttcaaggccagcctggcctacatggtgaaaccccacctctactaaaaaatttttaaaaattagccaggcatcgtggcaggtgcctgtagtcctagctactcaggaggctgaggcaggagaatcgcttgaacctgggaggcggaggttgcagtgagccgagatcgcaccactgcactccagcctgggcaacagagtgagactctgtctcca

SEQ ID NO: 11951 - DNA, 6000 bp, Homo sapiens
aatacaaaaattagccaagtgtggtggtgcgtgcctgtaatcccagctactcgggaggctgaggcaggagaatcctgggaggcggaggttgcagtgagccgaaattgtgccattgcactccagcctgggtaagacagcgagactccgtttcaaaaaaaaaaagtaaaacaaggagaaattggcaagagtcttatttatactgtgataaatatttatcaaggtggggccaaaaggtaaaatattggatctttttttttttttttttgagacggagttttgctttgctcttgttgcccaggctagagtgcaatggcgcgatctcggctcaccacaacctccaccgcccaggttcaagcaattctcccgcctcagcctcccaagtacctgggattacaggcatgcgccatcatgcctggctaattttttttgtatttttagtaaagacggggtttctccatgttggtcaggctggtctcgaactcctgacctcaggtgatccgcccacctcggcctcccaaagtgctaggattacaggcatgagccaccatgccgggccaaaatattggattctaattaaagagtagggtgaggaaaggcacagaggacagcctctgaggggagactgcactgcaagtatccctggaacagagaaggtatgcacaggatggatggcagcaggcaccacagggagagctgagcactgctgggtagaatccaggtgagaactggaatggccaaattggaattgtgctaagaattctggactttatcttgtgaggtattgatgtattgttacctcatttaaaccttataactaacctgagaggatgaagaaaataaaaagaggctgggcgttgtggctcacgcctgtaatcccagcactttgggaggctgaggccacgtggaatggcccaagcttcccctgacagccagctcgcagccctcagagtctcctccaagctgctggccatctgctctacctgggacacccttaccccatcaactctctattttcaaccccctccacaaacctagctaactcccattcgtattttccagaagccttccgtaacattcctccctccctcccccatagaattagaggttccatcatctctacttccaaaacacctcatctgctctacgactgtccatactgggtctatggttcaactcatattgtcctaactttagagccacatagagacattcaggaaaggactgttgaatgaatggagggagggagggagagagggagggagggagagagggagggagggagggagagagggagggagggagggagggaggaaggaaggaaggaaggaaggaaggaaggaaggaaggaaggaaggaaggaatccccttttttgctccaaagccctggctctctcgcctggcctgggggccttcctctccagcatggcacatccacaccacctgagctggcctcctggctctcctcccccatggcctgccatggtcatctggcctcctttcttggaagctctgccctcatcaaaaagcagagccagatacagatggtccagaaccagaggaaattcccagacctctctcgccactttactgctcagagggatggagagagttaatgagtcattctgcctggaaaggatgagggagagagccttggcccttgcagaggtcacccagcaccacctcccaaccaccccctcccaggagtcaatggcagcctctgacatcagccacagccataggctctatcctccgtctcccacaccacctccacccctttcagaatggccataattctccacaggaaggcagcagcagggccttgatcatcatctgcatggcctgtcccataataaccgccttccccctccccccacctcgctgaggcaggcctgcagacacacatgtgcaggagaggcacatgccccagcagatcagagggaggagccgggggagctggcaccccacctgcccagctcatccactgcacctcctctctgaaaggtagagggcctaggcacaggctggcgacgggggagaggccctgctgtcttccttggggactgagggctggaaacaatgccttcaggcaggtttcctgagtctaaagatatacctgcacccctagctgctttcccagttggtcactcaatagagaaggagcacaccaggcacagtggctcactttgggaggccgaggcaggaggatggcttgaccccaggagttcaagaccagcctgggtaacatagcaagaccccgtctctatttttaaaaattaaaaaaaaaaaaagttttaatagagaaggagcaagagtcccctgtgtctctgctggaggtgagtgctgagggtggggacagcttttaagggggaaagtggacccagcacctgccttggggagataattccacagaagagacaagcaaacacatacaaaccattcaacaaatcaggaccagaactaagcccctcaagtgatactgacagtaagggtgtggtgggaggagccagcattccagaagaccaggatggtctaggaaggtttcctggaggaggttttgaggaaggggccgggtacctctaggcagcctctgctcacaggattccccgactgcatcaccggggtggaaatcgggggccaggggggtgactcccctgttctatatgggctccaagtgccaggcctggctctgagcagatcctgtccctttcaccctgtctggtgttggggagacagcgagagtgcatggggccccggcactgctccccatttttagggctcccctctgcctctgtgaggtggtggcaggacacagaactccctcccacagggagcagggcctgggccaggggcagttccagtgtgagtttttccactcccaatattcttgcccagtgaatctggcttaaaagcagcctcaaggtcactgtaaagggaagagattccgtcagagtcagagcccagcacgtgctgcgcctgggtaagggtgagtgggaaatgcagaggcctcgtggggccttgctcagcctgacagggcccctaaagtgcaaagactagggtgaacaccccaacgccctgtcttttctttttttcctttttttttttttgcaacagagtctcgcgctctgtcatccaggctggaatgcaatggtgtgatctcagatcactgcaacctctacctcccaagttcaagcaattctgcctcagcctcctgagtagctgggattacaggtgcctgccactatgcctggctaatttttgtttttttgtttttgtttttgttttgagacggagtcttgctctgtcacccaggctggagtacagtggctttatcttggctcactgcaacctctgcctcccgggttcaagtgattatcctgcctcagtctcctgagtagctgggattataggcatacgctaccactcccggctaatttttgtattgtcagtagagacgaggtttcaccatgttggtcaggctggtctcaaactcctgaccttgtgatttgcccgcctcagcctcccaaagtgctgggattacaggcatgagccactgtgcccagcccatgccctgtcttttcaagctttctgcacataccaagacccccagcccagctcactcagacaaagctactggcgggaaagtgtgaggaagggtgtgggcgtggcccaggccctcctcttctctctgccgtatactgatagggctgccccgcccccccccgcccccccgcgactcagccacgagaggtcatccttgctccagcacagacccctaagaaccctcactcggaacaggactttgggaaaggtggtttctataaatagatgagtaaataaattgacagttgaatataccaagcgtcctggggaccgcaggaggaactgtgtacagatggcttgaaggccagaggcttgggttgttgtcctggccctgccactggccagctgtttgaccttgaacaagtcagttccactctgtggacttcagggtcctcacccagaagaagagcagccatatggtctctactgcctggtaaacaccctggctcactctcgcgagacggtggttctcaaagtgtagtgtgtagtccacacaacacctgcattgcaaccactgggtatttatttatttatttatttaatttatttatttatgacggagtctcactctgtcgcccaggatggagtgcagtggcacgatcttggcttactgcaacctctgcctcctgggttcaagtgattctcatgcctcagcctcccgagtagctgggactacaggtgcctgccacatcacccggctaattttttgtatttttagtagagatgaggtttcaccatgttggccatgctggtctcgaacgcctgacctcaagtgatctgcccacctcggcctcccaaagtgctggggttacaggcgtaagccaccgcgcctggccaagggaagtttttttcttttctttttttcttttttcttttcttttccttcttttttttttttttttttttttttttttttttttttaacacaggtttctgagcctcaattccagatcagctgagcctggagtttctgaagacaagggctagaaatctgcactttaaagtcttgaaaaccactgtgtgccttcatctaagctgcccctgcttctctcccctccatccctcgcctggccctgtcctccctactctcccctgcaccctcccccgccccaagctccccacaaacggccaaagcagcagtgtgaggcaatcgctctatccttgaccccttcctttgcacagtgagtgatggcgtttttatctcctgatgatgatgcacagccttcagcgggggacatttaagacgcagaacaccaggtccaggctgcagctgcgggactcagaggcgaagcttgaggggctcaggaaggacgaagaaccacccttgagagaagaggcagcagcagcggcggcagcagcagcggcagcgaccccaccactgccacatttgccaggaaacaatgctgctagcgacattcaagctgtgcgctgggagctcctacagacacatgcgcaacatgaagggtgagcgctgcgggaaggaggcgatgaggggttggccagctctcagcggatgaggctcaggccacccaattctgatcctagttgtgcctcttactgggtgaacctgggcaagtttcttcccttcttgaatctcagttttcccctcggaagaagtgggctggttactaagatatatcccttccagattctataatttctggtctcccctccaggactccaatctttttttctccttttctttcatttttattctttttctttcttccttccctccttcctttcctttctttcttcctttcttccttccccttttccttcattcgttctttttttcttccgccttttcttttttttttgtttgaataaaggtctctgtcacagaggctggagtacagtagaacaatcatagctcactgcagcctcaaactcatgggctcaagccatcctcccacctcagcctcttgagtacctgggactacaggcgtgcaccaccacaaccagctagttttatttatttatttttatttttattttttttagagacaatgtcttgctatattggtcacgctggtcttgaccccctgggctcaagggattctcccaccttggcctcccaaagtgctgggattacaggtgtgagccgccacacctggcttactttattttgagatggagtctcactctgttgcccagcctggagcgcagtggcacgatctcggctcactgcaacctccgcctcctgggtagctgggattacaggtgcatgccaccacgcctggctagtttttgtatttttagtagagacagggtttcgccacgtcgaccagactggtcttgaactcctgacctcaggtgatctgcctcccaaactgctgggattataggcatgagccatggcgctcagcctattttatttttgaggcagtctcgctctgt

SEQ ID NO: 11952 - DNA, 6000 bp, Homo sapiens
ttagtagagacagggtttcaccatgttggccaggatggtctcgatttcttgacctcgtgatctaccaccttggcctcccaaagtgctggggttacagacgtgagccactgcgcccagcttcaaactattatctgacttagaaagaggtgtctttgagctactagaatactgaggtttatttgttatgtcatctagagttactctaactaaacaatcacttctcagacaggcacagtggctcatacttgtaatcccagcattttgggaggccgagatgggcagatcacatgaggccaggagtttaagaccagcctggtcaacatagtgaaaaccagtctctactaaaaatacaaaaagtagcctgatgtgttggtgcacgcctgcaatcccagttactcaggaggctgaggcacgagaatcgcttgaacccagataccagaggttgcagttagctgagatcgcaccactgtactccagcctgggcaacagagtgaaaccctgtctcaaaaataaataaataataaataaataaataaataaataaataaataaataaatctatttctcttttctttctcttaggtgaggaaactgaggctcaacatggtaaattaaacttgacaaggatacacaactcacaaggtgtggagtcccactagtttcttggacagtttctaaagtctatgatctttccacagcacccagcttgtggcatgctaattgcttaagtgcccctagagtccagatgaagaaagttcagggcacaagactctgagagtacaaagcactccagaaataagccagttgcatttgtcattagctttcctgtccacattcccttttcttagtcaggttcagtccatctagaacttcaatttcaatggaaacagaggaaatgaatgtggtagcagacatcactaagcactctcaaagctttcttgttactttgaaatggtctaaaaagcccattctttctacccactgggtccccaccttccccgccaagtctgtgttctctgttcggttcattatcagcaccgcccacggccagacacggccaggcggcttcacagaagccaaagagcttatcagaaataagtactttatttgacagtgaggccagatgtgcagagagaggcatttcaaggccttcacttctcttctcataattagtcagcttctagcaatgatgagagtctgaagatatcgcaaaataatgaatgaccttctcaagcagctccaatgagggagcgttgtttcagcacccatcacaggattctagaatgtgagcattgagggagaccctcaaaatactggctaaccccccttgtagagatgaggataaatccacagagaaaagctatgtcgtctgtctggccactctctgtgtatccactgtgcacctgccatgtgtcaggcagtgacctaaaccctgggagggaataaatgcaaaaaagacacattccctcaccttgacgaaacagagcttcgtgagagacactgacccatttatctcaggcccatacatgtttattgcagggcctactaacacttgggtccccactgctcaccagaacaacagctattacagcagctacaatggtccaaacctatcctcatatacgtgtctatagttcccagaaatctgtaaagatttctgtaaaggtcttttgtgactccaggatttaacacagcatctcaggatgtgatgtttaagctaaattgagtcaaaaaaataactttttgttcattttggtccagcgtgattcattcattaattcatttgacaaggcacatttcctagccccaatgattaggacttactgttgagggatagagagataagtaatcacagtaagtcccaggacactatatgtggaagggaaagaaagaatgcaggtgacacaactaactctgtcaggagagtctcccccacagcaaggtacgaataaggaccatttgttctagtctccgtagcatcctagcctatttccacttcctcttgtcatcatctgtcctcttcaaagttcaaatggctcaagaggcagagattgtgtctctcttgtccattcctcagcattcagcaagtgttcaataaacatttgtggaatgaatatatcaggttagggacacaaaaacacattacaattccataatagaaatagaaagtgatgatatgcttacacataggaagaagtggctaactctgccagggggaaaaaaaaacaggaaaaatatcttacatacatttatacactcacacacatgcagctattacaatgataacaacaccattaagcaagacttatttgtggaaccctaactattcaacaggcataatcccaagagttaatgctcacaacagacttataaggaaactagtattattatccccatgttacagaggagatggaaacagaggcacagggaagggggggtggcctttctgaggtcacagagctagtaaaaacaagagttgcagtataaatccacatggcacccccatagactatgacctcaaatcaggatggcttcagggaagaaggaatgaaatcatttctacaaaaccaaaagcaatcggcacagagctagcaggccctgggaacatagcaggccccttcatgcctcattccaataacccatgaacctgaatgtgcaaacctgccccacaccaacaaaaatttggtgattctcaaccatctaaagagattttttaaaacaccaaagcccagatccctctctagatcaattaaatcttaatctctggagtacggtgggagtggggtggatattagtagattttgcaagcccctaggtgactatggtatacagccaggactaggaactcctagagtgacttgtttacaaggtacaaaacaggactctggcaggaggagcagccgagaaattgctgaggatcagcaagagtgcaagaaagaatgagttgactgtttgactactgtttccctagattaattattcatgtgactcgaaacagggtctccatcaactctgcaagaactccttgcacacccaacagggccaacgttggctcacattcatttgaagagggtgcccaactgtctgcaaccctaatgctctgcccaagaagagttgaaaaccttgctaaactcactcaactcttgaagcctccattttctcatttgcaaaatgagaacaataaaagctggttctaagggcatttgtgagcattaaaggggatattgatgttgatgaatttaccaaaatgcaaaacaaacagaaaaacatcagcctcagagaaaatattatttccaccttggaaaagactgagtagagtaaagagtacagtagagacccaggtccaagcctggcttggcctttcctagcaagtctagaaatgactctgcccatgtattcctcttctgccaaccaaggtaccacaatagctccttcatgcatccccctcattcagcaaatgtgtattgaatgtcaactctaatgttttgatataaatcatgggagctaatgtactcacaaaaatgctttggaaattttaatgtgctccacaaataagagggaatcgtttctgtttgtaatgattcactgtgagctcacaagtcccaaagactaagtgaccttatggggtcgcatcacagtgcaatgcttggatcctttcagccccaccccctctcagtagtaatacagtccctgtgtggatatctccagtgatgagatcccaaccactgtcagagacagagcattctctcaggttccttttccttttattaagttgctttctgtttgcctactgtttctacctttccattttggttctgatctttggggccacaagaagtatatttgacctcttctcagcctttcactaattgaatatcaccaccatcaaggtccagtctctacctcctaactcctctccacatcttctctctgtgaagctaagacggccctagtttccttgtatttctccatttggaaggcaataatagactgcaccagactgggtggcttaaataatagaaaattcattttcttacagttctgaagactacaagtgcaagatcaaggtgctagtatggtctgttctgatgagggccctctccttgcattgtggatggctcccttctcattgtgtcctcacgtagcagagagagaagagagacagtaagctctctgaggtctcttattttgagggcactaatttcatcacgagagccccaccctcataatctcatttaacctgaattatctcccaaaggtccacttcttaatactgagtacatgggggtaggtttcatcatatacgtttggaagaaggaaaacagttcagtccataacactcccccacaaaagattatcttgctaaacagaagcaaatctgattgagacattgactaagtacccaccatgcttacaaaacatgactcgtatatgctgaggaaatcaatttgattgccctaccatcaagacacatatagtctaaagattgttgccatctacattttagaggtccccgcaccttaagacagaatgagccagaggcctgggtaaatttggaatttacaaatagagtcaaagaagtcaaggcaagagaaaaacatagccccaccctttcattagattttattctagagattaagactcctaaaccaaaatcacaaaatctcaacccattcactgttgactgattgccttctttggaccatgctgcagaaatcacagcagcaataaacacggcaggcaaatgtgtcaacccctggggaactttaacttgttttctgctgttgtagtgagatcaagtgtgtgtgattcaacaagacgggacatgtgaaacttccctgtacccctcaagcccagcacagagcctcatccagagtagatgctcaatgatgacaccttataaaacaacaaataatagccaagacctctcctaagtctgctgaggggtagccacatggcttcttaaaagtcagaggccatttgctattaaagaaagccatgagctttgcgcagtggcagtatcgtagccaatgaggtttcaccgaggtgcgattattgctaatagaaagccacagatggtcctggagaccagagccatcaaaacccttgttcttgtgcggaaaagaaggcaaaccagggaccgaacttggcttttgaagatgactcaccaccaaaatcccaggtcttgatgacaggttaaatcttgtaaaactttaatttggcgaagaagttggctgctgtattactctgtcacatgtcttgggagaggtccagtttctgtcaccctagcattaactgaaaagcgggatgaaatatgaagacattttgcagtttataagagaaaagcaccagggagttttaacaatttggagaagtatcatcctaaaattggactctaatggtcactgaaaccattgctgcattcagtaaaactgggttgcctaaagctactgccatggagaatctaaaacaagacataaagaggcaggaatcagtcacatagaggcttgatgtacaatatgtccaatgaagcttccaccggagaactgaaaagcagtatctcagcagaattgcaacttctgattttaggttcttgtcaatctattctaactcttagcaaaagattcttgctgttcagcctcagaaacacttttatcttagtcgactttcctgaaatcatgctgtattgagctatgattcttactcaaatgtagttcctatgtcagaatctcatcaatgagaaatttcgcaagattgcgtgccaaaatatccagtaccacacttgcatatttttacttcaaacagaattaacactgcatcttagacacagcgtggtttaccctgctagtcatctcaaacactgaagacggtgactgtactacatgattatttacctgctcagctcaggttcccattgttcacattcacatcaagacagatcagcactggcacaaccactgcttttattgggtatatcaagtgttaacagatccttcaatg

SEQ ID NO: 11953 - DNA, 6000 bp, Homo sapiens
tgagagtcagagaaaggcaaaggtgcagcaggccaccaaacccagaagaaaaagggactccaactgcacttgacaaaccaccttaacattccatctttccatcttaacatcttaacattctctcttccttggacttctaatataacagtttctgcagatctcctcacactccctgagtttaaatttgaaatctgcttccaccactttctctgtgtggctatgggtgagttatatgaactcaagtgttagctgtactgagcttgtcagcctctgacctgcccctgctgtgtcagtgagagttcctgcaggcaacaaaagcaactgtaaatagcgtctaatcaaggaagtattaaaaaggatgacaaagcatcagaaaatcattactagagctgggaaagagttggaaacttggtaaataagaactttgttcacaaaattcaaccactgccaaaaccatagtgaaactcaaccgggaagagataaataccctgaccacttctcacctgtactaccctccaatattctgctggtgcctctcactggtcaagcctaactggaaatccagagcccagtggaggctgagtgacaccgtctctagaggtcaacctcctgagacacacagcaagccagcgaagggtagacactgaacctggatagacgacaccagagaacaaccagcacatgagcacactgcccaccatccctttccttcacttaaaaaatatttagtgtgacagggactattctagggaatcagagtacaggggttcacaagacaggaaagatactcactctcatggtatttcattctgcttatggaagacagaaagtaaaggaataaacaaggcaatttcaggtgatgataagtgctatgaagaaaataaggggtaccagtaacccgatgtagagagggcagtcctttagatgagggtaatcagggaagtcatctctgaggagatgacaggagagcttaaaacgaataagaatgaagaaaccaggctttctcagagccaagggcagagtgttcaaacaagaaagattggcaagggcagaatgcaaatgtcctgaggaggaaaccagcttgactcatccaagggagacacaggaggcctgggtggctggaacgtgtgagagggagggtggcaggaggtgaggtaggaatgtcaggcagaggctagatcataaagggctttgtaggccaggcagagagttgggtctttccctaacgcaatataagagttttaggctggttgtagtgggctggtagatatggattaagacacatctgatgtccaattgtaaaacataattttcacaattctgtgaaaaataaattgtagtgggacgagaatagaaatatcccactactgcttgcattgctgtaccagaggtcccatgcccaggaaagctaaatgatgtttcaggtaggagtgacactgtttagagcaggatgggcacctgacccaagagtagctcatttccaggttggctggcagcccatgaagctacttagagctaagagctctggaactggcttatattcttctgaaatgcagactaaaggataagaagtggattaattagccagttggtagtgtgagaatagattaaagaggtagagaagagcagagacacaatgagaaagaaataagagagtagcttatgcctgggctcctaatagctactcatatacccatataaacacttgttccttcttttcattagtctcttgagtttctctttcttacaagcaaaggagtctaacaagcacattggtgttcacaagttttcttccttaaacctcttcttctcaggcacattatccaggatgacaaagatctgctctggtaacaaaactcaaatctcaatggcttaaaacaaccaaggtttacttctcactttacatgtccttcatgatgtgactgggactctgttccgcatcatcttccctccaataccaaggctgatcgtgcatatgctctctggaacactgatgattgccatggcaaagagaaaaagagttctggaaggtcttgcatcaacaattaaatgctatgctcacacttaattcggagaacatgtcatgtagttcaaccccatcacagggaggccagggcatacaatcctcctatattcctgtaagagaacaggaaatatttggcacacctatcaccacgcactcattcataaacatggtcttaattgctgcccatataccaatgtcaaaatttctaggagagatgccccacttaattccctatctatattttcaaccatctactggaataccacgtttggatgttatcataggcacctcaagtctcatgcatcaagactgaaggctatctttcttacagacttgctgtagtcgctttcttggtcaatggccccattatctattactttaaataagaaatccaggtgttatccttgacctctccctctcttctgaaaacaaatcagttgcccagctcctctttaaacttatccccattcaactaacaccaggaccattatcctacttcactgatcctcacagcttcttgcctatgcaattttgtctggttttcctgccttcatttccccctacaaatggcaatcatttgtgtaagcaacaaacatttaaagagggctcattgctccttagattaaataagtaacgggcccatcttgaagaaactcaaagcttaaagagggagacagtgatgtaaacaaaaaattacaatacaacgggacaaatgtgataatggccatacagaaagtagcctgggaaaggaaaggaaataccaaattgagggtgatggtgaagggaaggtagtgcaggactgatatggtttggatttgtgtccctgcccaaatctcatgtcaaactgtatgtaatccccattgttggaggagaggcctggtgggaggtgattggatcatggaaatggagttctcatgaatggtttagcactatccctccttggtactgttttacggaagtaaaactttaggtaaatgctgtggcagcagtaagagctgctcctccgtgtgagtcacaaggcttggaaaagagagttgaaggatgtagcacttgcctggcacctagtagggactctacctgactcagcccaaccagggtggataggagggaatggcatggaggagcctgatcagccagcaagcaggagcctgatcagcaacgacctaaggtgtcctggtccgttatctggcaggcaactgggtggaaggtcatccactgagatatgaaacccagaaggaagagtcggtctatgggggatcacacttttaatgagggataccatcacatagttaacatttactgacgactgatttcaggcatagtgctaatcaccttactttactattttgtttaatcctcacaacactcttacgaagctaagttgtaccattatctccattttgcaatttaaaaagaaacaatgagattcagggactgattgtttgaccagttactaaacgtgatttgcaccagagcccaagttgatcatctatctaccaagctctgctgagtttgagctgcctgcagaattccacctggatgtgtccacaggccggaccacaagctgggaagtgtgggcagagacattcacttaggggtcacttcttatggggggcacggcaggatcaaagctgttgggcctggatgagatggctcaggaaactctgaaaaggaagacggcaagaggacctggggaacactaaccttaaacaggcggaaagaggaaaagaaaccagcgaatgagtttgagaagctgccctctgagaaagcgaactcttaaaaatgtccttcagtgaatctttttcaaatgcccctagaccaatgcctggcactcgataaaggacctctggagtcagaaggggcgttctgtcaagggggtggggggactttatgcctaatttttccagctcctaaaggaccaagccatatgaaacccacagggagacctcgatacctgggaggcaagtctgagacaagaatagggtcaaggaccatagccaaaccctcctcagaacacaagaactctttcccccattcgacagggcagcggcggatgtgagcgccactcacagctgcccgctctgataagaggttactgcggaaacgaccaggagggaacgggcgaggatccaagccgctcacggactggggtcgcctcggtccgagagggggagcgcgcgccctgacacgcaggcatgcgcgcgcctgtgggaagtcggggagcgcgcctgggcccctgcccgtcgcccggctctcccctcgttgcagcctcgctctccctagagctccttctcccctcccagtggtttccctccgcagctgtgggcctccgctggcccacgcggacgccccgcgacccccgcagcctggcgggcagcgcgtcacgggagcggaccagaacacagcccgctccgccccatcgcccgcggccccgccccctctggccgacaaggggcgggcaccaccggagtgggctccgtgggtgctggggcaggagtttcctcactccccgcctggccgtcgctcctccgctgactccgcgcccttctacgggccgtctcccaccctctgagcggacgcagggagtcgatgccgggcgaaccgggcgccatgaagggcagctgcctaacgggcgccgcggcggaggggctggccggctgagggcccgcgctgggccgaggcatgcggagcccgggcgggatcctgctccaggcgctgccccggctgctgcagcacgccgccctcccgggcctcgccgagctgccggcccgctgggccctgccgcggggtgcgggcggggacggcccggcggaccgccttccccgcgggggcggggcgagcgcggcggcggcagcagcggcggcctcgggcgccctgctcggcgcctatctggagcgccacggtccgcccgaggcttcggagctgccggagccgggcggggccttggcgggcggccccgggagtggcggcggcggcgtggtggtcggcgtggctgaggtgagaaactggcgctgctgctgcctcggcagcacctgttggtgccggagcctcgtgctggtctgcgtgttggccgccctgtgcttcgcttccctggccctggtccgccgctaccttcaccacctcctgctgtgggtggagagccttgactcgctgctgggggtcctgctcttcgtcgtgggcttcatcgtggtctctttcccctgcggctggggctacatcgtgctcaacgtggccgctggctacctgtacggcttcgtgctgggcatgggtctgatgatggtgggcgtcctcatcggcaccttcatcgcccatgtggtctgcaagcggctcctcaccgcctgggtggccgccaggatccagagcagcgagaagctgagcgcggttattcgcgtagtggagggaggaagcggcctgaaagtggtggcgctggccagactgacacccataccttttgggcttcagaatgcagtgttttcggtaagtggggtcccgctggcctatccctctccaagtctgtttttgagcggtcttgtggcggccctaggagggcgctctatcagataaataccagcagagaagtgacattgacggcaggagttacgattactttccatcgcagcctgggaagtctgtcctacacataaaacatacctaacgcggagcctcgaaagagagtttgttagataaaaaactaatgtttcttttagggatgggaatgtaattaaaaatgaaaagccctcttaacaataggcatgcagggacatgaatggaaatgcccatctttaatacttgtcatcttttgtagcagctttggcaacatttagggaggaaagctttctctcttgcttacataaatacatccagggttttgattcaagtttttagcgacatggaccaaaggaagtgtttcagtaaacagtggaggagctagttgcagactccagattttggagtttgctaaatttgaaatgggc

SEQ ID NO: 11954 - DNA, 6000 bp, Homo sapiens
tctcactttaaatctctcctgtgaatatctctgactacagctgagaaaggttctcagcttttaaagactcataattaggtttggctcacaaggatcatccaggataatcttcccatctgaaggtctgcaccctgtaatcatatctgcaacatccgttttgctaagtaaggtaaaatattcactggttccgggaataagagcatggacatctttggagaggcattattttgccaaccacagaaatgaactaaagtaggaacttccagtttgcaactgaatttagaggaaatatagggggcttaagacagtctttcatccagcaacagattcttgatgtaagaaatggcctcagaataaagttcaaatcagggatatggctgtaaaaccctccctgaagacctctgaaagactcaagcagtgacttggagacttccttaaatagacaagggagcatctaagaatttgaagggcctcaaatgtgacccaaacatagagaaatacctgtctcaaaaaaaatattatgtttgtggctttgtgggcatgaggtaaaccccattcagattcattggaaaggcctacacatttctaaggaagttgtatcaatttggattaaaagggacagaggcagttcaaaatggaaagagccctctgggttcccaactttctttgcggggaggcaggctgagaaaggtatgcagctgcaaacaggagccatttcttatgaaaaagaccagacttagtgggaagggccaagagccaaatataggaacagatgaggaaaaggagtagcaacagaggcagactgtgccctaataaggaagcattacatgcctctggggtcaaaagagctggtgacatgggcccaagtggatttcagaattctgtggtcccgtgtgttctatgtaccttctattcagaatgccccctcccccttcttctgtcagttgttatcctgttcttgttccactgttaaatgttgggggttgagacggctgggagagaagaagggcacatgcttcgtccttttagttcacaggtctctggatcaacagatgctgtacccaaggagctggacctgtggaattatcccccaggaattttgactgcacctggattggatttaggtgaaagatacataaagttgactttagtgattaaactagactttggggtgttgggagtggataagtgtagtttgcctgtgagggggatgtgaaccacagtgaccagtgggcagactatggtagactgttatataatagcatccagtggatcatgccttgttgtgttccacacccctttgcattgtgacattgctactcttcacttgaagtgatggaatctgttcctccaccagccttgtgacttcctttgatcatgacgaggcctctaggtgcttgtttttttccaagcaggaggcaggctgagaaagccattgatggtgggagaatgtgataagaagcgatgtttgagaaccagagcctagatcttagggatcccttaccttccaccatcatcctcttagaatagtgttctgagaatacgaggtatatgaggaagtctggaataaagactacatgaagagaattgcccagtgagcccaaatttcccagctgagcctagcccccagcaaacctgccagctgaatgctgctgcctgaatgttcaggcaagtctgacagaatggccacccagtcaactacagaatcatagaaaataacaactcatgttgttttaagccactgagtattggtatggtttgttagcagtagatcgctgaaacaacagcttaagtacattagatctcacatattatctgtttatagagtatttttattccaatagacacattagctcatctcatgaatagagatggcaaagtatcataatcataatcataaaaataccttggattgatgagtattatttaacaactattgagaaaccataaaccatagtatgatctttaacctagaatgaagtagtactcatctcataaaagccttttgctttttgtggaagttgagattgctgcaaatataatctcagtatatctactaccttttgtagtgtaagaagagtaactgtcatgagcctcaaatgagttctgcagtagagaaaccatataatgaagtaaagaaaaaaacaaacaacaacaaaaaaaaaacctttatactgatcactacatgggcaaaaaagaagacagttgtagaggtatgatggaataaaaaaattgatcagtcagatggcaaaactgtcatcttcatcaaaatgccaagaaatgttcttaatctttttgtgccaaacattttgttttagtaagattctgggactgtgtatatttgttcattcactcaattgtttatttgacaaatatcgagtgtttactaatgtgccaagcattgtgctagatactggagatctagttataaataagatagataggtttctgacctcagaaatttggttggggctggagttgtcacaatggagtgtgacaggtaacacgacagaatactatagtagtaagattttgttgatttttctcataattttctttaactcaatagtctccaggctgcagttataaaaacactgctgttcatttttgtaaattacaggcacttttgcaggaagtgctacatcttgattctgtactttccaggttcctggagacctagaaatgcccttatatcatatagggatccttatattgtattgtatcctgatgctactgatccacaaaagatgctgcgtgagtgcaaacatcattatttgatttccccttaggatttccagctgatgcctaagtggatttttctggaagaaagaatgtatctttagaaagcagagtgaggatccttcctaatgtaatttgaaacatagtttcgtatgtctaacttctgctttgcctcatgctcactgaaatctacagctagcctcattttccacttgtttttgactctctcaggcatcttgaggattgagatcatgtcgtagttatcttttagacttagtaaatgagtaataaatgtttcttttgagtgactcaaaaattattgcagaaaaattatcatcctagatcattactatttttctattgcatttttatttagacatgttcaaaactttatttatttttttttttttgagacggagtttcactcttgttgcccaggctggagtgcaacggcacgatctcagctcacctctacctctgcctcccggattcaagtgattctcctgcctcggcctcccgagtagctgggattacaggcatgcgccagcacgcctcgctaattttgtatttttagtagagatggggtttctccatgttggttaggctgatctcgaactcctgacctcaggtgatctgcctgccttggactcccaaagtgctgggattacaggcgtgagccaccacgcctggcctcaaaactttaatttgttttcatattcatgtaaactacttttggataatatgacaaaccaccaaataaaaaagaaaagaaaaacatataaaacatggcaagaactgtgtttttaaagaaaaaagttattcagtgattcttgtcaaagcatggtaaggaagactgtatttagggctatagtgataggtatagggaccatggcagcagggtcttgccatgttgaagaagagattaggctcaattctgaatgcagcatggacaagtgggaatttatagcctaggagcatgcaggacaggggcagtagatggaaaattaccaaggaaatatcagggataagggggattctgactaaaccaagcaaacgggattcttgctgaagacagaacaggagttcaggcctcacatgggggatgctggaggatgaggaacctgatcaaatatcaatattgagaatggggcttcttgctaaattaagttagtagggttctttgctaaaactggattttataaggaagtgcagatgggcccagcataagattcagaaaccttacttgtttgaccaagcaaagaatctttgtcagtgcttagggttttttgtgttttaactctgttttacaagtaaacgattattttaaaacttttgtctcaagaaacttgtttttcgttgtttgacgttattcataaacctacttactgtatatgtgtcagggacaataggctacaaaaccaaaactaagatgacaacctattttgtaaaatgaaacttgtaaaaggcaacacactgcatagttccaaaaaggtactgttaccagagttccaaaccggtcaggccaacattcctgttgttaaaaaaaatcaatcaggaaaagtagggaatgctgacacttccgcaaagatctactttctcttagataacagatgttgaaaactgatttcccacaaaaaaaccctagaggaattgataaccccaggaagatgttttctttatataactgctgcaaagtttgacagcaaagagtcagtccctcctcctccttaggggagataaacttgataatctgcttttgctccagttttcttgtaatcaagtcacaggcctttcctcttcgctagcccctttcaggctgctttttatccgtctttcctagagcaaaggacttgtccccctccatcccatttactctcgaccccctttcagttacttggcatcttcttttcctcgcgtttcccagttggtcctaatttgttccccttttctctggctggctgggctcccgctcctccactgctgctcctcccactctgcgggttctttctttctccctcccctcccctcccccagccatgcctcccagcgcgcttcccttcccccgcctcctggtcctgcaccctcccctcccctccccccgcttcctgccttgtgacacatcccgggccctcccggaggcggcagcagcagcagctgcagcggcagcagcggcagcagaggcagcagcagtagccaccactccgccgaggccgcaaccccggctcggcctccccaggccccgccgctgccgcagtcatggctgctgatggggtggacgaacgctcgcctctgctgtcagcatcccactccggaaatgtcactcccaccgccccaccgtacttgcaagaaagcagccccagaggtaaggccagcgtagatccctctactttgcaaggaagtagatttgcaaggaaacgcccagaaggataaagacctgggagctctagcttggaggtggaggtgagcctctcgcttgggctgaggaaggatgctgactgtgccttcccaggcaagcccgcctgcctgatagcttctccgcagggtttttctggtggtggtggtgatggtggtggtggtggtggtggtgatggtggtggtggtggtggtggtgatggtgtgtgtgtgtatttcaccacttcttacccagggctacagtatgtgacatgaatttcccaagctctgcttagctgttttcagaacagcccctaagcgcagctaggaggtggtgcaaatctttcacaatcattcacaaatctttttccgttgctgagaaaccaggagtattgctcaccttggcatctgtccttgaaagggctttagcttgaacaatatgcttctgctaccattcacccaacagtgctctgttcactcagtgaattgccatatccaaaatgaatacagttaatcaatattcctaatatgtctgaaattcctgcccctcctttttactcctactttcaaggagtatgtgttagatttaattgtgaatgagaaggaaggaccttacttctcatagaagggaagatgggatatttttaacacatatctgggtgagattgaaattaacttgtaaaaagtaacccaaattaataatacatatatttctatttttttctcaagaagaataaaaaaagattaaatgcaatgggatctggagaaatatggaatctatttaccatactattcgatttatttaaaaatcgatcgttgttctaagccttttagttgattactatagtaaataaataaggtggagtcagg

SEQ ID NO: 11955 - DNA, 6000 bp, Homo sapiens
acacccttgtaaacacatccgggtcaagaaatagtgccaggtctcagaagcctcccctttagtcttctcagaatcactactcttttcttcccttacaaaggcaacctacctcttgacatttatggtaactgcattcttgcttttctttattgttttgctaacatctccaaatactttggtatagtttgcctcttaactaactaaatatcaatgaaattatgtaatagaactgcacattgtgtattttttagtggctagcttcttttcttgagttttattgttgtgtttttaatattcatatttattaattttatcctgaaggtacacatggtgttggatcagaaacagatgatttacttaagagcaaataatgaccatgcggtcctctggatcccaattcttacccttggcacaacacagtgaaagccaggtcagatgtcctaggcgtacaaactttgaagtctgtatcacagatgagaaacaagagaaaaaaataatttagtgtgtttacatacagaagcaagagaaaactatcttttccacccctccccaaaagatagaaaaaaaaaatctttgctccttggatgcaataattttgggttctctaaatgtttcaaatataaatacatttcttcaaagccaaatgcagtgagtaggtctaaattacctagtctattactacgggaaacaaatgttcccaataattttttttttctctgactcattaagggtttaaaatacattgaattttgaataacaaattgtgatatctgactttcattaatgtctaaattcacttaagacaaaactcaggtagaacagttaggggatactgccccttttgggaaaggcacttgctcttaacttcggtaatcttccccatccctattgtctgtattcagccactttatttaagtaacatgcctacttggccactgtaagcattcttattaaatggaaacctttctaatttaatgcttttttttgttcctagaatcttgttcattaacaagatcttcattctctaaattatggtcaccttcattcttagcaccagtatggggtataggaccatattcctcatgctatccctattcaatgactgatcctccctccagcctattccaaaaatgtctttcttacttctctaggacccagcctctcataataataactccactaataatcccttaatagtccactaatcagcccttattattattactgaagaaaaagaaactggaacacatcctcagtaattattacaagaggctggttgttaaaagtcccagcactacccttgatttacatggtaaatttacttctcagaatttttcttatttttcaactagttaacttagtgtagtaacgattgctcctctcacatgaaacggagtataagtaaacaggaaaatgtgagacattaaaattagagtaagaccaaaatcattatgtagatttctagataacattttacaactgtgaattgttttatcagcatatattgaggaactactgttgcctatgtgtcgcactatttcatgcccacatatagcttcaaagaaatagaaagaatatgttggttctcaaggagcttaaattttatctggagagatcacatagaaagcactataaaatatacatgaaatacttttctatatctaaaataacagcataaaagaaagcatattatgctactagaaagccagttagaaaggtaacgataagttgaggacgttgaacaagaaaggcttttgaaaaaggttcttgggtcaattttcaggaaagttttagacatagacttatgagagagggggaaagtattccagcaagtggcaatttttgcagagcttttattttcaagtgctcaattggttcatctctattttttgtcagcagacttttaaaggggattttgtggtgttggttggaattgatatatttttaatgctcaagaatatgtagacagtcaagtattattataggtaatcatctcgagtcttcagttcagtcttgacatcttccctctcaacagaaatactgcactttctgcaggaggtaaggtgttcagcatgtagatgctgaccttaaggagtttatgattgattaccttagagatttaggcacctaagtgagaagttaaaccacatgcagtggctacctagccattccagaaatgtcgtaaagcagtggatgataaatatcaaaaacaccagtactgacaagtcccagcaaagttcacaggaggtgtaatccttggaagaaaaaggcttcagggaaaaaaaaaaagtaacttaaaatcagttcagcctgggaatcacagaggtcctctaatccaactagatgaatcccttctatgaaatcactaataaatggctctcctttttttttttaatcctcaccagtaccagagaatttgctttcatgagacatcaatttaaaagttttagaaataatgtccttccttatacaaagtctcaaatcagcctccttcttaaatttaatagtgctatccagagcttctcagatcagtgctttggcatcctccagcactccagtgtgtcacaggtgtgctgacttatttatttccttagccctccaagctgtcctgcagagactgaagtacccacagccccagaactatggccatgagaaacctcctgtgtttatcacattgccataaatagtatcacctcttatgtgtactctgctgtaaaaaagattgtgaagcattgctcagtataatgtgttggcaaagagatcaagtctctggaatcacacagacccaagttagaaccttagctctgcccgatattagttttcaggccttggaaaagaaactacatcttttcaagcctcaatttctacattgcaaaatgggtgcaataatactgcctcccttgtgaagttggtgtaaaaattaaagatgataacataatagcactaacaaaaaagtattattgttatttgttctgcttttacccttttaaatatactatagaattcttcttctatttttagaaacttcagaatatttgaagctagtttattgtttcctctcagtattctcctatggctaaatagcctaagttcctaagtttttcctcgtcaacataaattcaagttccttctacatcttagtttctctctttatttctttttgcatatgtagtactaagaactggatgcatccctgtagatttggcttgacaaactagtccttgaagtgtggatggaatagggcagtggaggaaagatattcatgctggagaaccgtgtagtaagcaaaggagaagtcataatacatctgtcatgtttatcaacaaatgggcctcactggctacaaatataatcatatgggggaaaaagaattttaaagagggagcattgtgaactcctgtaatcatgtgactatagattctatccaatgtaatgaaataccaacataattgtcattaaaggagatagatctctcttttgaaagcaagcaaccacagtatttatgtgagctacaagcacaatgtcataatacatactataatccctaatcccttttttctttttttcttttttttttttttgagacggagtcttgctttgtcgccaggctggagtggtgcagtggcacgatctctgctcactgcaacctccgcctccggcttcaagcgattcccctgcctcagcctcctgagtagctgggagtacaggcacgcgccaccacgcccggctaattttttctattttagtagagacggggtttcaccatgttggccaggatggtctcgattttctgacctcgtgatctgcccgcctcggcctcccaaattgctggcattactggcgtgagccatcgtgcccagcccatccatactataatccttttttgctcccctagaattgtcccaacaggatgctggaaaactggagattatctgcaagctacacataccctgggctttcagtggctgttggctattgcagtccactctggttgaaagaggctggtgacacagttaccttgtcctatcctaagagtcacaactcagaagattcaaccttcagatttcctttattcctgagcccttttattctggccttctggtctttcttccattcattccatatagcataacgcttagaatctgttggtgttcatccccccccccccacctctgctaagtattagttgtgtgacattgggcaaattattctactttgtaactcagttttgccttctgttaaaatgaggatttttttttacagtactttaacaataaattgtgaccattaaatgagataatgtatctatagtgcttagaagagagcctggcaataataagcgctatttatgttaactgttattttgagtcattattattcatacattcaacgaataccactgtgctaaatacaggggatgtgttggtacatcggacaatctcttaccccttatggtcatatttcttctgattttgtgagacacgcaatgactttcgaatctgactcctggatgcaatttcagaagctgctgttggtaactgtggatgaggcacttaccctctctgagcctgtttccacatctgtaaaatgaggattaataaaatctacttggaagatttgttttgactattaaaaagacaaaatatgcaaattatctggcacatttgaagtcgaatatactttccttttcacagtcttgtggccacacctgaggctagggaactccactctaggcttagaaaacagtgctgtcttcttaagtgctggggaggagtaagagggtatggcgggaactcatctgcaggaagggtaaaacccagaaggcgtgggaggagacagagacaggagggatgcagggaccgcccctggcctacaactcccgggatgctccgggagcgccccgccccgccccaccccgcccgccgtggcgggcgctgcccacccggcggagccgagcggcgtgcagaggctacaagtgccgtagctggtgattgggggactttctccgggaaccgtgccgggagagcgcgcggtgctggagccgcaccgggtggccgaagcagaaggtgagtggcggggagtgggatggggtggaggctttgaatgcaagggtgagagccctggagcctagcagagctggagcgcatatccccgctctctctccttcgtctccgagtactaggcggacacatccgtacctcgaatgcctcagtgggcgcagagttcaccagaaatggatagccggattcctcggcgcctgctgggggcaccgctgccaggtgcttggggctcgctctcccggctttgctcgcacagggcgcatccagaggtcgcctccccgagatcagccttgcctgtgtcagtttaaagcaaatattaatgcttttaattgatgacagatggacgagggaaagtgcgtgtcccctcgctttaaggtgcaatgtcgttaactgggcttttaagcagatcagaggaaaaagagggagaggacggaagaaaagagtctttagctggtcccctgggattatccattctccactgagaatggaaaccccggattagggagctgcaaaggaaatcgactgtgctgctagcatacctccggtagaacaagcgaacaagcgggagtagcttttctttaaagagaggtagaggcggccgtagggaattaagtggggatttctctcttcttttgttataaactgaaagtctcaaagaaccctgctgattttatccaaggtaggctagtgtgatgagttaatggtaccaaaggttaatcagagcccctaatgcctgagaaaactggaagaagagttatcggtaattgatgaagcctgttaccatcacttcattcattgagggatcctttagtgggggtttgttctagtttagtagtgattcttttgccctgttgttttttgctgttttcactgtagagaaactccgataacaggagaaaaacgttttctgttttgctttttttgttttgttttaaacaaa

SEQ ID NO: 11956 - DNA, 6000 bp, Homo sapiens
ttactgtctacactttactcctgtggccctctctccctcttgccatatctccctggcaaaaagctaaaaagattagactcaactttctgcttaccctgtgcctacacgtggccagctgaaactttttggagaatacacaatgaagctgccagtcttgcttaagaacctagtggtacttacaacggcccctcaccaggcatgatttgctcatgaaacttctctacccttggagcttcttctacatcttcttttcctttttcataccagcagtaccctctctttccttttatgatcttatttttttcagaacatagaagcagtgaggccagaacaaccttctttcccactgccaaattggccaacctcctcatgtgtacacctacttcctttgcagtcctgtgtagtgtatgaattgtccctgctcctaaggccaatccttctgcactaggtctatctcctctgccttcttaaagacttggatccttgagttatccctttcatcccttgagttattaatgtctccctcttctggatcatccccatcagcatacaaaattctgtaatattgcccatcttgcaagacaacaatagcaacctactggaccctatgtcctttgctctccttcataagaaaatgccttttacaagtttcctatactcactctatgcttttcacctcccattctttcctttacccaatgacatcttcttaatccaatgacatccatctttctatactcaatggttaattatttgtccttgattacttgacttagcactatttgacagtgtctgcttcctcctacttgaaacacaagtttctcccctcttccttggatgagaggggagaaaaccatctcttttgttgatgtctccctgttcttcttctcaatctctaaatgttggagtgctccaggtctatttttgggccatcttctcttctgtttatacttttcctttggtgccctcatctaggcctggaaacaaatttaatgacttcctaattccatcttcatacttgcccttttccctgaggtccagattcctatatctagttgcttaatttacctttccagttggatatccaataggaatttcaagcttaacatgttcataacagaactgttgcttctccctcatccttaacacagttaacagcaccactactaatccagttacttaaactaaagtctaggaatcatccctgtcctttctttcccctaccttctggttcaaactatgagcaaaccctgatggatcatcttgtacctgcctctgaattggtctccctgttctatttttgcccccttctcctttctccttcttatactgtttaaatattcaaaaatgacaatataatgagacctccatatatccactgctcatcttccataatcgtcaactcattggctcctttatttatttgagacagagtctcactctgttgcccaggttggagtgcagtggtgtgatatcggctcactgcaacatttgcctcccgagtttaagggattctcctgccttagcctcccaagtagctgggactactggtgtgcaccaccatgcccagctaattcttgtgtttttagtagagacagggtttcaccatgttggccaggctggtctcaaactcctgacctcaagtgatctgcccaccttggcctcctaaagtgctgggattacaggcatgagccgccgcgcccggccacctccattatttaaaacttagatcacattgtacttttccattaattaaaacactcctagttgcttcccattatatgtagaattaagtcacaattctttttccctgtccttcaaggttctacgtgatctagctgttgccccttctctagctcacgtcctcctattcctccctctccttattatgttccggtcgtaatcttcttctctttgaggtacagaagaggaaaccaaagttcaggaagcattggtaacctagacaagttcacacaggtaccttgtatccaggttctctgactctaggccctgctgtgtaggcctcactgtattacactgcttgtatttctaatttagaggctgtgtcatataatagaaatagcatagactttgaagttgtacaaacctggtggcaggatttgactctcatttattacttgtctgagccatagttctcatatctaatatagggttaaataatacattatttctagtttttgttttttgcttttttttttgtttgtttttttgagacagagtctcacactgtcactcaggctggagtgcagtggcgcgatctccgctcactgcaacctctgcctcccgggttcaagcaattctcctgccccagcctcccaagtagctgggataacaggtgcccaccaccacacccggctaatttttttctatttttaatagagacagggtttcactacgttggccaggctgatcttcaactcctgaccttgtgatctgcccacctcggcctcccaaagtgctgggattacaggcgtgagccacccgcctggcctactcctacttttattgtgtgggttaaatgagacaatacatataatgtacttaatttaattaaaacttagaaccactccccaccctatctctcccacaaacacctacacttacgcttgttgagaagacagattcagggggagagagagaaaataagtacatagtactgtatcataatatgttccctaaaatattcatgttatatattttttattgttcctacagagatttgtgtggagagaagcaaaccataggtgcattactcactaaatattctcattcttcgatgcaaaatggtgttaaagtttataattcgagaagacccatttcttaaaagaacaacggtcttttcttcaggactcaagttgctttataaagttgctggatagaagaaaaataacttgtacttttatttctgacttttagaaacctagtcttctaaggcatttttctcctcatcttaagcattttgaaactactgttatttcttaaatgttataggatgtagctttaaaattatatttgtactatgtacacagtgtaaacaaggacaaaagaattctttcctatattatgtctgaggtctctatgatttatttaaagtttggctttttatatttaaaatgtcatttctttacttaggatttgatgttctaatcattaatacacttaagttttccagagaactaaatagtaatagtttcatagaagagaactatttattcacttaaatatcatttctcaagtgagtgagttcccctctacttttagccttccacccaaactggaagcctctaggtgctatcaattatttatatccatcgtttacatccatgaaattggctgaataattactcctctgcctggcgtagacatgcgctttgggaaaaaaacgagtttataatcctataatgaagaatactggcacaggcaatgctcactcgaaaacttcaagtaatttctagttggttttggaatgcttgataaagttcctttacagctttattttcctgatttgttttggtttagatcaaagttcaaattaattttaacttagctaatgaactcatcaccaggacagttggagggggtaggccgaggttaaatggtccacgtttcaaaaatgttaatggctaatccataattaaagaaggtttaactgttactgaagtttacaagttttattgtcatgaacatgaaatacaaacacgatggcttcgaaatgtctttcaataaatgtttctgcatttatatggattatatgatatatatacacagtctatatatctctatgtagtctatttatttattttgagagggagtctcgctttgtctcccagactggagtgcaatggcatgatctcagctcactgcaaactcggcttcccgagttcaggtgattctggtgcctcaccctcccgagtggctgggaatacaggcgcacgccacgacgcagggctaatttttgtatttttactagagacgggctttcaccatgttggccaggctggtcttgaactgctgacctcaagtgatatgactgcctcagtttccctaagtgctaggattacaggcgtgagccaccacgcctggcctgtagtctatattttattctttttttttttttctgagacagtctcagctctgtcgcccaggctggagtgcagtggaacgatctcagctcgctgcaacttccgtctcccaggttcaagcaattctcctgccccagcctcccaagtagctgggattacaggcgtgcaccaccacgcccagctaattttgtgtaatttttagtagagacggggtttcaccatgttggtcaggctggtctcgaactcctgacctcaaatgatcggcccgcctcggcctcccaaagtgttgggattacaggagtgagccactgcgcccggccttgtaatctatattttaaaataaatactaaggcagcagtgcctagtgagagctgtggagtgctgcagttttgacatttagactacctgcagtctaatcacatattttacagcttaaatcaccggacccagtgtgtctgttcacacagcaagccagaggcacgcacctcctgatttcgggagacttcccaccaccccaccccgcccagttactagcaccctgccccagcctatttatacctggctcttcgcaaactttgtcctccattcttctcaatatgcttgtactagaaaactaccttccctccttttcttcctgctgttctcgcttcatccattaaatagttttttccctatcctaaattttaacaattctttacgataagacacatgcgaagatcgcaagccctgcccattgacaagacttcctggttctacccccgccgccgttccacttccgctgacgtcggaggtcagaggttacagacaagatgtcggcggatggtagcttcgagcccttgcggagaggagcatctctgtgacagaagcttgtcgacggcggcttctaggagctagtcgaaggagcgaggttgaggcgggcagcgacccgtcaggtcgctcacctgggcaccggccagctgcgagacgtgacttggggaccgcaggggagtggagagtgtgaggtgccaaagactagtaatgccccgtatccccctaggaagccgggaagccaagctccgcgggaccgcttcatgccgctgactggtgtagagcccgccagaatgaacaggaagaaaggagacaagggctttgaaagcccaaggccatataaattataagtattttttcatttcccttccttccttttggttttgttgccattaattatattttgcgattgcttgaaattgacttggtgggcctgggaaacctagtgggaaactagaatttactcactgtgatggaaatggtgtttgtaaggtaaaaatgttttgaatgacaggttattcagcaaatttaattcccgttgcaagttactaaagtttttgtctaagtactagattgtatttctgtcaaatctgttttcgtgactgttgctagattttaaaaaattatcccaattggtagagtgtttttttttttttaattttttaatttttaagacggagtctctcagtcgcccaggctggagtgcaacggcgcgatctcggctcactgcagcctccacctgccgggttcaagcttttctcctggctcagcctcctgagtagccgggattacaggcgtgtgccacgatgcccggctaacttttgtatttttagtagagactcggtttcactctgttggccaggctggtctcgaactcttgacctcgtgatccgcttgccgtggcctcccaaagtgctgggattacaggcgtgagccaccgcaccaggccccaattcgtagttttaaaatgaaatattgacatgtaattttgaattacttagaacatagtcctaatttatacttggatagaattatactttgatttaataataaaaattattttttccttattttctttttatatttatta

SEQ ID NO: 11957 - DNA, 6000 bp, Homo sapiens
agaagaagggtaaaaatactacctctgcctgagctgaggcatctgtctcctccagctctcggacattggtggtcctggttctcaggccttcagacttggactgggacttacacttgtgaccccctggttctcaggctatcagaattggactaaattataccaccagctttcctgggccttcagcttgcagacagcagataatgaaacttctcagcctccataaccataccagccaattcctcataattaatttcattctgtatatatttctatatcctattggttgtgtttctctggagaaccctgacaaatgcatttagggagaattgacatcttatactactgagtttttcaatcttgaattggtatttctctccacttatttaagtcttctttaattgttctaataagactttgtggtttccattgtgaagaaacaatttattcaccaccactgtgatggggcagaggccttccaggggtcagaatactaaggcaggagcttgatggatgagaagtgcaatgaggaaattgcaaaaatatgggcagaagaaatgattaaagggtccactaggtaaagcaacaatttcaagaattttaaagcagaatagctgggtgtataaagtttcatcaatggcaggcagcaaacagctgtgtgccctgccagcaacagggaagccaggaactctggagcgtatttatatgatgcagcttaccatggactgatgattcagcagcaatttttcatgaggaggaaactgtgattgttaaccgaggtatgacagttgtcctctttaaaagcgaagaacaggctgggctgaactcaggccaagtttgccttctgggctttccttccttctatcttccatttctgtagcccctccagcctgctagcatttcctcttcagcaccatcatatttcttcggaaactcccctttgccacctgcatctagacctgctccacagccccataaacgatccccaaattatctccctccctagatccttcatccattcatatttaggatattcaggtgttcagagaaggaagtggttaggggatgcagttaatacacatccatgtattaaatgacagatagctaggtgggcatttctcaaatgagggtccaaagacataatcgtagagatttgagaggtccgtgggcatttagataataatagctagtatttattgcatgcttgtcatgtatcaggtgctgtttgaaatgctttacatgtattatttggtttcactataacattacaaagcagatgcccttatctatatttaacaggtgagcaaactgaacatgttcttattcccattaaacagatgggcaaccacggaaaggttgatcagctcaaggttacacagctaagaaatgacagtataaggactcaaatccaggcagtctgagtctagagctagtgctctcaaccccaatgctgtcatctggggctcaattgagcctggatggtccaagatgctgtcatgcatgtttggcagttagctggggctgttggctacggcctcctcctccatttggtctttccagcaggatacatcagacttctttatgcagcagctggattccaaaaggtaaatgtcttcgaggcaatttttccatgtggaaaattaccttgatgcaatggcagcctccatgtatacacctacaggtcacgaaatagataggcttataggccaaattaagaagcttaaatcacattatctggtggttctaaaacgtatcctcaaaggttttggcattactcctattaagatgtggggtttatatccctttcccttgaataggggctggccctaggggttggcttatagccagtagaatacagtggaagtgatactgtgtgacttccaaggataggtcagaaaacgccacaagcctgcttctttttagacattcactctggggaaagccagctgtctggtgagaagatcaccatgctggagtggctgtgtgaaagtgctctggttctcagccccatttgagctaccagtcagccatgtcagtgagccatcttagctattcagcccagctgaactttcaaatgacagcagttgtgttgaaatctgattgatactacataaacgactccaataaaataactgtccaagtaagttcttccccaatttctgagcctcaaaattaagagcaaaataaattggctaattaaactactaagttttggcataatgtgtctacccaaagagcagcaataataaccagaagagtttaccaaccaacataaaacagagtgagaagcaaggggaaagagatagggtagattaataagcttaggataggctgaaggaccatagcacctaaattctgttttatgcaatgttctcatgtcttatccctctccaccatccagtcttctcagcacatagtgtggctacaaggaccagactggagagtaagtaaggtgactcaacagactgaaggggcctgggctcaacatatgtctgttctgttacagagctgaggggcaagtgtgtctggttataatggtagctggcattagttggctttgtagctgggggtttatctgcttttcttgggaagagattacatgaggccataatagcgttacaatgggtgttaccagtaggtatgcaatttagggatgacatggctgtaaatctgaagatagtatgatctgtaccttattaatacttaaaagtccactttgtctttctgcctctatctaaagcagcattttcatttgttccatcctttttatctatgttcaacccatatccattcattctatgtgtaacctttctcataagtgacttgcttctacattttagtttctcttgttttataatagaattaaatattctatagtaatatagcaaaagcattacagcaaaccccaatgagcaaacatgtatcatatcacgtttatgatgtcctcctatttattgaccaaaacaagtcaaatagccaagcccacagtcaatgtagaggtggaccacacaacggagcggataatagaaggtgtagttcattggggatcactactataacaatctaatactaacacatagttaggagacggttgatccagggatcgaactttccacagtctgtctctggaggctacacactaaactactattctggaggtggttgggaatgggttcttactgaagaacttttttcaaacctcacttcccaggtctggggcctgtgatccaccccagtgaatcagaatatcttgggggtaggaaattgtgggggggatggggtggtactcccatgagcctgagactgaaatagctctgcagaggattccagtgcacactagggaatgaagggggtttcaaagacaaggaagatatactttatgcactcaaaaagctttcatttccacagagagcattcttaattgttgttattacatcacagaggcatcaccttggaatttaaaaaagaagcgattcctttcaatgtttaagagacatcagtgtttctcaagctttcgtgtgtgttattactggagggcttgttaaaacccacatgactgggtccaatgtctacgttctgattcaggaggtgtgaagtggggtccactatttctcacgtctaaaaagctctgggacacactttgagaaccagagttagagaagtaggaggctttagtggtaacaatcctccattattcagtttaatattctacttacatgtagcacatttactacctacaagtttccgggctgagtgcagcactgtttatgataaggatgggatttagatcttgattacgctccagcagatttattaagtggatttattctctaagggtgcctaagcgtcattagacaggttcagataaagcagagatctcctcccttagaagagattagggacagcttaatgaagtaggagacctttcacctgggccttgaaagatgcctaggacctggatcaggggaaatcgtggacaatcaaattattcttcccgctttagcacagagacaaaaaaatcacaagcaaccactaggaaaggtctatgacattcttgcctctgcctctagcattaacaatttgcatgccagctgctggaatctgaacggggaggactgttctcgtgtcaagggctcagtctcagaccctccttgggcaggggtggaactggcttcgctttctctttggggcgcccagagcgactgcattagagccggcctgctcggccgaagcggcggtgggcgctgacttggcgaagggcgcagctggggcgcttcgttccggagcagagcgccgtgatcccgtcggggctggggtggcagcgcagctctccgcctgtccagagcggggccgcacgccggggcacctttcagaacaagctccagatgtggccccaggttgggggccgggtggcagctgtactaccctggcgggcgaggggtccagagctcgttttccctattccgatctgtaggtttaacgccagcacagggtggcgcaccctacctccttccaccttcacgcaccagcgcgggaggggacgcgtgtgcacgctcctcccctaggagggagggcggcccgagagcctgcagactgcgcctgcgcagcctcgctcacacacctccccgcccccccgcacctccttcccctttcgccccgccccgttcccacttctgctgccgctaggggtagcggcggcggcggcggctgcggctcgggagcgcggctgctttgagggctcgggaaccttacagagtggggacgtggggaggctagagggtgagaaagctggcgggagagtagggcggcgctggaggagggcggtgcgtggctgactcatcctctggaagatcagactgacagagacacacactagcccgccccgcccgcccgcgccgctcctcctcagccgggaggcgcccgcccgcaccgaccgcccgccctctccgggcgctgtccgggcccggccgtctcagagaaagtttttcccatcggaggggcgggagccgccgcgggccttttggaaaggaagtggggacggaacaggaggcgagagccgcgcgggcccgcggagtgcatggtgcccggcgcctcggctgcctggcaggaggacctcggggcggggtcgagctgagcccagctccttctcgcctcagccgcgccagaaaccgccttgccggacggccgcgggggtcccagctcctcagctcgccatgtcccggctgctgccgctgctgaggagccggaccgcgcgcagcctgaggccgggcccggccgccgccgccgcgccccgcccgccgtcctggtgctgctgcgggcgggggctgctggcgctcgcgccccccggcggcttgccgggcggccccaggcggctgggcacgcaccccaagaaggagcccatggaggcgctgaacacggcgcagggcgcgcgcgacttcatctacagcctgcactccacggagaggagctgcctgctcaaagagctgcaccgcttcgagtctattgccattgcccaaggtaaggggggcaggtggggggcgagcccgggggccccgacgccctcctcttctcgccagcccaccgggagcccgctgcggccctggatcttggacccccgccgccgccccccttccgcccccctcgcctgtctggccccacgcctgggacggctgggggcggggagactttccgccgcccgagtttcccccaggcaggtaggacgggcgcgggtcgtgccaggcagccgaggccagcgctagctacttcctccccagcctccgaatccggagcttcggcctaaaatgccagttaacgctgttgggattgagttttgatttgccccgtgcctcccctccccagccctcctgtcccttagcccttgctgctttcttgcgagcgtgcacccgtgcaggtggcatgctgtgcctgctccgagaaagtgctgcaaacccgcctggcaggaagaaactttttgaacggttatcaaatgaagacgtatgggtg

SEQ ID NO: 11958 - DNA, 6000 bp, Homo sapiens
aagggaatgtcttccctaatctcaggagatctgggtttcagcccaattctgcaagttagagtttcagtctcagcttttttatctgtaaaatggaagcaaattacccgttcaatttatctcatggttaatttgggaggggtgtggatagtgctgttgctaccagagcaaactttagaatggtttctgatactaaatactaaataaacgttactataatactaaatactaaataaatgttagctattataatttatttttctaacaatctttatggccatcccctgataaaggtattccaaagagcctgatttttgcagatggagacaagagtggggtttgagtcaggttctcaggcaatctacaggctgatatctccaacatcaagatctatctgttcattcattttatgcagagtccagtaaaagcattcctgcacagggaggttgcagtagggtgatctcccagcagatcggggccaagatactccaggacaattcaaaaggacagagattgcccagcctgaccttcaaagcaagaataagtaatgtgccataaccatcagttcagagccaaattccagacaggtccttgttctcccattgaggaaggacagagaagcttctgcctactggagagaatgacctgaaaaatgcaggcacgggccggacgcggtggctcacgcctgtaatcccagcactttcggaggccaaggcgggcggatcacgagggcaggagatcgagaccatcctggccaacatggtgaaaccccgtctctactaaaaacataaaaaattagccaggcgtggtggcgggcgcctgtagtcccagctacttgggaggctgaggcaggagaatggcgtgaacctgggaggtggaggttgcagtgagctgagatcgcgcctttgcactccagcctgggccacagagcgagactccgtctcaaaaaaaaaaaatgcaggcacaacctaggtgcagacacagcttgtgattctaaaacatgagaccttgctgagctccccagactgtgcctctgttgcctcatcggaaaatgagggcacatattacattttgtttcaaagtatgactataaagccaatggagaaaaaagacttagcacaaaataggtacccaaaacatgccagttctttctagaatagggtgtttaaagaaaaaaatggcagatcttcaagatgtaaaggaagcatcaaatgaaatgagtgaggaaaccaggggtctggaaacagggaaggggctttgcagccctggggaaatttgtgctgagtaagcaatgagacagtgagtgttaagacagcctcagagctcagggagctcaaagggctttaacagacatgatctcactgggatttttttattagcttcttagacagtttaacaggttcctccagctctgctgagacagtgaaactgtgggctcctctggcctccctgggcacatggaggccagggcagtctttctgaacctgcttgggtggcaaaggcccaagatctgtttcttgatctacaatcggtcgtgagccaggcattgcagaaggaaattcattttttaaaaataaatttcctagagcaacattgaaagaattctgttttttggccaggcgcggtggctcacgtctgtaatctcagcactttgggaggccaaggcaggcagatcacgaggtcaggagttcgagagcagcctggccaatgtggtaaaacctcgtctctactaaaaacacaaacattagtcgagcgtggtggcatatacctgtaatcccagctactcgggaggctgaggcaggagaatcgcttgaacccaggagttggaggttgcagtaagccgagatcatgccactgcactccagcctgggcaacagagtgagactccatcttaaaaaaaaaaaaaaaggaattctgtttttgtttttgtaaggagcagagcagcatggaaagaagggaggctttgggatcaaccctgggcttaattcccagctcagctgcttcctggatgtgtttcttagtctgcaaaatagggcaaacagttcttcccttgaaggacagtgccaaggaccagtgcaatgacaaatgtgaggttcaggcacagtctaggcatgtaatgaccgggggaggcttgctgttgatattgtactcctttgttacacgccttttagtttctcctaggggtattcattcagctctaatctcaagacctttctgtgatctgacgtccctcagatgtcagatccatgctgtgacgctgtcttccttttgatcagcctgaggcctgcatcaactctacccactggccttgccctgggtttcctacccagggccctacccctgagctctctgctagtgcacgggtatgacaacaacacggctgtggacactgctgtgcagggagctttgcctcaggaatattgagctccagcagtgcactggggtagaaggagcaggtgggatgaaagtttcccaggagggtcctctccctctctaaggaagcctcggttccctcttcagtaagacaggggcacagggtatggtggctcacgcctgtaatcccagcactttgggaggctgaggcaggtggatcatgaggtcaagagttcgagaccagtctggccaacatggtgaaaccccatctctactaagaatacaaaaattacccaggcatggtggcacatgcctgtaatctcagctacttgggaggctgaggcaggataattgcttgaatccgggaggcggaggttgcagtgagccaagatcataccactgcactccagcctgggccacacagcaggactccatttggaaaaaagaaaagaaaagacagtggcttgcattcccatatgattgcccaatggagtgagataatgtctgtgaaatggcttataaactgtaaaagtgctgagcagactgagctgttagccatcctccctcctacacctcctcactcgaaggtgctccttgtgagcacctgaatcttgagtgtgagggaaggagacataaaggagaattcccagcccaggcccttttgggtgaaagtcagtcctcccaggtcagtctttagttctggtgacacatctgtctcctaagtgactgccagctgtctcttcccatcccccaatcagcttttctcccaagagtcctttaagcaaattccatctgagcctggtgacccctgggccccggtgcttatttgagacagtgggaaactcctccaccttcaggttcaggagtggaggcagcgtggagcagtggttggagctcccacgcttgaagcaggaccagcctcacctgggaaactggccgcatctccccacatggcacaacagctttgtggctaagggctggacaggcagatggcatacaggagctgggacacccagaaacacccaggtctcagcctcccactcctatgcagggagagtaataacagcatgccgccacggggctattgggtgctaaccccaggacttggcacacagtagcacccaagtgaggtgagctgctttctgcggttagcattcccactgtcaagcctgcatcatcagtaaaagggagattagaagagcatgtgccccggaagtttattaaaaggattaaatgagaagattcatgtaaagtgcctagcacagtctctgacacttagtaagtgctcaataaatgagctttctaatggcttaagttggagggaaactcccgtcctctggcacacagcttttccaggaacccgggccgccagggaaggcaggggacagcctcagctggaagcagaagagtctctggcctgtgactaaggcacagcgagtcagaatccagccgctgggcagggccggcttgggccgatgcctggcctggcccccattcagggtgatgcgtttttaccgtaaggtctgggtaactccacagccggcactgggcctccctgtccctgggtggggcctgacactcacccatcaaccatgacagccgcttcgtaaaagaggcggggactctagagcagtgagggcccagtgagaaagggcagattcacgggtttcagcgtcatctgctaaatgccacccccattggtttaaccatgtgagaggtgttagtatagcacggcaggtctgggtgccaggctgagctccaggacaggagccaaagtcaattaataccagggatggggggtgggggtggctgaatagggagaggatgctgatgggcagtggcagtgaagggaggctgagctccctcccaaaaacaggagggaagaaaaggaaggtaggggagagaggagagagagggagacagacagatacacacacacacacacacacacacacacacacacacacacacacagctcctggagttcaaacattccaaactcaatgcagcaaatgggaggttctggtcacagggggctggtcttcaatgtgtcccataggccaggcactactgggtgggcccttcacctacatagtcttattgtaacaacagctgggacggcatagtgatctggtgtgtgggcaccagagtacaactacgaagttccacatatggaccagccccttccttgctgactaacatgggacaggttaattaacagctctgtgctccactctcctcacctgtaaaatgggaacaatagtatctcccctccccagccaaaggctacacatgaagatgaagtgtgttcagacatggaaaaggcttaaacaggccctggctcgcagtgagcctccgatgaaagtcggctatttctgatgcctcttaccacagcctgtgaggcagaaattctcaggcttctttttagagctgagaccaagggggttcagagagggtgagtgacttgctcatggtcactgtattgatccgccagggctgctacaacaaattttcacaggctgggttgctcagacaacagaggtttatttcctcacaattctgaaagccagaagtccaggatcaaggtgtggtcagagttgtttcttctgaggcctctctcctgggcttgtagatggccacctcctccctgtgtctacacgtggtcttcactcctcctttgtcatcttaatctcttcttctgataaggacacccaccagtctgaccatattggagccccgccacgtgagctcagttaactgtacctctctagagaccctatttccgaacacagtcacgttctgaggtatgggtgagtaggacttcaacctatggttttaagggggacagaattcatccagtcatagtcaccaagcttccctgaagctctactagtctggcatagagaaatcagagtgaaccaagatcaaaatctgagggcaaccttggctttccccttctacacagaattggatgacagctaggagatggatctatgaattttctcccctgagaaaccagacgggaccacctagagtcggtctccttcccccaaacgccctggacctaccatgggcacaagctggggctcagggaatacctctgtgctccaccactcagcagctgcttttcaagagaaggaaaacactactacacgccatccacagccaccgcacaatactgtatccctttgtcagggataataaaacagacgggaagtcactctggaacttactatggccttgggtcaaaggcaggctgaccggggctggcagaagaaagctaaaacttacttctctgggattctaggaatttcaacaaatgagaccaacagcagatagtttcagattaaagaaaggcaatgtgttcccaaactttgacccctgtgcacaggctctgcagaaaagctgtcactttgcactcagtttccttataggtaaaatggggataataatattgtctgtctgcctaatttgtacaaggctcttacaagagggtatagcacaaagtaagtgcttaataaatgtgagcttttctttgtattcctgtttcatagtatttgtaactatttcacaagattcagaaaccttgtccctggactgtgatcatcgccttttcttcagtcttccatt

SEQ ID NO: 11959 - DNA, 6000 bp, Homo sapiens
agcagggaaaactggaatccacaaagaaccatctggaacacgcatctgtctatcaccaaaagccatataggccttttcctatctctgagactctaccctcattgccgggtatactctaaacagaagctggcattctttctgcagagccacaccctctcctctactaggacttgtaaaatggaaggaagtgatctgcagggactggagctttgggccgagtccttacatcaagccagcaggtctgtggaaacgtgcatgagcttgccgcaaagtctaactttcggggaccttccaaaaatacacacagcttcagctccactttcatcttccaaatctcgcacaagttgcttttagggcctatcttaaccaggagcatgcaaaaaaggaattctgagaaatgtaggttcacttggccaagttaacatattacaaagccatcaagtgggaaaataaaagcttactgctgtatgccactaaggcttgaaggttgatttttactgtggcataactgttatgataaaattgctagcttccaactccttctagattagtagcctgtccaggctttggcccatatatctccttctggcccttgtgtgctatgtgtggcagagaacctagccagacttggatgataaaaaatcttattcacatattattaagtgcctactatgataatgatagaaaccgtaatagcaaactagaaaagcattctccttattctctgagatctcacagtgtagcaggaggaaccaacatggacagaaacttggctcattagttccaattgtgatgcatcctctgaaaggaaagcgcagacagctatgggatccataacctggtctgggagggtcagagaggctgctcagagaaaaagctctttcagaaagagatgggagatgaagaaaatagcacattccaagggcctgaggtggagcaaagctagagaagctgaaaggaagccagcatggttgaattctaaaaagacagatggggcctgttgagggaacaatgaggctgaaaaatagtcaagtccagaccctaccaggcctggcaggccatgaagaggattttgaacttcacaggagagaggagcaagggcaagcactgatgaatttaatcaggggagtgacataatcagatattctattggagaggtcattctgaccatggcttggggagtgtattggagagaggccaagtgactttggcatgttggcatggaagtccaggcaacaagtgcaatacacacacacacacacacacacacacaacctcccagttcatatttttcattatgtaatgtaccttattgatagctattattatatggcttatgcatactgatttgatgtagctggagccctagagcagatagtggagatggagacttagatgataagcctaagagctacatgaagaggaatcaagatttcaagtccgtgttcaaaagctacatggagaggagtcgcaatttctcccagttttctggcatgagtgattgggtggaagatattgccatctaatgggacacagtgttccagagcaggatgaggcttgggtaggaagagagatcatgagtacatgagggatttaaggaagcatgcagacatgtttgttcgttgtttgtagtgtgttaaaattaaatttgtcaagtccatcaatttatgtcagcatttcctaacatgagttctttagcattccgcctgtcaaagagtatcttagggactaacagttttggctttacgtgggagctgatatgaaacactgtctccaattccctcacttctgtaagatcctctgtgattcatttgcaacacatgaacgtttgcaacacatagctctggaactggggtcttgggagatattatgtgaccaaaagattctcaaggcaaataattttgacagatggtgagaccatgtttcctgtgtatagtagcaagtccgagtatcatttaaaagattctatagtgacctctattagagacctatgctttctagaactttttgtactgaaatttgccactcgtcttttccccatccacacgcatcacctccattaacagtggaggactgaatattctgtggaacatgcttttagaaacattgatttataacatgcagaataaaggttctgaaggcaagtctacctggatgtaattaatttatttgttaattccacaaacattaattgataacctactatatgggaagcactactcttgatacttgggctattaaaatgaagcaaaatgacaatattctctgctcttttaatgctcatgttctggctgaggagtacgtttcttattacaaggaatgaattgtgtgacatattccttggtaaaaagtgctaaggagaagaataaagcaggaagagactagggagtggtgtggagggcaattaattagtagcaaggcagtggagaaaagagctgagggaggggaggaagaaagccctgtgacccttagggtgagggaacactaacctcaaagatcttgaagtagacccgtgtctagtgtatgagaaacaagaagaagatgagtgggtctcaagagagaagattgagaggggaaccataggtttggaatttagttctggccattggcaattttgaaagatttatgcaaactctataaacctctgtcctgcatgtggataacaattgcacttattttctagggctacgtgaggttgaaacaagattacatatgtacagtgtttagtgcagtgcctggtttgtagaaaatgctgacacacgttggatatgatcattacacttataggttaagaaagcaaactcgagagccatctcatcagggtttgaatcctagctctacttactcatcacgtactggctatgtgaatttgggcaactctctaaactcagtttgctcttctgtaaaatgagaataataatacagcatctcccatggaattgatgtaacaattaatgtgttgatatgtggaaagaccttagaacagtgcctggtacatagtaagcactccttaaagttagcaattattatgatcattaataataaggttctaatatgtgccagatctttaaaaaaaaaaaaagtagaccaaagtctttctgatgtgagctcttcggaaaagtggatttgtgggcacaggaagagcagagggtctcgaataagtcagaaagattttcctccctcatctagaagagataagccaaggctggaagagggaggatgagggataagaaaaacaggaaaaggagaagaagagaactgtgaattccagtaaagagaataccagacagctgtgaagcagaatagctgtctgttaaatttaggcagatgtgaccaggagtagccttgagtaaatgtgactatattctacaggagtcactaaagcagcagagagtcagcaatgacagatggctcaggaagtgacctgtgttaggactatgcatctgctatgtgttgctgtgtaacaaattacctcaaaacgtggtggcttgaaataccatttgtcacttcccagtttgcgtgggccagggagctgggcagggctagcctgggttgtctgcttctgggtctttcccagttccaatcgagcattagatggggctgcagtcagctcaaggctcaactggagaaggatccacttccaagctcacacacttggtttttggctggattcctggctgttggatggagcatcagacccttactggcttttgagaccactcttgattccttgacacatgggcttctccaccatggcagcttgcttcatcaaagcaggcaagcaagaaagtaatagagtccaacaagatggaagcctcatcatggtagtggaaactcagcacctttgccttactttatttacaaggagcatgtcagcagcctcagtctacactcaagggatggagaatagacatgaagttccagagacagagaactttgaaattagatgggccctcctcctgacagttcctgctgcctagaacatgttctacagaagatcctgccatgtggcagaacctcagggggaaagggaaccccaggaaaggatgagattaacttttccgccagccggaccaactggtgcctcagaagagaacttgatttaagaaaacaaataaagaatacaccttgcacatctgtgctgaggactcgattatttctcatttcttttatttcatttaattcttcaagccatcatatgacatatatatttttatgtttataattgagaaaactgcaactcagaggggtaagtcacaaatctgaggtcacacagctaggatggtagacaggttgaatttctgtcttgtgaccccagaatccgcactctttccactatgcagtggtacctcaatgttgctggaatatatatttgaatgtacatttcttttatcacttacagtagtacagatgtgtatgaacccataaacaccatcaagtctttgagctctactataatgtaaatgtaaaatgccatctatagagttttttgtgaagtccaaccttcattagataaacctattgcctctatagaaattttcataagatcaagctcttgctatttaatagtattctgaatttaatagcatcagtgcattatcctcaataaatttaagtgatttggacaaagatcactactctgcactacttataactgaatgtggccatatgatgagcaagaaatgtcagttcgctgagtctttctcacgttctcgcagccaaaggtgacaagttagctcagaaaaccacccctccagtgaccagggtgtaaccagctggcctgacacatgggctgcacattccctgctgctggcccaggaaactctctgaaatcttcagcacactcctcagtgtgaatgccactgatgtgagcccaacaggaagtgtgacctcattctgcttctttgcctctggttacgcaggctgttttcaaaagaaaacaagagaagttgtaagactgactttcccaagaactatacactcatttataccaggaaacagacaagagaacaagaggctgccgaagacaaaacttctctgcaagcacctgtgcacagcaatgtgcgtgggcatctgtgagaagaaggtagggtgggattccctttattaagagacttctgcacctgttgacattcagacatttttcagccgaggaactgctcagtcctcaatttttccactgtcaaccacaggaagcttcgtatttcagtaataattttgtcctttgtcaattggaagaagaggctgggaactccctttggaaggaacacgtatgcacacattatttttcagaatagatgtgtcgctttgatggaactggcagattctgtttcttgaaaagttttagatctgtaactgaagggcttttttttttcctactgttactaattttctattgaatgtcagtgtactgcctgtagattcttctaagcacttgtgagatagagcaataagaccttcttttgctgcaggatttataggcttaaaattaagcttaatacttggggaacactaaaataaggtaatttgggctgggcatacccgtacaatattgatcaaaaatgaaaagaacaagtaacatactaatatattacattacactgggattattttatatcccaaacaaatgaaatttgtaaatgtgtgctttgatttagaaatcttccaaggaaggccagaaagttctcctgacatctttacaggtctctataaaccaggtttatattttcctaatagggtttatatataatttattgaaatattcaacttgaagctgtagaattagcctggtttgattgattgaattacagctacaaaaacaatccattactagttctcatgttacaaaatgtggccataagtggtgaatcagaaaataatttactcctaccttataaagcgattaggatagtgatactatatacaaagtttcatagtcaacagaagttggttctatttgatgaacagtaaatgatcaaagtttgcataatttacatactt

SEQ ID NO: 11960 - DNA, 6000 bp, Homo sapiens
ccatcccactccccacctcccctggcccaccccccaattccctccacaccccccaccttgccatctgctcctccgtcaggactcccctcgagccctttcaggccacccgcttccccttccattcctcctggggtctggcgctccatccctaggtcgccccctccccgtcgttccctcctcagcccttcctagcactacacacgcgcgcgcgcgcacacacacacacacacacacacacacatacacacacgcacacgcactttaccttcagtttgttccattctaaccccccggccgtgtcagtgcgatcacaggagagacacggaggcccggagtggggctggggtgcgggcagccgctggggccgcgcgaggaggaggcggaaccgagctaggccgcatgaaatccccgggctagattttccccgcgccggacgcctctgccatggcggccggcactgaggagggccacggccgggccgggccgggcgtgctgcgggaagaggaaggctcgggaggtgggatgggaaggggaggccgagggacgggggtcgccgcgccgccgctgctgccagagaggagcctgcggctggcagcccggcctgggtagcacggtcctcggcgctcggctcggaattcgcacgcctctccgcggcgacctgtgcacagccccctcggcctccgcctccgtgctggccgccgccgccgcctctcccgccgccgccgcgcacaaagcccccccaccccgactctcggggcgccgccgccgccaaatcctcagcccctcattggccgcgggccgcggcgcctgccgggaaatgcagtccctggttcgggacgctggggctccggaggaagcggcgagtcggcggggcggagggggcgggagcgcgaaccaggaacgcccgcggcagctagcgtctggacgactagggagaccgggcgagagggccgaggaacgagggacggggagggactgtacgtgggagagtgacacacaaaacaccccgggaagccggaggaggcgtggaaaggtggggcccgggaggtaaaactgggatcggcgcgttcagtgaggctgattaaagaacaacgcgcaaccagcgccatacggcgctcctcagggtgactcggctctctagctcttaagggttagaagcgaccctcgcacggtccccggtgggtcaccgcgcgagggcggggcagtccaggcgacccctcggccgtctcccgtcctacggctgtcagggaagggctccggttccggtagggtctgcatttggaaagccgggggcgatgcaagaccgccttggcgtcgtctccctctcagccccggctgagctgtcggatggtccccctcccccggttgcaagcagtaggagacccggccggcggcgccggctcgccgagggagcgcctcgacctccccggcaggcgccggccccgcgcgcctcttcctgctctgctgcggcccggaggcttgtgggtaaccgggaggacgacgtcagcgcccgccgcatccccgggtgccccccagccgcgggggaccgcgacggctccgtgaccgtcacgtgccggaggccgcggctgctcgcggccagaccttcgcatcgagggacgtgagggacatttgtcctagagggcccaagataagaacgagaggaagaaccgggaggcaactctccgtcatcctctagccccccgcatcctaggaaacgtatggaaaacaatggaaggttaagtgtgtgcacagtgatctggccctgcaggagtgtgccgaccaggtgatatttcctggggcctggtgataaggatttggaaggttacagcacagagacgtgaacgtaaaaaggaaacagaggcagcaagcaaatgaggaaaccgatactctgttctgagaataaagccattttaccgctagacgtcatactctgtagacgttatagtgctggatgtctttggtactattacaagaaattagatatctctatctttaaatatcacttaaggaaattaaatgatttctacagatcagttatttaaaagggcactaattatgaactattttttttaaacgtaacccggttaatactagatactgagaattatcagtattggctgggcgcagtggctcacgcctgtaatcccagcactttgggaggccgaggcaggcggatcacgaggtccggaaatcgagaccatcctggctaagacggtgaaaccccgtctctactaaaaatacaaaaaattagccgggcgtggtggggggcgcctgtagtcccagctactcaggaggctgaggcaggagaatggcgtgaacccgggaagcggagcttgcagtgagccgagatcgcgccactgcactccagcctgggcgacacagagaggctatgtctcaaaaaaaaaaaaaaaaatctcattactattaatcattaaatatttttaaacgtatgctttaagtagtaccacaagttacagctatcagtaaaagcatactttttatttgtgatatgacattttaaaacacagatggccaaagcgggccaccaagtctagcttaattctatctccaggaaagagggattaaattggtcttttttttttttctatgagcctttctacctccattcttctttttcttcctcctgtgtcttccttgctttgttgataaactgttgccttgacccggcacctgggtttctcccttgaggagaatctagtaaattgtccccagggatcttatattagcctgtttctaatagctatgctgacagcaagagtttaaaattggagttatgtgaagtagatgcatagtcttttcctgcaaaacattacaaaatacagttagtatacttgatctggtggcatatttaggaaaatggccattaaaaataatagtttacattttcagtatctaacatcttctgaggtttagacgatgcttactgttcgccatagaaaatgaacaaggagctcattaagacagcaatctaacacaattctcagggccagagtcatggaggaaaaaatatttttttaaaaatttctcttctgaagattacatacagaatcttacatgataaatctcttatcctgaaagtcaaagaaattgccaagtctcataactagggaagacggacattactttgaacagatatctcaataagaagagttcttagcccttccctttttaggataggattgctgacatatggccatggtagaaaacctagctcatctttcaaatactgggcatggaatcgttcatctggtttatgaatacttaatgatattcactgtgcctggttgtaagtgaatacaatgcatgaataagaatatttccccgtataaaatgtctcccagggaactgaaaatatttttgcatcctttaagatcttttccagaaaagtaccagtacatggtagtgcaatgattaatttatgaaattagtgtgaaaactacatctaccttctagagctcaaaatttgaccaccaggaattttcagtgagggaaaagtaaagagtccaaagctttgtagattttaatactggtaaacagaacgtgaagtgaaacctttatgtgcaaagttgaacatcagacatgcacaaagagacctctagtggccaaactgaaaagttttgcctatttaacagtggatctatttggttattagctgaaaaatcctttgtggattaaaagcagtctgcattttttactgacgtttaataccgccatcttccattcttaaaaatgtgtagcccagatgagtaaagtctgtggtcagctcacatgtcaggagacgtattctccgtgagaaagcgattccttgctgtatggtggtcgagtagagccactaagaaaaaaaaaatttttttttgaggtggaatctcgctcttgtcgcccaggctggagtgcagtggcgcgatctcgactcactgcaacccctgcctcccgggttcaagcgattctcctgcctcagcctccagagtagccggaactacaggcgcacgccaccatgcccggctaatttttgtatttttttttagtagagacagggtttcaccatgttggccaagatgttttctgtctcctgaccttgtgatccgcccgcctcggcctcccaaagtgctgggatcacaggcgtgagccaccgcgcccagcctaaataaaaaaaatttttaactctttcttctggagccagataaaatggatgggaaaagataactggggaatgagaatatttctagatgtttcattttcccaagatggctcagttggccatcctaggaactgaagtgccctcaaacctgcagtgtctgtcatttcacagctactataacatacattttatatgctgagatttctatacaaattattaatcacaaacaacacttgttaagggaccattgagaaagcaaatatttttagtagaatacagatttccatatgaagatttcacagtattccagcctctggagaggaagggagaggaatgcgctccttccgattcccgccctttctgcgacaccatcaaatcctctcagcgcccctctggcagttccggatttgcagggtccgagggagaatacatcaaagtgatgtcattcatgactccgaaatggttaccatggcgactatcagacatattaagctgtcagggaaagagcctgtttaatccagtcttcaatcacgggtttcctcgggcgttagccactgcctgcggagtgtggactggcagaaaaacgtcaccttcgggccccccagcaccaacgcgccttaaaccaagccccacaaagaagtcacttcggcgatgtaaacgcgactttgcggcttcctgggctgctaaggtgaaggacgcccgccctccccagaacttgagagcttattggttggcgatgtcgtcactcagagtgacgtcaggggcgaggaaagaggcggaaccgtagagacttggcttcgggcccttctagcttgggggtcccgggaaggagctgggaggacctaggcggccgttccgcggagcccggccgaggaggtaggggtgggcaggcccagccctcaggccgcgacctggtgggccgcgctgcctttttttcctccggatcccgctcggtccgcatcctgctcctctcatcagagcatgatccaggcttctgacagcttccagttcccaccgcgctctcctccacccacgacctcatccccgccagttccccagcacagcgcgaactctgaagctcggcctctcctcccccttccccgcacagcgcgctccgtccttttttccgtcccaggccctgcttctttctcctcggcttcatttccaacaaccccgatcatccacgagggtcgtcgttcccgtgcctgtcccacctccgcaccagaaaaccaaagcatatcccccagaccccgccgcatgcaggccgcgcacacatcaggcgcgccgaagccgccgggcgaggaagccgagggcgcgttttgctcccgtgtggtgatgggcaaagccgagggagcccgggagcagcgggcgtggggcggcgccaatgcgagtgcgagtggtgtccgccgcccgggagcgcccgggcccgagcggattaaccgccgcctcaggtgtcgtctcctgcccgcgaaacaccacccaccgttagtgtgggtccacaggtttcgagcccctgttgaaaatgtcagctctgtggctaaggtttctattcaggagagctcctggaactcttttcccaaccacaagagagcaaagctgccattgggaatgtcagctcttctgccgttcctcgcggcccttagcagaaaagcgcccctggatggagatgggttttggtgaaggttatttacaggttcaaagctcagtttgggctctggagaatcagtagcaagggaaacagttttacctccacttgagcgattagtaggttgcatgtctaccttcatccactgctacataaattagattagtgggtacgtccaatattcagggtttgggac

SEQ ID NO: 11961 - DNA, 6000 bp, Homo sapiens
ggcaggagaatcacttgaacctgggaggcagaggttgcagcaagctgaaaacgaaccactgcactctagcctgggcaacaagagcaagtctgtctcccccggccccttaaaaaagaatttcggttttctacactaaaagcaatgtggagtagaaatgctcacgctaaatggcacaaactccacagttatatgttacttaacagatctcagttccttaagagaaactcaatgggcacagtatttcacactagatacctcctttcagacaagactggacggccagtagatgcacgatacccccaactcatgaagtcgagcatagaatcacccaacaagttacccagaaggtaaacttctcgggtactgcagctagaagaagcgagagacctctccctgggctagggactgacttcaagaaaagaactaatctgagcggacacgaggaacaagcagaaaggaaaagcgacagggctaccatgctcctaactccaccctcccgcgctcagcccggagaaggcccagtctcgctggctgctgcccctccttccacctctttccaaacccaccgagcggcgccaggaaaggtcccgccgccctcttctcccctcccccaaactaggggctggggaggcccaaggaggttaacagcttccgttccttccccgcctagaagggaaggggtgggaagtgggattgcgagctcgtcccgtctcggcctccctcgccctccacccttacccggagctccgtttccgccccagcccgagactcactcgtcagtcccgcagccaccgcagccgggtccccgcgtactgccacagcccctatcccagggccgcccccccacccccagctgcctgctccggtgggttccggggcagtcgaaagaattacttccgctgggtcagagccgctttcggcgacgcgcgggagatccgtacctggtgaggcgaggacgcagagtgtgtcgctcacttccgtctggaggtagggcgtagcgccctactcttttcccctatagtaggccagcctatgaacgcaaccggcaaatttcgaccaatccgagtctagctcttctggattcccagcatgcagcgcagaccctgatccaattgctgtaaagacgcatccttagagaggctctcgggagtccgagagagcactgcattctgggatttgtagtttctctggtggataccgtcggcgttgggaccgaggcagccctgcatcctgggacttgtagtttctcgcactgcgtgttaagattttggtggttacagagactgtccgtacctctcatttagggttacgcctggaggtgggagactgctgaggaaagattgaaacgtgggagggcggtttctttgctaacgagatcgtactctttatgaagcagcatctgtccctggtgaaaagttgctgtgcgtgctgaagagccagcacagcaacgactagcgcaatcggctggcctcatttcctctcttcccggtagaattcaatgttaactgaaaactaaccacgtcccccactccacccgcgagggtcctgcctttgcctctgggttagctcagctgtcctggatccggagctcacgcacagaaaatccaggcgcctgccaaaccgttactcagtttttgggaacttctttctcattccacgccccgcttcccacccccccgcgtttcctatggtaagatatacaggcacctttccaggaaggctgaaacagctaaataaagttcaccttctactgttttccaggagtgtggcatgaagagaatgtatgtagggccaagacaacattacaaggtgctcaacgaggcactttgtgtgctcaaaaaatagataacaggctatctagagtttgttgaactgaggacttgccagaaaggctttttttttgtttaatttagttaatttggtagataaaagacattggttttttataattagttgcaataatcaaggagattgtcttggataaattttttaaagcctttacagaaatcagaacaaagattttttggctgtaatggtagctcgaagtagagtttggtggggaggacaggcatggaggtgcagatgaggaggctgtaggccccttttcttttctcttctcttttctttccttcttttttattgagagggtgtctcgctctgtctcccaggctggcgtgcagtggcgcaatctcggctcactgcagcctccacctcccaggcccaagcaattctcgtgcctcagccccctgagtagctgggattacgggtgtgctccaccacgccgggcgacttttttctgtgtttttagtgaagacggggtttcaccatgttggccaggctggtctcaaactcctgaccacaagtgatccgcccaccttggcctcccaaagtgctgggattacagccgtgagccactgcgcgcggcctaaaaacatccttaaaatcattctaaaatcccattagtttatatttaacaaatgtctctaacttactggaactggaaaatccatctaacataaataacaattctatgtaaatctatggtacagagttttcagactataatctgattttatctatttagaaattttgagaaatagatcaaacaaaagtttttattttcatttacttacagtatttgtagggggaacagctttacagaagataaaaaatttgagttctcttaatatagttaagaaaaacatttttatgtgaaaattttaaatatatcagcaaaataatagagtgaatattgattgtgagtgaattaccctaaacagaagagtttttaaaatgtaaataggccaggtgtggtagctcaggttctgtgacactttgggaggcccaggcgggaggatcccttgattccaggagctcaagaccagcctgggcaacaaaaggaaaccctgtatccactaaaaatacaaaaattagctgggcatggtgacgtggcctgtagtcccaggtacttgggaggctgaagtgagaggaacacttgagcctgggaggtcaaggctgcagtgagctatgatggtgccactgcactccagcctgggcgacagagcaagaccctgtctcaaaaacaaaataaaaggtgggcacagtggctcacccttgtaattccagcactttgggaggctgaggtgggcggatagcttgagcctcaggagtttgagaccaacctgggctatatggtgaaactccatctctactattaaaacaaatattaaaataaaaataaacaaaatgtaagtagaagctaactttttataaaataaagttatccatatagaggtattatcattatctccttctgaatactccccccaatagacagtatttggagttgccaacatgatcatattctattgatttatttttatttttatttttgagacagggtctagctgtgtcactcagtgcagtggtgcaatcagggctcactgcagcctcaacctcttgggctcaagtgatccttccacctcagcctcccaagtagctgggactacaggcaggtgccaccatgcccagctaatttaaaaattttttgtagagacagggtctcactttgttgcccaggctggtctcaaactcctggaatcaagtgatcctctcacctgggcctccacgtagtattggaattgcaggcgtgagctcccgcccctggccacacattattttagactatgaatttgttcctctccggtgcaaataacatgtcaaatcaaaaacatgtatagttctgcagtggtaaacaaaagtgtgtttctattactaagatgctcatccttcaagactgagctaaatgtgaagccagtctgaagacattctgaggcaaaattaatcatgttcttctttgtacttctgtggcatttgtttgttcttttttttgagacacggtgtcactttgtggtccaggctggagtgcagtagtgtggtcttggctcactgaagcctcgactttgggctcaagcaatcctaccatgtcagcctcctgggtagctgggaccacaggcacacacttaccatgtgtggcttatttttgttttaggttttttttttttttttttttttgtagagacggggtctccctgtattgctcaggctggtctcaaactcctggcctcaagagatcttcctgcctaaacctcccaaagcgctgggattacaggtgtaagccaccacggccagccacattttgtatattgcggtgtctcaattgtattacattatattctagccaattttcaggtattttcctccactgtttaagcactgtggattcccagtttaatctagtattttgtatcctctgctcctagctcagtcctggcaatagattcagtacctctttaacaagtaatgaatcaatgtgtatatggatgtgaatgatttccgaagacaaatctggtaacacctatcaatattacatgaacaattccatttattttcctccaacccgatgattcaattaagttatcactcatttttgttcaaatcgtatattctttcttctgtgccaacaggctagaatcattttccgcaaaggaaacagtttttagtgatgtcgtccacgagaaaaaaaaatatttaaccctggcttctgggcattgtcattctcgtacagccctctgcccctccacactgttataaagaaggtaaaattctaggaaggaggagccgctgagccaaggacagagcggcgggctcccagctcagctggcggataacgcgcgcggccgggaaggcggcaggcgggcggcaggcgggcggcaggcgggcggcaggcgggcggcaggcgggcggcaggcgggcggcaggcgggcggcagattctgcgcacgcgcaggcagcccagctgccagtcaggcgtcccgggctgggcatgcgccacttgtgcggcagtcgggtgggaagccgtgtctcgcagtcgtggactcgtgcagctggggcgtccgcagccgctcgtcacccgcgtgatgctgtttctggcgttgggcagcccgtgggcggtcgaactgcctctctgcggaaggaggactgcattgtgtgcggccgccgcgctccgaggtccccgggcctctgtctcccgggcgtcctccagcagcgggccttcggggccggtagccggctggagtacggggccttcgggagccgcgcgccttctccggcgtccgggtcgagcgcaggtagggcgtccgaggtctggtgtcccaagtgaggcggggagggcgggcgtcgtgtcgggcctggggagccccagcggctcttcgcgacctctcccaggtgtccgtggctggagcgcgggaggagccccctctgcggggcttgcagaagtagcaggccgagggccccggggtcctcagcctccgcgagtccaggagaacggctggaaagtgcttacttttatggtagttccaaatccagagggtttgtggtgacaactatatgtagttccttttctgcccttgagtagaagcttagaagtgttaatttgcaaaaaattggatgcagcacctggaaatagaaccgaaagagccaggttaacctgactttgagcttgttctacttttatgaggtggctgtacttttaagaattactttggtccctgggaaaagggggatgcagatgttaattcttttattttgatctgaataaattgtcttctaattctactctgtaaaatatcaggattggcaaacctggttaaaacttggaagaaatgcttaaaatggaaattggaatctaattacatttcagcattgaggaattaggcatgccttttacattttgaagtgtatacactgtgaaactcattttcagatgtatggggaacgcttctgttcccttgaaatttgatgtaggatttcaagtaaattttatttctttttttttggaggtgaagtctcgctctgtcaccctggttggagtgcagtgacgtgatcttggctcactgcaacctccgccttccgggttcaagcgattctcctgcctcagcct

SEQ ID NO: 11962 - DNA, 6000 bp, Homo sapiens
cccagctaatttttgtatttttagtagagacggggtttcaccgtttaggtcaggctggtctcgaactcctgacctcaggtgatccacctgctttggcctgccaaagtgctggattacaggcgtgagccaccgcgcctggccacccacttttgtatgtatgtaaatggcaaaaggtcccaagatttaggaggaaagccttttatacaaaacataactttgaagaaacagattatgcaacagagggaaactttaaaacaccactagtaatgtattctaggaaataagatattgcagcatggaagaattcaagaatgccataattaagctatagccagaaaacaaaagagagctcttagaaattaaatttataatagaagaaatgaaaagttcaattcaatgtttgacagatacgcgcaggaaaatcttccagaaagtagaaccaaacaaaacaaaatgaaaaatgaagcctgggcgcggtggctcacgcttgtaatccttgcactttggtaggccgagatgggtggatcaccagaggtcgggagtttgagaccagcctgaccaacatggagaaactccgactccactaaaaataacaaaattagccctgcgtggtggcacatgcctgtaatcccagctactcgggaggctgaggcaggagaatcacttgaacccaggaggtggaggttgcagtgagcagagatcgtgccattgcactccagcctgggcaacaagagcaaaaaaactccgacacacacacacacacacacacacacacacacacgccgggcgcggtggctcacgcctgtaatcctagcactttgggaggccgaggcgggcagatcacgaagtcagaagattgacaccatcctggctaatacggtgaaaccccgtctctactaaaaacacaaaaaattagccgggcgaggtggcgggctcctgtagtcccagctactccggaggctgaagcaggataatggcgtgaacccgggaggcggagcttgcagtgagcggagatcccgcctcccgccactgtactccagcctgggcgacagagcgagactccgtctcaaaaaaaaaaaaaaagaaaaaagaaaagaaaaatgaaaacataatctgagaaaattagaggaacagtccaggaagtctagtatctgaaaaatagggtgtccagaagaaaaaaaaaacggagagaaagtcttcaaaggaataattagtagaagagatcatttcccagtgttaaaggacatgagtttctttgctgaattgcaaagttacaacaggtgttccacacaaaagatgacaatgaaacatgcccagacacatcactgtaaaattaagaaaaatgagaaggtggggcacagagaggaacatcctgaagacttcaagaaagtaaaaaacaagttacacacaaaagattaacaaatcaaaagggcactaagtgtctggagattgggaatgaacacagggttcaccacacaaagtgccccagatgtaagatctgaacctcactaattcccctttctcaccacaacctccacttctgtttttcaccttctttgtaatattttaattcattaatctcatcttgaacttacttgcctttagcttttctttattcctgcccagaaaagcacatccagagattcaaaggcaacaataaaaagcagggcttaagagtgtgggctctgcattatccaaagcaaacttgtcacagagaaaacctcaaaatcagggttcagcctgagtggccatgtgggttctcagcttcatgcaggaaggaattcaagagcaatctgacagaataaagtgaaagcaagtttgttaagaaagtaaaggaataaagagtggctacttcataggcagagcaatggcaaggactgctagactgagtatatttatggttattccttgatcatatactaaacaaggggtggattattcatgagttttccaggaaaaaggtggggaattcctggaacggagcgtcctcccttgttagaccatgtagggtaacttctctaagtgggcatggcaaggggcaaactgtcaaggtgctggtgggagtgtcttttagcatgttaatccattgtaattagcatataatgagcagtgaggatggccagaggtcactttggtcaccatcttggttttagcaggtttcagtcctcttctttacctatcctgttttatcagccaggtctttatgatcttatcctgtgaaatcagtcctgccaacctcctatctcaaactaacacaggaaagaaataaaatactgtgtgttctcacttattagttggagctaacattgtgtacaggtggacacaaagaagggaacaatagatactgggtactacttgagggtggagggtgaaaggagagtatggatcaaaaaactacctattgggttctatgcttatcacatgggtaaggaaataatctgatccccaaacccccgagacactcaatttacctatataacaaacctgcacatgtacctctgaacctaaattaaagtttaaaacaacaacaacaacaacaaaaacccgaagaaaagtatgggctctggtgtcaaattaccagggttagaaccatgaattaagtgtgaccttagaaagtcacttatactttctaagccttggttatttcatctgtaaattaaaggtgatgataacagtcccaatttaggatcaaatgagatattgcaatgccggacacattaaaagtgtctccatgggactagcccaaactgagcctactctgttgataacaaaatgtcgtgttaccttttagatgtaacagagccaaaaactgaaagtcatgtagcccagtcatgtgcaatagaaaaagcctggacctctaacaacacccaaaaccagtgaatcctttccttggaaccaagaccgggacatgactggaacctgaacttggaactctttcaaaagtgttgggtccatttgcctggaggatcaggcctaaaatcggcctctacgtacctttttctaaatggtcaaatttcaagtcctccattctgcctgccaagacacattcctaaattcttcccttggctttccaagcccataagtttaccccagactctaaatcagggaaacagatttgaatgcactcctatctccttgctgaccagttgtgcaaataaagactttttttcctcaaaagcttgtgccacatagtattggcttctgtgcatgcattggatagagagctcatttgcttgataacaaaaacaagctattaatacctattatttctattattatccatacctctagctcccaccatgttaaatattcctataactttcatttctaccttaaaattttctttatccaataagttttcgcttagaagctatctaccacaggtatcttcctttaatatcacaaccgtctacccagccacccaaatcagaaacctggaagttatccttgattctgtttgtttacttcctatgtccaaataataaaattcttataattcttcttcctgaatagctcctttattcatcctcttctgcctctcccttcctccatggctccaatttagactctagatttctaccttagcctcgcaagtggtctctaactctaaacgtttccatatttttgtccaggatttttttttttttttatatagggtctctgacatccaggctggagtgcagtggcacgatcatagcttattgcagcctttgggctcattgacctcctgggcttaagtggttctcccgcctcagccttccaagcaaccgggaccataggcatgtgccacccacccagctaattaaaataaattttatttgtagaggtggagtctcactatgttgcccaggctggtcttgaattcctgggctcagacaatccttccactgtggcctcccaaaatgttaggattagaggtgtgagccacagcaccaggcttagattcctttattcacaaaaggtgtaaaggtgatctcattttatatacatgtcaactaaagaaaaaaatcaggcttttaaagactcaaagttagttttattcggagtcttactgaggaatgcaaccctggagagtctttcaaagagtttatgttatactggtccaaagcagctgttctgcccccagtttctacatcaagggatggagttctgcatgtgctcaaaagttacattaaacgtgctcagaagttacgttggagcaaaatctcatcaaagttttgtttggagactacatctggttatagattacagaggcataatcattaatcctgtcacacgttatcttacgtacaggaagaggcaagagctaggatcgctgactgtatctttttaaaaaatgaagtgattcaagcaacagatgtgaaaacttgtgctctatcctacttattgtcttcagggcattcttctggaggactgcgttcagtcactgagtcaggggctttgtgaaatttcgctggcaacagaatgagcaaacatggtttcttccgtttcgtactttgtctcgcatacatgatttcctatgctcaaacctggcaggaaagtttttttattttttcagtctttgagctatagtaatccttcactgggttttaagtcagtggggttttttgacatcaaattgttaaactacaagtcatgtttcctttaacgtgaaaattacctagtctgaataaattctgatgtaactataactcgacaaattatgatattttcaacttacgatgggtttattgcggggagggggcagccctatcgtaagtagaggaactctatacacgtttgaaaatatcgctgggctccagggttaaccggtctctaacccattctttactggacctgccaacttcgcgcagggttggtaacctagcaaccaagcaacacgagcagtgacttccggtacccggacttgggttgtccaatcagctcagcgaagccgccgcagaggctgatggggggctggaggctgtgaggcttccagcgtcggtaccatggcgacgcgcggtggggctggggtggcaatggcggtttggtccctcttatccgcccgggccgtgaccgcgttccttctgttgttcctccctcgcttcttacaggcccagaccttctctttccctttccagcagccggagaagtgcgacaacaaccagtactttgatatctccgccctctcgtgtgttccttgtggagctaaccagaggcaagatgcccgaggtaagacggtttgcggtgggccctggcaaaagtaacactcccgccttggtcggcccctagtccccgtaaatggagtttcaccatgttgatcaggctagtctcgaacttctgacctcaggtgatccacccgcctccgcctcccaaagtgctgggattacaggcgtgagccaccgcgcctggcccgaatacatgtatattgtttagtgacgtagaaatgtaaaatttccagcagcagttaagtagtttaatagtttagttatacttgcacttaaaatggtagcagcataataccagctgtgtgccagtgtaagacctctacgtataataactaattttgtactcatactaaccctgtgaggtaggtaccaattttttttctccattttattgtagaggaagccaaggcagagagtttagtaacttgttcaaggtcatgcaactgagtaggattactacgattggaactcaagaagtgtatttctggatttgaacccaggcagtactgcctccagaatcctgctgttaatcactatactgcttctcaagatcttcagacttattaaaagtttcactatctgggaactttatttttatttatcaaggataaaattggcttttttttttttttttttttttttaggaacttcatgtgtatgtctaccaggatttcagatgatctctaataatggaggacctgctattatttgtaaaaagtgcccagaaaacatggtgcgcataatttattttaaaataacttacctgtaaaaagtagtaagttaaatatcttta

SEQ ID NO: 11963 - DNA, 6000 bp, Homo sapiens
atgtaactaaccggcacattgtgcacatgtaccctaaaacttaaagtataatttaaaaaaattacaaaaaaaaaagaataattgtggaagttgcgaatcttacaacctctgggataacggctggtaatatttagaattccagcccctctcattctaacttggtggctggtggccttttattcatttcacaaggacagtttagctttgaggaggggctattatttaaattataaactaaattccttcctaaggctagttggggctatgcccagtaatggacaaggagagttcagagattagaggcaagatagagttagttagagctgatgtctttcacttgtcataatttccttagtcgccgggcgcagtggctcacgcctgtaatcccagcactttgggaggccgaggcgggcggatcacgaggtcaggagatcaagaccatcccggctaaaacggtgaaaccccgtctctactaaaaatacaaaaaattagccgggcgtagtggcgggcgcctgtagtcccagctacttgggaggctgaggcaggagaatggcgtgaacccgggaggcggagcttgcagtgagccgagatcccgccactgcactccagcctgggcgacagagcgagactccgtctcaaaaaaaaaaaaaaaaaaaaaaaaaaaaaaaaaaaaaaaaatttccttagtcataactttgcaaaggcagtttcatttgttcttttgaagccaattcccatactctcttgcacccaaacaaatacaactccaaagacattgacactaagctttatttaataacctttaactgcaatggcatttttctctctccttttttttttgttatccagttaggttccctctattctttattttcttatctagagaaatttggcaactgtctgtaagttcagatcttgaacagtaagatttctaaaatataaaattcccttgaatcaatgattgatttgcctaataaatatgaaattctggtggggagggaaaaaggaaaggtaactatgggagcttgctgggagtttaattgttgaaaaagtctcattcaagataccatttcctattctgatcacatgtctctattctttctcagagcacaaatgcttgtcctatattaaaagtggctgtgggccaggcgcagtggcacacacttgtaatcccagcactttgggaggccaaggcaggcagatcacccgaggtcaggggtttgagatcagcctggccaacatggtgaaatcccatctctactaaaaatacaaaaaattagttgggcgtgctgatgggcacctgtaatcccagctacttgggaggctgaggcaggagaatcgcttgaacccgggaggcggaggttgcagtgagccgagatggcgccactgcactccagcccagcgacagtgcgagacaccgtctcaaaaaaaatggctgattgtctgaaggtagtgagttatctcaattgattgttcatggtcagttacagatggaactccttgttctactgttttccctgttgtcactactgcacttgactagtatatacatatatatttttaaaaagtggctgtgggcataattaaattttaaatggaagagcccacagagaaaatgatctctaatgtgaaaggaaccagaatttttgttgttgttcttcattattcaacttgaagaaaccagaattttgtagtgaaaacacaaaacaaggctgggcaaggtggttcatgcctgtaatcccagcactttgggaggctaacgccagcgaatcacctgaggtcaggagtttgagaccagcctgaccaacatggagaaaccccgtctctactaaaaatacaaagttagccgggcgtggtggcgcatgcctgtaatcccaactactcaagaggctgagtcaggagaattgcttcaacccgggaggcggaggtcgtggtgagcccagatcgcgccattgcaactgcagcctgggcaacaagaccgaaattccatcaaaaaaaagaaagaagaaagaaaacacaaaacaaaaacggagctttttgtttggttttctgattaattccccaaataatgttacttatcatttctaattaagggcctacacttgacatggtagggatggctcttggttccaggataaagctacatagtaagaaagttgcagctttaaagactcgtaaaactaatcagttctgtaattgaatagttttaacagtatctttcttcctatttagcctcatcttaggaaatttagatcgaatcaatttttttttttactccatgtctgaaataaaactttcacccgtgctaataatctaacctatctcagattcttggctttgacagtagtccgtaggctaaccgcagacaacggtgcttctacacaaaacacgaattgggaggaaataaactcctccaaaacatagaactatctttcactatctctaacactgtgttgtgtcttgcagaggccttgtgtaactggttggatgactgtttctcttttttgttttgagaagtgtctcactgccgtcgcccaggctggagtgtagtggcacaatcacggatcactgcagactcgaactccccggctcaggtgattctcccgctgcagccagcccctggagtagctgggaccacaggcacgtgccaccaagcccggctaattttgtcttgtttttgttttttgggatggagtttcgctcttgttgcccaggctggagtgcaatggcgcgatctaggctcaccgcaacctctgcctcccaggttcaagccattcttctgcctcagccttcccagtagctggaattataggcatgcaccaccacgcccagttaattttatttgtatttttagtagagatggggtttctccatgttggtcaggctggtctcaaactcctgacctcaggtgatccccccgccttggcctcccaaagtgctggtgttactggtgggtctttgttcttagagctcccaagatggtggtgggccactcccaagatggtggcggctgctcccaggatggcagcaagcctttcgttctctgacctggggttcttggcctcacggatttcaaggaatgggaccttgggccatgcagtgagtgttatagctcttttagaagtcgtgggtcacggaagagaaccgtggaacccagcgactagtgttcagcttgattaggaccaacccgggcacttagccgcacaggaacaatggcgagcctctagcccaaacaggagcggcaatgggcacctcgctggatcagaaacgcaggggacaccctgccggatccagaggggtggaagtcaacggcgggtctgcaacagcggcgaacagcagtggtggacggtgagcgaaagctcagctccaggtggaagagtgtgcagctgcaagatttaatagagtgaaaacagctcccatacagtgggcggggacccaaagggggttgcccactcccggctggaatgcctggggtttatatcccaatcattgtccctccccctgtgctctcagatgatagatgatttgactatttctttacctcttgcttttagcttaattggtgttttagtgagccctttttactacctgattggtcaggtgtgagctgagttacaagccccatgtttaagggtgggtgcggtccccttccccaggtaggtttaggaattcttagtcgccccaggaaatccgctactcttgtctctcactgggattacaggcgtgagccaccgcgcccagccaattttggtattttttgtagagccagggtttcgccatgttgcccaggctgggactgaatctttagagctgcactcatgattaaaaacgctgtgccaggcgttgtggctcacgcctgtaatcccagcactttgggaggctgaggcgggcggatcacgaggtcagaagatcgagaccatcctggctaacacggtgaaaccccgtctctactgaaaatacaacaaattagccaggcgtggtggcgggcgcctgtagtcccagctactagggaggctgaggcaggagaatggcgtgaacccgggaggtggagcttgcagtgagccgagatcgcaccactgcactccagcctgggtgacagagcaagactctgtctcaaaaaaaaaaaaaaaaaaaaaaaaaaaaagctaccggaagcacagcgaggatgtccttgacacacatcctattttctgggaaaagattactaccacagtaattgagctgtgaagcggagacaaattgctctcggtggtggttcaaagtactgcaattgactggaatagcaccgcgcagttttccttcctctcgtgcaagataagagtgataggagctgtatcgattacctgcaagatagaagtagaagcgggccgggtgcggtggctcacgcctgtaatcccagcactttgggaggctgaggcgggtggatcattcgacgtcaggagttccagaccagcctgaccaacatggtgaaaccccgtctctactaaaaatacaacaaattagccgggtgtggtggcaagcgcctgtaatcccagctactcggttggttgggcaggagaatcgcttgaacccgggaggcggaggttgcagtgagccgagatcgcgccattgcactccagcctgggcgacaagagcgagactctgtctcaaaaaaaaaaaaaaaagaagtagaagggaagaaaatcgcaaggaactagactaaaagaatctcgacccttgaatggagttacacgaacggccagatgaaagaaggaaggcccggacctccactcagggccgactaggggactggcggagggtgcacgctgatggatttactcaccgggtgcttggagctccagcagctggctggagcccgcgatgacgtcacggactcgggtcacatggccaagtccgccccgccccctccccgtccccgccgctgcagcggtcgccttcggagcgaagggtaccgacccggcagaagctcggagctctcggggtatcgaggaggcaggcccgcgggcgcacgggcgagcgggccgggagccggagcggcggaggagccggcagcagcggcgcggcgggctccaggcgaggcggtcgacgctcctgaaaacttgcgcgcgcgctcgcgccactgcgcccggagcgatgaagatggtcgcgccctggacgcggttctactccaacagctgctgcttgtgctgccatgtccgcaccggcaccatcctgctcggcgtctggtatctggtgagcgcggcgcgcccggcccgggaccctgcgttgcttccgcgcccctagctgggcttctggcccggcctcgcggtggggtgaggcgtgcgctcatccgcctaaagttgtattattagaaacttaattctccgggtgccgcgtccgcacttcccccggctgggccagcgccgactgggggaggccaggagtttggggcgatgggggaggccaggggcgcggggcggagggccgcactcgacccttggcgcccaggtggtgtgggtcgccgatctccagcctccgcgcagccccgcggcctcgcgtagggcgcaccggggcagacaaactgagcttatctgccgagcacgtgtttcctttcttcttaaagcccgtgggctttgtgtttcgacggctgcggacggagcggtcgcggaggtgacggcgcatattttgcagctctgtggttagggttgcggatttgtcaatgctcgttctccctggccgcgtctccgctagggtggcctgcgctttcacgccgtcgcacgttcggatcccgagttgaagtggttgggagttcttggcatcctcttgtgaatgggtcccccccccgatgttttaaagcccttactccaggaagggatgtgagtgtgatttactgcgtttccatctgcccggggaagccattttccacccacatttttcctgcccgtggacagttggtcttcagaccttttcttgacagactcagcgggcaaatctggcattttttttcctggttggaacttt

SEQ ID NO: 11964 - DNA, 6000 bp, Homo sapiens
atgtacccctaaacttaaaataaaagttaaaaaaactaaaaaaaaaaaacttaaaaagaaagaatttacacttcaaaaatttttgaggatgatgtaaagaagttagtgctgagttttggttgctcttgtcatttggatgtttcatagtactaattaaacaatttgaattattacagaattttaggaattactgtttaagaaggagaagtcaggcacagtggcccacacctgtaatcctagcactttgggaggctgaggagggaggattgattgaggccaggagttcaagactagcctgggaaacatagtgagaccccctccatctctacaagaaaatcaaaaattattcaggcatgatggtgcacacctatagtcctagctacatgggaggctgaagtgagaggatcagttgaacccaggagttcggagttacacctgggtgacagagcaagattctgtctcaaaatatctatatctatactgatatagaaggggagaaaccattgctaatgatatagctaatcacatgaaaactaataatctactattttatttacttgagcattgctaaagaaaagttcatgggccaacattatacttaatatgtgatggttaaagattgttataattttagagttctccactgtttgaaaattaaattttgagctttacttgtggctagtgtatcaaaaagtataaatggaaaaaatttgtcatgttcttacccagagataatcaatattatcattttggtttgtattgttccagtgtgctctcagattttgaacatttaaaaacctgagatatactactaaatatttctcaaaatgttgtaccaatgtacactcctaccaataaacatggtatgagactgtgcgttttttgatcctctggtcaatattttgccaatttaataggcaaaatacattatcttattatttttatttgcattcttttgattacttttagattgaacttattcaagtgttgattagttttttagatattttctgtcacgaaattgcctttgcttccaaaagttccttaacacttcttctgttagaactcttattatcactgtcatttccagtgagactctaaagattctaatagaacataaatagagaaaccaattgccatcatctataccatttgtaatagttaatgtctctctgctggactcaatgtaaatatggagctgatcttgcttggaagttcttttgagtttatctaatttttctggaaaaggataatcataagccctacatcctatcagcactaacagatagaaggatagagacttggacaaagaaaatataaatatttgtcaaatgaataagcatgataaataaaagatacatgaacataattgttagaattcaggtaccagtaatttgattccttaaatagttcatactgagtttacttccaaacactgtatactttataatttataaaatgcattggtacacatgagattttaatacagtaatttccctatgaggtgatatagcttattttacatttggtaaaaccatagctcagatacataaagtaaatatgctgaggtaatacagctagtttgggttggagtcagtacttaaaaccaggctgcccgatgccaaataccatgttctttctgttctgacagaagtctccaatatttatgttacatgtgaacctgcactatattgaaaatttaaaacacacgttatctataaacattctttataatattcaggatatccataacaaattacagagtccattcaaagcacaatgtttttgattgcaaatattggttactcttgtatttatgacccttatagaagatgatgtggcaggctaaaaataaacaagcaaaaaaataaataaataaaataaacactgtagaaactgagaaccagatgaagtcctgtggcggtttcctatcctgtctatgtaagtgattgaaaaagaattaactttttgataacatgtaggcatccatttattcaacaaatgtttaatgaaccgcctaccctgtactaggcactatgctagatgaatgagacaagaatgcaggacttaacctcatggaattgagggtgaaagatattaaacattttttcaagtaaatatatggtcacatatatcaaatgttgtgaagaataagcacagggtataatgagaatgtataataggggacctaatttaggtcagacaaagtctttctaaaggagggacatttgaaaccttaaggatgagtaggggcaggtgaaagggtggtaatggagagggaaggtggaagagatcatttctgggatactgagggaactagaagaaagctgctcactagcatgggtgtagtatagtgagagctggaaaaataagtctctgaggaaggcagttgatgtatcgttgactctttcaaatgagtcatttttaagtctcattctagtgtttccattacttagaccacttcgatgctttttctatgacttagtcttcatatccaattttgaaatataaaagaaacctttttaacagtaaatgttgatttgcagtataatcaccttcttacttagtagacttgtttctaaaggggttctgattatttataaaaattaaatctatttaaaaggggaaaatttacattttttcccctcacagatagtatgagctgtgaaattgacttgaaaataagaaatttaaaaatgtttgtttacacttgtagaaattgacctttcaaaggtgtgaaaaatcaactcataatcagaggcttaaaaattaaagcacctcaggttgcttctgcttgaggtaaatggaagaagcccatttaaagttacttgcgagttaaaacatttgagatatttgctctaactaaaatacccttgattaggccactggcaggtagttttcctattcatctattgaaattggccattttacaataggtgtgcatttgtgtgtgtgtgtgcatgtgcacatgtatgcacatatgtaaaaaaatagaatcacagggaaggaacatagaaaatggagtccaaagcaaagacaaaagcaacaggaaaatcaaaatattttttctatcttttataaattgtgtgatgtttaattcaatacagcttcaggccaggcgcagtggctcacgcctgtaatcccagcactttgggaggccaagctgggtggatcacttgcggtcaggagtttgagaccagcctggccagtatggtgaaaccctgtctccactaaaaatacaaaattagctgggcgtggtggcacactcctgtaatcccagctactcaggaggctgaggcagaattgcttgaacctgggaggcagacgttgcagtgagcaccactacacttcagcctgggtgacaatgagtgagactctgtctccaaaaaaataaataattaattaatttaaaaataaataaataaagcatcagtttcttttcatccataaaatgatggtggcattagcacatacagtgttttctggatattaaaaaataaatttagaagtgctttataaactaaaaatactttatgatttttaggtatgtatgtgtgtttgacaaatagattggtgtatacctatgaaaatctgaaataataaataatagtgaaataataaaataaaataataaactgaaataaaatgggggcactcttagttgagaagaaacccataattgaacatcttattttaaaaaatggttgtttaaaaatttatattattacatgtttaatttgtgttgttcttttgtgacatgattatgccaaaaaagaattcatagcttttaaaaacttaatgtatttaaatgtctatttactgatagtgtatggaaagggataaaagggcaaagagttaaggtcaaaagggcaaaaagggctggatttattaaagaaatgtcaaaggttaagagctattaaaagtcaatgaaaatactaagcatctctgcaagtgagttaatatttaaaatttggtttacacactagttttagagatctgttatggaaagatggatgtacttgggtatagaataacctaaatgtttatcagaaacagaattattcactgagaatagatgatgatggggtggctttccaagaccataggagccttcaggaaacattttcttctacaaaatgctatgaccaccattattgaaataaattagtaataattgataaagtgtctctggccttgactgtagggtttttcccccacctggatttggagggaagttttaatttaatgtgtggtgtttaggtgaattttaattgaaaagctataatgtttttctaaaattatgtgaataaccatgtagtcactatgtatatagcctttagaaaggaccagattcaacattatccacttttctttaaaaataaataaatggagaaattttaaaataagaaattaaaacacctaagtacatgttttccaaatgtacttctcttagaaatatggcattttaaatgcagatgataaatgctctattgttgatcatatttttattgcttcatgacatcaaaagaagaatataccacttatttttagagtgttctggtcctttgcagcatcttgcacattgaagagatatatgctgttgctggagttgtttttcaggaaaagagaaaagggttggggaaatgcataatttctcttactcttacccagtagtagcattgagaagataccttgtccccatttttattacttctgatattttattgctggcagccagatgtgctaaaactcctgacgacagcatctattcattgcatgtttttaataggcttagagaaatatgagtagagtacatgaaagcagctcagcttcacacttcagctgggaatgcccaaaaagcttactgctgtttagaattcttgctacagtcaggagaaagccgaaagctgcacgggtactgaatcttctacgactgaattagaagaataatgactgtacaattaactatcaacctctgttcatttaagcacagtttttacagagctcaggagaaatatggaacttgattggcgtgtttttatttgatggtgtcagcaaatagatgattttaaagacaggtggtagggaaaaataagagaaggggaaaaaaaaagaaagaaaatgcaatttgagacattgcgccaggtctgcaattctgttttatctcattttcatggggttttttcatccccaccaaatatcttacaaaatgagctttttggacaaacactgaacaatgcaaggtgagtagagccaaactatattttcttttaatattgttattttcagaataatcttatatgccagtaaaaattgttttgtattgaagtgctagtgttataaaggtgttatctgtttactgtaaatataaaattttatatagcattcttaatttgattttaagaaggaaaataagcttacttcaaccagaaaaagcatcttaaatttaactagcttgacctctgaaacgtaatacagatatcaggctgtttcattattttgttttctagatacataaaatgacttaaaaatgcccgatagatgttttctttgtgatcatggcagtgattacattgcatatataaggatggggctatataatcatatgtgatttgtttgaaaatgtgaattagctcctgtaaaacatgtggaagatgttttctaggtttaagacatttctctatgctgggtagctcaataatcacttttaaacaagatatattgtggaaccgcgaataatgctttgcattaggtcagctaatttggcaggattctttgttataaattcctattgctttttcaacctgatcatttttctatggtgaaggctgttaaattatgaacatatctctcagatggtttctctggcttacactaaaagatattctattaaagaatgtttttggaatgcagttttatcatccagttctttcctcatttaagttgtttggcttttgagaatttctcatgttacatgcttagtaaaaaaaagaccccatt

SEQ ID NO: 11965 - DNA, 6000 bp, Homo sapiens
tctttatgatctttttaatgatcataaagatcattaaagaccttaagacactaagaccttaagtctttctttgctttctgaaggaataaaatcattataattctcagcacaagagagattttagggtgggtgccatggctcacacctgtaattccagcacttggtgaggctaaggcagtaggattgctggagctcagaagattgaaaccaccctgggcaacatagcaagacctcgtttctgctaaaaataaaaataaaaaaatcagccaggcatggtggcacagtgcctggagtctcagctacttgggaggctgagtgagaggatcgcttgagcccagtagagcaaggccgtagtgagctactattgtgcccctgcattccagcctgggtgacagagcaaggccctgtttccaaaaaaaaaaaaaaaaaaaagggatcctatattttatcctattatgtatgaatccttccctgttcattcattcattatgagaatgcatctagttgaatcagtgaacatttaatataatgtggggtgacaattattttcttttcttttactttttttgagacagtcttgctctgttgcccaggttggagtgcagtggcttgatctttgctcactgcaacctccgcctcacgggttaaagcaattctccctgcctcagcctcctgagtagctgggattacaagcgtgcgccaccatgcccggctaatttttgtatttttagtagagatggggttttgccatgttggccaggctggtctcaaactcctgacctcaggtggtctgcccgctcatcttcccaaagtgctgggattacaggtgtgaaccaccacacccggtctgacaattattttaatcttaatgctatttataaacttgcctcagatctttaatgagaagtttggttggtctgcatagtgttttttgttttttttctttgagacagagtcttgctctgttgcccaggctgcagtgcagtgacacaattttggctcactgcaacctccccctcctgagttgaagccattctcctgccccagcctcctgagtagctggattacaggcacgtgccaccatgccaggctgatttttgtatttttagtagaggcagggtttcaccacattggccaggctggtcttgaactcctgaccgcaagtgatccacctgcctctttctcccaaagtgctggtattacaggcgtgagccaccgtgcctgaccagtctgcgtagtttttaacatcaaatgcatcgctatatttcccattctcagggaataatgtatactaacatcagtcctcagaagttccagtatgggatttgattaaaatatttaattactaacaggattatttctttcatccataaacagttgtaatttgaaaagctgtataatattaagacttggaattagctgctcttgagtcaagcactctcactttattaaaatctcttaatgatgtttgctattttaaaaatttaattatagaattagcattatctaacttttaatttaaatagatttgatcatggtcttgccagttttggaagagctaagcgtagtttgattcacattctcctgagtgattctcttttttatagggttaatggaagattagatttctgattgctgatgggatatcatttctgaatcccattagaatcctatctctggaatctctgccctgccacttcttagatgtgtgactttgagcaagctattattctgtaagcccaagttttctcatttgtaaagtggggagaagaatacctgtttgtcaagattgttgtgagttttacttaagaatttgagccagagaagcttaatatcaagcttaagttaacctttagagtttttgttgattttaacaagtaaaaaagtttactgatttaagtataaatagtacactatgtagtttgtgaagatttttcttttgaagaattaaacaagaaatacttatgttgtaacttcatactcatgtttcttacagggtttagtttattactggatgtgttttgtgctctacatggaccaagagaaaaatgtgttgaaattctgaggagtggccacttgttagctatctcaccaggtggagttcgagaagccctaattagtgatgaaacttataacatcgtatggggtcatcgcagaggctttgctcaggttgcaattgatgcaaaagtggtgagttatataaaattaattattgaagtaaagcttagtcaaatttaaaataaatggttaagtaatgagccaaattgtataagaacttagacactttcgctgcaataccttaaaaattagtatgtaggccgagtgtggtagctcacgcctgtaatctcagcactttgggaggccgaggtggatgtatcatgaggtcaggagtttgagaccagcctggccaacatgatgaaaccccatctgtactaaaaatacaaaaattagccaggcatggtggtgcatgcctgtaatcccagctactcgggaggctgagggaggagaattgcttgaacccaggaggtagtggttgcagtgagctgagatcgcaccactgcactccagcctgggtgacagagtgagactgtctcagaaaaaaaaaaaaaaaagactggagaatttgaatgtcattttgttcttttactttgccttcggaaagtatttctcagccttttggtctccatattgtactttagcctatgaaacacttatctattacctatggaaagtttctgcttcgttttctgtttattttaattctgattgtcagaaaaagaaattacgtttgatagagtattgttctttttccaggccagttagagaatattgtcagtaacttagttttttagttgtatagaaaatgaattatggcacattttacttatttcccagtcttaagcactgacatagaaaacaaaaacctagactatatgaataatatagaatacaaaaggatatatgcagttatacaaaaattaagaataatcaatataatgtatatgaaaacaatgataaaaactaaaatcctaatcaaagatggttcaactttcaagtttatattttgaaagaattgttttttcaaaagtttaagataaagatgacaaaaatagatttaaaatcacataaatatgccatgggattccaattcctcatccttaagtttacattttcggcaacatattgcttggaagaaggactgaaagagataaatgatgcagagaaaataactctttctaatcctcgagtttccagataattaatttaaataaactagataatttaattgagatttttatataaaactttagaaagtttaagaaatacctttttataagtttaaaaacaaacagaaatcttataagtttgataaatattgtgccaccccaacatctcatagcacttttaaacactttatcttatactcctattcagtaaggaggtgatgcatataattattccaatgttgcagatgaggagactcaggcacagagagatggagggatggaagggatctggtcattcagcaaggcagcagtagagcagagcacacagttcagaactcgaggcaaccggtactgttgccattcctgactacattgcacagtgagtctgctgacgtctaagactgaaggggcttcccagatacgtgagggaagtctttcagtaatatatatgtgtatatatgtatagttgtaagtggcacaagtatcccctctggaaaatcccttaataggcctcacaaaattataagctgtgaacaaaatttaaggctattgttacaggattaaccacatttaaattgtaacatagtaatagaaattaaaggggaaaaagcctgattgtcaaggcaagttcacaaaatattggtagaaaatattaaggtttattcgaaagtgacagactttttgatataatacaaatcaccctggtttgtgaattcttgagacttacaactttggtaagaacttttagataacttcatgtctacataagttgaggagataactagtccatttactgtaattgtaaagtaaatagcagatataaaagaaaatattttgtttcaataaaattatatgaattatctcactttatccataaaaactttgagatagagataattattatttattcccatttgatgcatgaagaaagtgaggcttaaacatggtaagtaactttcacaatgtctcccacatttttagtgacagagttaagatgtcaagaccccagtaatagtttttaaaaatgtacattctcagctggacatgtgggttcatgcctgtcatcccagcactttcggaggccaaggcaggaggatcacttgaggccaggagttcgagaccagcctgggcaacatggtgaaacctcatctctgctaaaagtacaaaaattagctgggcatggtcttagctactcagatggctgaggttggaggatgactggagcctgggaggcagaggttgcagtgagccgagatcgcaccattgtgttccagcttgggcgacagtaaggctctgcttcaaaaaataaaaaaattatacatatatattctctctctctctctcccccccttcctccctcccctccctccctctctcccttgcacacatgcatgcacatacattacatacagacacacatttatatatgtaagcaattgaattctaggttgctgatgcaactccttcatgtacaaagtatgcatgaaagaaggaatgaaggctgaggtgggcagatcacttgaggttaggagatccagaccagcctggccaacatggtcaaactctgtctttaataaaaacacacaaaaaagttagtcgggtgtggtggcacatgcctgtaatcccagctacatgggaggctgaggcaggagagttgcttaaaaacccaggaggcggaggttacagtgagcctagatcatgccactgcactccagcctggacgacagagcaagactccaccttaaataagaggaattaataattatattgcaagatcaagttgggataaagtaatgcttgtggctttaaggatgaaagcttgcgtgccagtgtagaaaccatattcccagactatagtgaggaatactgagcctgctagggtaagctttcttttatttagtgggccctagaaatgtccagcttctagagaggtagctatttaaggaatgatatttcaacaggaaagtctttaaatgcatacatcaatacagaattctgggatcatgccagtcagtagatataaatccagccatactggttggaagtggcaaatggtatatgcatgagctgaaatatttctgtttcttcttggacattttaggttctcaactataaagacattttataactatttaaaacattaggatttcagccatactaatattttattttacaaaactagttttattttacaaaactagtagtgatttccagataacagtctgaattttttactgaagaattcagtgtctgagtattgtggaagctaccaaaataataataataataataattaaaggccaggtatggaggctcatgcctgtaatcccagcactttgggaggctgaggcaggaggatcccttgaaaccagttcaagactagcctgagcaacaaagcaagaacccatctctacaaaaacaagcaaataaactatatttacttatatgtataaataattcagtgtattttgtcttctttatcttcttgtgttttagctttatgagttaactccatcaaattttaatttcttcatttgactgctcttttttacttttaatttttttgagacagagtcttgctctgtcacccaggctggagtgcaatggcgtgatctctgctcattgcggcctccacctcccgggttcaggtgattctcctgcctcagcctcccgagtaggtgggttacagacgctggccaccacgcctggctgatttttgtatttttagtagagatggggttcaccatgttggccaggctggtcttgaactcct

SEQ ID NO: 11966 - DNA, 6000 bp, Homo sapiens
ctctcttctgtgccttaatgccctcttctctccagccttctttacctcaatctataaacacactggaatccttcagttagaatgtccccatcttcctcaccctgtattaccttctagctatcacctttttcttcctttccatccaaaattattaaaagtgctatctaaactcactctttcatagttacctttcattcactctcaaactggtgcaatttgtctgttcctgaaagtactttccctaaggccctagtggctacctttaaaagaaatatctaagggacactcattggtccttctctcatcttgggtctttatctaggtcagtagtgcccaatctttttcttttagaaataaaattaaatagagaattaaaggcttctggagccgtattacaaaataaaccaaattttaattttgagcctaggactctaaaatctcccttaattaacaattttaatgagagtcagagaaaggcaaaggtgcagcaggccaccaaacccagaagaaaaagggactccaactgcacttgacaaaccaccttaacattccatctttccatcttaacatcttaacattctctcttccttggacttctaatataacagtttctgcagatctcctcacactccctgagtttaaatttgaaatctgcttccaccactttctctgtgtggctatgggtgagttatatgaactcaagtgttagctgtactgagcttgtcagcctctgacctgcccctgctgtgtcagtgagagttcctgcaggcaacaaaagcaactgtaaatagcgtctaatcaaggaagtattaaaaaggatgacaaagcatcagaaaatcattactagagctgggaaagagttggaaacttggtaaataagaactttgttcacaaaattcaaccactgccaaaaccatagtgaaactcaaccgggaagagataaataccctgaccacttctcacctgtactaccctccaatattctgctggtgcctctcactggtcaagcctaactggaaatccagagcccagtggaggctgagtgacaccgtctctagaggtcaacctcctgagacacacagcaagccagcgaagggtagacactgaacctggatagacgacaccagagaacaaccagcacatgagcacactgcccaccatccctttccttcacttaaaaaatatttagtgtgacagggactattctagggaatcagagtacaggggttcacaagacaggaaagatactcactctcatggtatttcattctgcttatggaagacagaaagtaaaggaataaacaaggcaatttcaggtgatgataagtgctatgaagaaaataaggggtaccagtaacccgatgtagagagggcagtcctttagatgagggtaatcagggaagtcatctctgaggagatgacaggagagcttaaaacgaataagaatgaagaaaccaggctttctcagagccaagggcagagtgttcaaacaagaaagattggcaagggcagaatgcaaatgtcctgaggaggaaaccagcttgactcatccaagggagacacaggaggcctgggtggctggaacgtgtgagagggagggtggcaggaggtgaggtaggaatgtcaggcagaggctagatcataaagggctttgtaggccaggcagagagttgggtctttccctaacgcaatataagagttttaggctggttgtagtgggctggtagatatggattaagacacatctgatgtccaattgtaaaacataattttcacaattctgtgaaaaataaattgtagtgggacgagaatagaaatatcccactactgcttgcattgctgtaccagaggtcccatgcccaggaaagctaaatgatgtttcaggtaggagtgacactgtttagagcaggatgggcacctgacccaagagtagctcatttccaggttggctggcagcccatgaagctacttagagctaagagctctggaactggcttatattcttctgaaatgcagactaaaggataagaagtggattaattagccagttggtagtgtgagaatagattaaagaggtagagaagagcagagacacaatgagaaagaaataagagagtagcttatgcctgggctcctaatagctactcatatacccatataaacacttgttccttcttttcattagtctcttgagtttctctttcttacaagcaaaggagtctaacaagcacattggtgttcacaagttttcttccttaaacctcttcttctcaggcacattatccaggatgacaaagatctgctctggtaacaaaactcaaatctcaatggcttaaaacaaccaaggtttacttctcactttacatgtccttcatgatgtgactgggactctgttccgcatcatcttccctccaataccaaggctgatcgtgcatatgctctctggaacactgatgattgccatggcaaagagaaaaagagttctggaaggtcttgcatcaacaattaaatgctatgctcacacttaattcggagaacatgtcatgtagttcaaccccatcacagggaggccagggcatacaatcctcctatattcctgtaagagaacaggaaatatttggcacacctatcaccacgcactcattcataaacatggtcttaattgctgcccatataccaatgtcaaaatttctaggagagatgccccacttaattccctatctatattttcaaccatctactggaataccacgtttggatgttatcataggcacctcaagtctcatgcatcaagactgaaggctatctttcttacagacttgctgtagtcgctttcttggtcaatggccccattatctattactttaaataagaaatccaggtgttatccttgacctctccctctcttctgaaaacaaatcagttgcccagctcctctttaaacttatccccattcaactaacaccaggaccattatcctacttcactgatcctcacagcttcttgcctatgcaattttgtctggttttcctgccttcatttccccctacaaatggcaatcatttgtgtaagcaacaaacatttaaagagggctcattgctccttagattaaataagtaacgggcccatcttgaagaaactcaaagcttaaagagggagacagtgatgtaaacaaaaaattacaatacaacgggacaaatgtgataatggccatacagaaagtagcctgggaaaggaaaggaaataccaaattgagggtgatggtgaagggaaggtagtgcaggactgatatggtttggatttgtgtccctgcccaaatctcatgtcaaactgtatgtaatccccattgttggaggagaggcctggtgggaggtgattggatcatggaaatggagttctcatgaatggtttagcactatccctccttggtactgttttacggaagtaaaactttaggtaaatgctgtggcagcagtaagagctgctcctccgtgtgagtcacaaggcttggaaaagagagttgaaggatgtagcacttgcctggcacctagtagggactctacctgactcagcccaaccagggtggataggagggaatggcatggaggagcctgatcagccagcaagcaggagcctgatcagcaacgacctaaggtgtcctggtccgttatctggcaggcaactgggtggaaggtcatccactgagatatgaaacccagaaggaagagtcggtctatgggggatcacacttttaatgagggataccatcacatagttaacatttactgacgactgatttcaggcatagtgctaatcaccttactttactattttgtttaatcctcacaacactcttacgaagctaagttgtaccattatctccattttgcaatttaaaaagaaacaatgagattcagggactgattgtttgaccagttactaaacgtgatttgcaccagagcccaagttgatcatctatctaccaagctctgctgagtttgagctgcctgcagaattccacctggatgtgtccacaggccggaccacaagctgggaagtgtgggcagagacattcacttaggggtcacttcttatggggggcacggcaggatcaaagctgttgggcctggatgagatggctcaggaaactctgaaaaggaagacggcaagaggacctggggaacactaaccttaaacaggcggaaagaggaaaagaaaccagcgaatgagtttgagaagctgccctctgagaaagcgaactcttaaaaatgtccttcagtgaatctttttcaaatgcccctagaccaatgcctggcactcgataaaggacctctggagtcagaaggggcgttctgtcaagggggtggggggactttatgcctaatttttccagctcctaaaggaccaagccatatgaaacccacagggagacctcgatacctgggaggcaagtctgagacaagaatagggtcaaggaccatagccaaaccctcctcagaacacaagaactctttcccccattcgacagggcagcggcggatgtgagcgccactcacagctgcccgctctgataagaggttactgcggaaacgaccaggagggaacgggcgaggatccaagccgctcacggactggggtcgcctcggtccgagagggggagcgcgcgccctgacacgcaggcatgcgcgcgcctgtgggaagtcggggagcgcgcctgggcccctgcccgtcgcccggctctcccctcgttgcagcctcgctctccctagagctccttctcccctcccagtggtttccctccgcagctgtgggcctccgctggcccacgcggacgccccgcgacccccgcagcctggcgggcagcgcgtcacgggagcggaccagaacacagcccgctccgccccatcgcccgcggccccgccccctctggccgacaaggggcgggcaccaccggagtgggctccgtgggtgctggggcaggagtttcctcactccccgcctggccgtcgctcctccgctgactccgcgcccttctacgggccgtctcccaccctctgagcggacgcagggagtcgatgccgggcgaaccgggcgccatgaagggcagctgcctaacgggcgccgcggcggaggggctggccggctgagggcccgcgctgggccgaggcatgcggagcccgggcgggatcctgctccaggcgctgccccggctgctgcagcacgccgccctcccgggcctcgccgagctgccggcccgctgggccctgccgcggggtgcgggcggggacggcccggcggaccgccttccccgcgggggcggggcgagcgcggcggcggcagcagcggcggcctcgggcgccctgctcggcgcctatctggagcgccacggtccgcccgaggcttcggagctgccggagccgggcggggccttggcgggcggccccgggagtggcggcggcggcgtggtggtcggcgtggctgaggtgagaaactggcgctgctgctgcctcggcagcacctgttggtgccggagcctcgtgctggtctgcgtgttggccgccctgtgcttcgcttccctggccctggtccgccgctaccttcaccacctcctgctgtgggtggagagccttgactcgctgctgggggtcctgctcttcgtcgtgggcttcatcgtggtctctttcccctgcggctggggctacatcgtgctcaacgtggccgctggctacctgtacggcttcgtgctgggcatgggtctgatgatggtgggcgtcctcatcggcaccttcatcgcccatgtggtctgcaagcggctcctcaccgcctgggtggccgccaggatccagagcagcgagaagctgagcgcggttattcgcgtagtggagggaggaagcggcctgaaagtggtggcgctggccagactgacacccataccttttgggcttcagaatgcagtgttttcggtaagtggggtcccgctggcctatccctctccaagtc

SEQ ID NO: 11967 - DNA, 6000 bp, Homo sapiens
catacaatgtctggtcgactctttttgaggttaaccactatagatgttcaaactagattccttaattcattaagttgcaagatagtgatatttcaatttatactttcatttttatttgtaagctggattacttctataaagctaaatttctcttcatttactattacccagtggtataagtctataggaaaacaaagataaatgcttaatttttctatgtatttaataattttcaaagtaatgagttgttgactagcaatctccaatggtgagcagtcattttcagtctatcacaattattgtccttatcagtattcaatttgttccatctttggactgagttcatttgacaagattttaacttccttgcagttagaccctgtgtttcaagctcatcttgtaaatattctgtcatagacctggaattagccatttgtcctaggagccctggtttctaactcctttgtccttggtgctaactaatccattgtcttcttagtagacttcatgtacctcaagagaaatgcaagatttattaccaatatttctttaatgcaaagtgtaaggctactgtctagacaaaaaattggattcacttttgaagtggttgtaagtattcttttaaaagattacacctacaaatgctcagttgcccattaggcagttgcctgtgctgagaagtacaggttccaacataatgactggctttctgcaatccaagtagtttggtaggtgtttaggattaaaggataaaacttctttctcctctgaaatgcagaagagaacctcaagctcccaagagtgcagacagccaacaagaaagctgcaaagtctgttgatatagaatgattaaataatgagatggaagctaaaagaatttgttcatgagactttaaagcttcttattacttcttatcacccgcctgtgtattctgttaggtattggcctattcccatattcatagaatcaggaacatattcaagcaatttatgtattaaaatctgaattaaaatatggtagcatatatggctgaaactaaatcagataatctcaatatttttgtccttttaaagaatatctgggtaccagttattacagaagatacagttctccaaacttgtctgtatatataaataatatgtttagcttttacttgagtattagtgttggctttattacaaagtttatgaatataagaaatagaattttgggatactaaaatgtgaataataagtgagcacagaaactttgatttgttcacgtgttctaaaatattggagcagtgcctgacaaagaggaagtacaggagtcaaataccacttgaatggatgagctataatagtttttgtgcattattcttctctcctcaaaatcagtgaccttcaagttatatttagttggactaagttcacctgacatttaaaaagaaacacaactgtataattctgttatagtcattcattcattcatttagcaagctttgttagagggggcggggtaggggatgatagatactgtgctatatgttgggacacaaagacgaaaaagacaaacttcctgtcctcaagaggctatcagtttaatggaagagactcaaagacaaaagaaatacagcagtccatcttggggtagatgaacactgtagcatcgtggttaagagtaagactctggagtcaggctctttagatttgtgcctcagacctgccagtaccaccttgggcaaattacttaaatctctctttgacttaattcccttatctgtattatgctgtggaaacatgaacgaaccagttcctttgggaaatttgaagaaaaccgtccaaagaaacatttgaattaggttttaaattattgaagaaactaagatgttctttgtttccttatttcttcctttaggttgcagcttaaccattactttcctggagaactttgcttctctaatccccctcttcccccaactaatttaagtgccctgttgtgctcctgtttcactttatgttttgcctttttattactcaggttcacttactcaatttatttcttctttgctagtctgtaagctcctaggagggatgagggctgatatctgtctagtttatcaatattttccccagtcccaatatagtttctgatgtttattaaatgagtgtatcagttagacaagaaataaggaaagaaggacatcccaagcatagggaatagcatttagaaatacacagtgttatgaaaggtttagcctagagtagtatatagaaaggaagaatggaaggctggaaaggtaacttcaggacagattatgaactgtcaataaataaaattagtactgcaatgtaatttttagaaagcttctgtggtgatgtctgttttggtgaaaaccatgatttgggggctggtttggatcaaacttagtgatgagaaatttacttttttaaaaaaagaaactacattgaaatctattttagtgaaaagccttttcttttttcttagctagtttggattaatatatataatatattttttcagaaattccttcactgaagtccaaggagtttatcttttgtactgtcagtagaaccaaccgggtttttaagcagataaaaagcagctttgtttaggaagaccacgatgcagcagggtttcccagcctggacactgttgacattttaggcataattcgttgttgggggtataggggtgtcttgtgcattttaagatgtttgccagcatctctggcctctactcgtaggatgtcagtaacaaaatgtctctgaacattgccaagtaaccctttgggggcaaaatcacccctggtgttctgagaaccactgctgtgaactacatatacattagacacttaatccataagatacttcaggcagagaaaccttagtgactaggaggagactagtacctagtatctataatactagtacccataatccagatgaggtgaggtggtctgaattaatacagttgcagacaggattaggatgggggggggcggatttaagagatatttatgagaatcaacaatatttggtaaccacgtatctctggaagggagggaatctgaaatgaatcttaggcttaagttggctgcatgtaaagcaataccattaacctataaatatagagagagatttgtttctcagagtatggcccaaggattataggcctgtgggtctggaggaaaaagcaaatctgtacactagagttggagaactactgttatagattcctagacggatagaatgttaaaactgtagagaacctttgaggacatttgatctagatttttagatgatgaactagacccagagagatgaagtatagctaaaggctaacaggacaacctagtctagagtatgggccttctaattctgtttctttctttgtactgacactactctcatctgtgtagagagacagatgttccctttatagactccccaccttttctgggtttcttaagctgtgcattctgaatcttcttagagttcatttgtctatccctagaaattgtcttaaggagctatacaaatgtttgattttcactgagataccattatcagtagctagaatagcatgtttatgggtatatcagttgttctccagatggcacaaagaaaatagagtcatcctttggtatacgcagaggggattagttccaagatccctccctggtatacgaaaatccatgcatactcaagtcctgcagtcagcccatatgaaaaaccagctcttctatctatatgcaggttttgcatccttcaaatctgtattttcaatctgtgtttggttaaaaaaaaaagttcacatataaatgggctcacgcagttcaaacccatgttgttcaagggtcaactgtactgtcatcttcccctcccccataccttagagcaattgagtgagttatgtaattgagtgagttatgttttcattgaccaatgttggtcgttttttgtttgtttgtttattaagatggagtctcactctatcacccaggctggagtgcagtgacacgatctcagctcactgcaacctcggcctcccaggttcaagtgattctcctacctcagcctcccaagtacctgggattacaggcacccgccaccatgcccggctaatttttgtatttttggtaaagatggagtttgaccacgttggccaggctggtttcgaactcctgacctcaagtgatctacccgccttggcctcccaaagtgctgggattacaggagtgagccaccgcccccggacccagtgtgggtcttaacctataacaccgtgtgtaatattgttttttcataatacttagaaaatattaatttttaaaagatgatttggtaacacactggtatatggccaaatttgtatagactataaggaactatatattcaacttcctggccacaatgctgaaaaactctgtgtgtaactaattacatgtcttatttagatacttctcccattcctgatagaagtgataaaaacttaggaatccctctttacatactgtcatcagcttcctctttctttagtctggctttccgtatcatcagcaggaattcatttgggtatttttaatcttgaaggtaaagaacaagcacctttggagatgagtatgcatccagcggcaagcgctccactctcagtctttactaaggaatctacagcctccaaacacagtgaccaccatcaccaccatcaccatgagcacaagaaaaagaagaagaagcataaacataagcacaaacacaagcataagcatgacagtaaagaaaaggacaaggagcctttcactttctccagccctgccagtggcaggtctattcgttctccttccctttcagactgagaaggggacaaaaagacctttcctttcatgtccagaagaatgtatgtaactaaagctttgtcctctgtgaagaattataaaagggaggggggaaaggattcgcctctcctacagaaattctgaattcatttaagttctaagcatttgatttatgttatttatacagttgggatctaattaggaaaatgtgttttgtagttctggataaactatttcatccgctgtttcctccccaaaacacacacacagagcaaactccctttcataaaagccctcatatccactggcagtccccgttcgcatcatggtctccatgtgtaccgccaaagtcaattatgtttgaaagcctttggtggatgttatggggcaaagttatgatttacacagaagcaactgccaaatctgtggtgcaaccactatctccagtgaaatattgtataacaccatttggaactactgaaaagacagtggcttttctacagtactcttccttattgcaccatttttgtattaacgtagaaactaagcatcagaatttatgaacaaagaatatgttatttttccttttgctctaaaatactgagatttggggaagcaattcttttttaaaaaaattttgaataactatcttttgataacacattcggcggttacgatgttggaatttagcagaactatcaaatccaaaattattttcaaatcaagatgtttaaattataagtttttttgttttgttttccagtaagtataaatgaaaatattcatatgtaaaatatgttttgcttaatgtggacaatttacacacccaacacatactgtttccaaaattatttctatatgacacaaagtatgatacctttaaaaaggtgagcttatatattgtttattaacctggaaatagacaatttggctctcataccataagcatttaaaaacatatgaaatattttgatttctttatatggtggtgtgtttttatttctgaattttccatgtgctttaatatttgtttaagaatattttttatatctgttcaatttttatcattccccttatcattagaaagtttgacaaaaatacttgaatcttggacctctaaatatacttttagttgtgtttaacttgtttaataaataacttt

SEQ ID NO: 11968 - DNA, 6000 bp, Homo sapiens
ccggcctgggtagcacggtcctcggcgctcggctcggaattcgcacgcctctccgcggcgacctgtgcacagccccctcggcctccgcctccgtgctggccgccgccgccgcctctcccgccgccgccgcgcacaaagcccccccaccccgactctcggggcgccgccgccgccaaatcctcagcccctcattggccgcgggccgcggcgcctgccgggaaatgcagtccctggttcgggacgctggggctccggaggaagcggcgagtcggcggggcggagggggcgggagcgcgaaccaggaacgcccgcggcagctagcgtctggacgactagggagaccgggcgagagggccgaggaacgagggacggggagggactgtacgtgggagagtgacacacaaaacaccccgggaagccggaggaggcgtggaaaggtggggcccgggaggtaaaactgggatcggcgcgttcagtgaggctgattaaagaacaacgcgcaaccagcgccatacggcgctcctcagggtgactcggctctctagctcttaagggttagaagcgaccctcgcacggtccccggtgggtcaccgcgcgagggcggggcagtccaggcgacccctcggccgtctcccgtcctacggctgtcagggaagggctccggttccggtagggtctgcatttggaaagccgggggcgatgcaagaccgccttggcgtcgtctccctctcagccccggctgagctgtcggatggtccccctcccccggttgcaagcagtaggagacccggccggcggcgccggctcgccgagggagcgcctcgacctccccggcaggcgccggccccgcgcgcctcttcctgctctgctgcggcccggaggcttgtgggtaaccgggaggacgacgtcagcgcccgccgcatccccgggtgccccccagccgcgggggaccgcgacggctccgtgaccgtcacgtgccggaggccgcggctgctcgcggccagaccttcgcatcgagggacgtgagggacatttgtcctagagggcccaagataagaacgagaggaagaaccgggaggcaactctccgtcatcctctagccccccgcatcctaggaaacgtatggaaaacaatggaaggttaagtgtgtgcacagtgatctggccctgcaggagtgtgccgaccaggtgatatttcctggggcctggtgataaggatttggaaggttacagcacagagacgtgaacgtaaaaaggaaacagaggcagcaagcaaatgaggaaaccgatactctgttctgagaataaagccattttaccgctagacgtcatactctgtagacgttatagtgctggatgtctttggtactattacaagaaattagatatctctatctttaaatatcacttaaggaaattaaatgatttctacagatcagttatttaaaagggcactaattatgaactattttttttaaacgtaacccggttaatactagatactgagaattatcagtattggctgggcgcagtggctcacgcctgtaatcccagcactttgggaggccgaggcaggcggatcacgaggtccggaaatcgagaccatcctggctaagacggtgaaaccccgtctctactaaaaatacaaaaaattagccgggcgtggtggggggcgcctgtagtcccagctactcaggaggctgaggcaggagaatggcgtgaacccgggaagcggagcttgcagtgagccgagatcgcgccactgcactccagcctgggcgacacagagaggctatgtctcaaaaaaaaaaaaaaaaatctcattactattaatcattaaatatttttaaacgtatgctttaagtagtaccacaagttacagctatcagtaaaagcatactttttatttgtgatatgacattttaaaacacagatggccaaagcgggccaccaagtctagcttaattctatctccaggaaagagggattaaattggtcttttttttttttctatgagcctttctacctccattcttctttttcttcctcctgtgtcttccttgctttgttgataaactgttgccttgacccggcacctgggtttctcccttgaggagaatctagtaaattgtccccagggatcttatattagcctgtttctaatagctatgctgacagcaagagtttaaaattggagttatgtgaagtagatgcatagtcttttcctgcaaaacattacaaaatacagttagtatacttgatctggtggcatatttaggaaaatggccattaaaaataatagtttacattttcagtatctaacatcttctgaggtttagacgatgcttactgttcgccatagaaaatgaacaaggagctcattaagacagcaatctaacacaattctcagggccagagtcatggaggaaaaaatatttttttaaaaatttctcttctgaagattacatacagaatcttacatgataaatctcttatcctgaaagtcaaagaaattgccaagtctcataactagggaagacggacattactttgaacagatatctcaataagaagagttcttagcccttccctttttaggataggattgctgacatatggccatggtagaaaacctagctcatctttcaaatactgggcatggaatcgttcatctggtttatgaatacttaatgatattcactgtgcctggttgtaagtgaatacaatgcatgaataagaatatttccccgtataaaatgtctcccagggaactgaaaatatttttgcatcctttaagatcttttccagaaaagtaccagtacatggtagtgcaatgattaatttatgaaattagtgtgaaaactacatctaccttctagagctcaaaatttgaccaccaggaattttcagtgagggaaaagtaaagagtccaaagctttgtagattttaatactggtaaacagaacgtgaagtgaaacctttatgtgcaaagttgaacatcagacatgcacaaagagacctctagtggccaaactgaaaagttttgcctatttaacagtggatctatttggttattagctgaaaaatcctttgtggattaaaagcagtctgcattttttactgacgtttaataccgccatcttccattcttaaaaatgtgtagcccagatgagtaaagtctgtggtcagctcacatgtcaggagacgtattctccgtgagaaagcgattccttgctgtatggtggtcgagtagagccactaagaaaaaaaaaatttttttttgaggtggaatctcgctcttgtcgcccaggctggagtgcagtggcgcgatctcgactcactgcaacccctgcctcccgggttcaagcgattctcctgcctcagcctccagagtagccggaactacaggcgcacgccaccatgcccggctaatttttgtatttttttttagtagagacagggtttcaccatgttggccaagatgttttctgtctcctgaccttgtgatccgcccgcctcggcctcccaaagtgctgggatcacaggcgtgagccaccgcgcccagcctaaataaaaaaaatttttaactctttcttctggagccagataaaatggatgggaaaagataactggggaatgagaatatttctagatgtttcattttcccaagatggctcagttggccatcctaggaactgaagtgccctcaaacctgcagtgtctgtcatttcacagctactataacatacattttatatgctgagatttctatacaaattattaatcacaaacaacacttgttaagggaccattgagaaagcaaatatttttagtagaatacagatttccatatgaagatttcacagtattccagcctctggagaggaagggagaggaatgcgctccttccgattcccgccctttctgcgacaccatcaaatcctctcagcgcccctctggcagttccggatttgcagggtccgagggagaatacatcaaagtgatgtcattcatgactccgaaatggttaccatggcgactatcagacatattaagctgtcagggaaagagcctgtttaatccagtcttcaatcacgggtttcctcgggcgttagccactgcctgcggagtgtggactggcagaaaaacgtcaccttcgggccccccagcaccaacgcgccttaaaccaagccccacaaagaagtcacttcggcgatgtaaacgcgactttgcggcttcctgggctgctaaggtgaaggacgcccgccctccccagaacttgagagcttattggttggcgatgtcgtcactcagagtgacgtcaggggcgaggaaagaggcggaaccgtagagacttggcttcgggcccttctagcttgggggtcccgggaaggagctgggaggacctaggcggccgttccgcggagcccggccgaggaggtaggggtgggcaggcccagccctcaggccgcgacctggtgggccgcgctgcctttttttcctccggatcccgctcggtccgcatcctgctcctctcatcagagcatgatccaggcttctgacagcttccagttcccaccgcgctctcctccacccacgacctcatccccgccagttccccagcacagcgcgaactctgaagctcggcctctcctcccccttccccgcacagcgcgctccgtccttttttccgtcccaggccctgcttctttctcctcggcttcatttccaacaaccccgatcatccacgagggtcgtcgttcccgtgcctgtcccacctccgcaccagaaaaccaaagcatatcccccagaccccgccgcatgcaggccgcgcacacatcaggcgcgccgaagccgccgggcgaggaagccgagggcgcgttttgctcccgtgtggtgatgggcaaagccgagggagcccgggagcagcgggcgtggggcggcgccaatgcgagtgcgagtggtgtccgccgcccgggagcgcccgggcccgagcggattaaccgccgcctcaggtgtcgtctcctgcccgcgaaacaccacccaccgttagtgtgggtccacaggtttcgagcccctgttgaaaatgtcagctctgtggctaaggtttctattcaggagagctcctggaactcttttcccaaccacaagagagcaaagctgccattgggaatgtcagctcttctgccgttcctcgcggcccttagcagaaaagcgcccctggatggagatgggttttggtgaaggttatttacaggttcaaagctcagtttgggctctggagaatcagtagcaagggaaacagttttacctccacttgagcgattagtaggttgcatgtctaccttcatccactgctacataaattagattagtgggtacgtccaatattcagggtttgggacaacttgcctaaatatagaacaatgctaactgaaaagaaattcagaatattcactttctacctatattttaaggctacagatagatatgtattgctctacttttaagtacttggcaatcattgaagttgcattactagatactattgaccagaaatcaaaatgtctctgaagattgtaccatcttcatgagcatcatcatcttagagatcattaccgtttgttggaatctcaaagtaccattctcaagtccagagctacgaaaatatctgattgttggaaatgagcttgaaggaggttttgtaccttaactatgcaaatgttctacctttgcaatagttaaaaacactaaaatcctgatgtcttttaattgatgtatttttaaactactaaattgtttacttactccttttgcctaggtccctatgttaactacttgagacaaaaataaatatggccttctacagttataattcagttctggctattgctcgaacaaggtaagcattggagttaccccccaatatgaacgtaattcttcttcttcttcttttttttttttttttctgagatggagtcgcactctgtcgcccaggctg

SEQ ID NO: 11969 - DNA, 6000 bp, Homo sapiens
ttgttagaaatgcaaaaacctgaaaagacatctcaaaagacagatcttaggttctcaacgctgatgttacctttaagaataattgtgatttctctgcatttcttcactggccatcagagaaatgcaaatcaaaaccacaatgagataccatctcacaccagttagaatggtgatcattaaaaagtcaggaaacaataggtgctggagaggatgtggagaaataggaacacttttacactgttggtgggactgtaaactagttcaaccattgtggaagtcggtgtggcgattcctcagggatctagaactagaaataccatttgacccagccatcccattactgggtatatacccaaaggactataaatcatgctgctataaagacacatgcacacgtatgtttattgcggcactattcacgatagcaaagacttggaaccaacccaaatgtccaacaatgatagactggattaagaaaatgtggcacatatacaccatggaatactatgcagccataaaaaatgatgagttcatgtcctttgtagggacatggatgaaattggaaatcatcattctcagtaaactatcacaaggacaaaaaaccaaacactgcatgttctcactcataggtgggaattgaacaataagaacacatggacacaggaaggggaacatcacactctggggactgttgtggggtcgggggaggggggagggatagcattgggagatatacctaatgctaaatgatgagttaatgggtgcagcacaccagcatggcacatgtatacatatgtaactaaccggcacattgtgcacatgtaccctaaaacttaaagtataatttaaaaaaattacaaaaaaaaaagaataattgtggaagttgcgaatcttacaacctctgggataacggctggtaatatttagaattccagcccctctcattctaacttggtggctggtggccttttattcatttcacaaggacagtttagctttgaggaggggctattatttaaattataaactaaattccttcctaaggctagttggggctatgcccagtaatggacaaggagagttcagagattagaggcaagatagagttagttagagctgatgtctttcacttgtcataatttccttagtcgccgggcgcagtggctcacgcctgtaatcccagcactttgggaggccgaggcgggcggatcacgaggtcaggagatcaagaccatcccggctaaaacggtgaaaccccgtctctactaaaaatacaaaaaattagccgggcgtagtggcgggcgcctgtagtcccagctacttgggaggctgaggcaggagaatggcgtgaacccgggaggcggagcttgcagtgagccgagatcccgccactgcactccagcctgggcgacagagcgagactccgtctcaaaaaaaaaaaaaaaaaaaaaaaaaaaaaaaaaaaaaaaaatttccttagtcataactttgcaaaggcagtttcatttgttcttttgaagccaattcccatactctcttgcacccaaacaaatacaactccaaagacattgacactaagctttatttaataacctttaactgcaatggcatttttctctctccttttttttttgttatccagttaggttccctctattctttattttcttatctagagaaatttggcaactgtctgtaagttcagatcttgaacagtaagatttctaaaatataaaattcccttgaatcaatgattgatttgcctaataaatatgaaattctggtggggagggaaaaaggaaaggtaactatgggagcttgctgggagtttaattgttgaaaaagtctcattcaagataccatttcctattctgatcacatgtctctattctttctcagagcacaaatgcttgtcctatattaaaagtggctgtgggccaggcgcagtggcacacacttgtaatcccagcactttgggaggccaaggcaggcagatcacccgaggtcaggggtttgagatcagcctggccaacatggtgaaatcccatctctactaaaaatacaaaaaattagttgggcgtgctgatgggcacctgtaatcccagctacttgggaggctgaggcaggagaatcgcttgaacccgggaggcggaggttgcagtgagccgagatggcgccactgcactccagcccagcgacagtgcgagacaccgtctcaaaaaaaatggctgattgtctgaaggtagtgagttatctcaattgattgttcatggtcagttacagatggaactccttgttctactgttttccctgttgtcactactgcacttgactagtatatacatatatatttttaaaaagtggctgtgggcataattaaattttaaatggaagagcccacagagaaaatgatctctaatgtgaaaggaaccagaatttttgttgttgttcttcattattcaacttgaagaaaccagaattttgtagtgaaaacacaaaacaaggctgggcaaggtggttcatgcctgtaatcccagcactttgggaggctaacgccagcgaatcacctgaggtcaggagtttgagaccagcctgaccaacatggagaaaccccgtctctactaaaaatacaaagttagccgggcgtggtggcgcatgcctgtaatcccaactactcaagaggctgagtcaggagaattgcttcaacccgggaggcggaggtcgtggtgagcccagatcgcgccattgcaactgcagcctgggcaacaagaccgaaattccatcaaaaaaaagaaagaagaaagaaaacacaaaacaaaaacggagctttttgtttggttttctgattaattccccaaataatgttacttatcatttctaattaagggcctacacttgacatggtagggatggctcttggttccaggataaagctacatagtaagaaagttgcagctttaaagactcgtaaaactaatcagttctgtaattgaatagttttaacagtatctttcttcctatttagcctcatcttaggaaatttagatcgaatcaatttttttttttactccatgtctgaaataaaactttcacccgtgctaataatctaacctatctcagattcttggctttgacagtagtccgtaggctaaccgcagacaacggtgcttctacacaaaacacgaattgggaggaaataaactcctccaaaacatagaactatctttcactatctctaacactgtgttgtgtcttgcagaggccttgtgtaactggttggatgactgtttctcttttttgttttgagaagtgtctcactgccgtcgcccaggctggagtgtagtggcacaatcacggatcactgcagactcgaactccccggctcaggtgattctcccgctgcagccagcccctggagtagctgggaccacaggcacgtgccaccaagcccggctaattttgtcttgtttttgttttttgggatggagtttcgctcttgttgcccaggctggagtgcaatggcgcgatctaggctcaccgcaacctctgcctcccaggttcaagccattcttctgcctcagccttcccagtagctggaattataggcatgcaccaccacgcccagttaattttatttgtatttttagtagagatggggtttctccatgttggtcaggctggtctcaaactcctgacctcaggtgatccccccgccttggcctcccaaagtgctggtgttactggtgggtctttgttcttagagctcccaagatggtggtgggccactcccaagatggtggcggctgctcccaggatggcagcaagcctttcgttctctgacctggggttcttggcctcacggatttcaaggaatgggaccttgggccatgcagtgagtgttatagctcttttagaagtcgtgggtcacggaagagaaccgtggaacccagcgactagtgttcagcttgattaggaccaacccgggcacttagccgcacaggaacaatggcgagcctctagcccaaacaggagcggcaatgggcacctcgctggatcagaaacgcaggggacaccctgccggatccagaggggtggaagtcaacggcgggtctgcaacagcggcgaacagcagtggtggacggtgagcgaaagctcagctccaggtggaagagtgtgcagctgcaagatttaatagagtgaaaacagctcccatacagtgggcggggacccaaagggggttgcccactcccggctggaatgcctggggtttatatcccaatcattgtccctccccctgtgctctcagatgatagatgatttgactatttctttacctcttgcttttagcttaattggtgttttagtgagccctttttactacctgattggtcaggtgtgagctgagttacaagccccatgtttaagggtgggtgcggtccccttccccaggtaggtttaggaattcttagtcgccccaggaaatccgctactcttgtctctcactgggattacaggcgtgagccaccgcgcccagccaattttggtattttttgtagagccagggtttcgccatgttgcccaggctgggactgaatctttagagctgcactcatgattaaaaacgctgtgccaggcgttgtggctcacgcctgtaatcccagcactttgggaggctgaggcgggcggatcacgaggtcagaagatcgagaccatcctggctaacacggtgaaaccccgtctctactgaaaatacaacaaattagccaggcgtggtggcgggcgcctgtagtcccagctactagggaggctgaggcaggagaatggcgtgaacccgggaggtggagcttgcagtgagccgagatcgcaccactgcactccagcctgggtgacagagcaagactctgtctcaaaaaaaaaaaaaaaaaaaaaaaaaaaaagctaccggaagcacagcgaggatgtccttgacacacatcctattttctgggaaaagattactaccacagtaattgagctgtgaagcggagacaaattgctctcggtggtggttcaaagtactgcaattgactggaatagcaccgcgcagttttccttcctctcgtgcaagataagagtgataggagctgtatcgattacctgcaagatagaagtagaagcgggccgggtgcggtggctcacgcctgtaatcccagcactttgggaggctgaggcgggtggatcattcgacgtcaggagttccagaccagcctgaccaacatggtgaaaccccgtctctactaaaaatacaacaaattagccgggtgtggtggcaagcgcctgtaatcccagctactcggttggttgggcaggagaatcgcttgaacccgggaggcggaggttgcagtgagccgagatcgcgccattgcactccagcctgggcgacaagagcgagactctgtctcaaaaaaaaaaaaaaaagaagtagaagggaagaaaatcgcaaggaactagactaaaagaatctcgacccttgaatggagttacacgaacggccagatgaaagaaggaaggcccggacctccactcagggccgactaggggactggcggagggtgcacgctgatggatttactcaccgggtgcttggagctccagcagctggctggagcccgcgatgacgtcacggactcgggtcacatggccaagtccgccccgccccctccccgtccccgccgctgcagcggtcgccttcggagcgaagggtaccgacccggcagaagctcggagctctcggggtatcgaggaggcaggcccgcgggcgcacgggcgagcgggccgggagccggagcggcggaggagccggcagcagcggcgcggcgggctccaggcgaggcggtcgacgctcctgaaaacttgcgcgcgcgctcgcgccactgcgcccggagcgatgaagatggtcgcgccctggacgcggttctactccaacagctgctgcttgtgctgccatgtccgcaccggcac

SEQ ID NO: 11970 - DNA, 6000 bp, Homo sapiens
tgagccatcgcggccagcccaatgttctagaagaatttaggtgaagggtatttcagctgtaagttcctctcatttgaggggttcaaagacactgcataggcaaggcggtattatgtgactggttaattcctacagtgaccatcaaatgtttctttgaaacaatattccttggccaggcatggtggctcatgcctgtaattccagtacttagggaggccaaggcaggcggatcacttgaggtcaggagtttgagattatcctggccaatgtggtgaaaacccgactctactaaaaatacaaaaattagctgggcatggtggcctgtgcctgtaatcctagctacttagaaggctgaggcaggagaatcgcttgagcccagatggcgtaggttgtagtgagccgagattgcaccactgcactccagcctgggcaatgggagtggaaaaaaaaaaaagctgttttattttgaccagatgtactatctatttctttaataatatgtgctttatgatagtgtgtgctttgtaatagtatgtacttaactcagaggatgttgctttttattccagattccctagccattttgtccatcctacctgctcttcttattccccatcatgtgcatttcttcacttgccagattcccatttaaataagacatgtatgaagaactatgagagcaagaagtactcggatcctagtcagccaggcaatacagtacttcacccaggaactagactaatacaaaagctacacacatccacttgctggctgcaagaagttcctggcaaacctcagctggagcaagccacaaaacatccacaggtgacaagccctcaggccacaaaagaaactggcatggagattaaagaaggcaaacaatcttatagacaaaaaatcatggatgaactaaaatattattacaatggattctacttactttggattgacgccaaagttgctgccagaatggtttggaggctgttgcatggacaggtcctgaccagacgagagagacgaagggtaggcaagaatcatatttgagaaagaaaatgtgaaattaaaatgaactatttgggaactcaactatttaaattcaacgtaaacttcatcttaaaaatcccagagtaggaataataactgctggtgagaaccagtttcttgtctgcaaccgacttactgtacaactttagtcagtattctgaaatttgttatatattttcctgtataacggtttttaaaaaaaacttttattttaggttcaggggtacatgtgcatgtttgtagaatagttataattgtgttttttaatctttccaagaagttgaggggcttcatgtttcaactgttgttaatatattaagcatatgcatttttaaaacccaattttggctgggcacgatggcttatgcctgtaatcccagcactttgggaggctgaggcgggcggatcacttgaggtcaggagttcaagaccagactggccagcacgatgaaacccttgtctactaaaaaaaatacaaaaattagccgggcatggtggcacgtgcctgtagtcccagctacccaggaggctgaggcaggagaatggcttgaacttgggaggcggaggttgcagcgagccgagatcgtgccactgcactccagcctggagtgagatgccatctcaaaaaaacaaacaaacaaaaaaacaattttaagtaatacaatgctattaaagtatggaccctctaacatagatgaagtctaggagatgccaataatatttttattgtcatagatttccttcaagatagcccctaaaagttacttcagagctatggtaaacaggaaaaccctgcctcttcattttataaacagctgcagaaaacctgtcttgggtttttaacactttaagaaccaagctgagcatggcacatatgcctgtaatcccagctccttgggaggctgaggtggaaggattgcgtgagcccaggagtttgaggccagactgggcaacatagtgagacactatctcttgaaagaaagaaaatgaaacaagacagggtttttttggttttgtttttcatttttgtttttggcatgccctaaaataatgaatattgcatatgcatttaattctatagctgttgagaacttgtgttgatttcttccgcctggttccatttatggtgttcttaattgtacccttcatggaattcttattaccagtgtttctgaaactcttcccagagatgttgccatcaacttttgaaagtgaatccaaaaaggtatgattttttaactttaataaaatttaataaaccttattagaggagtttttaggtttacagaaaacttgggcagaaagtactacttctccccacccaaccccatcccaatttctcctgtaattaatatcttgcattagtgtgctatatttgtaatgattaaaaaaaccaatattgacatgttattattaaagctcatactttagggtccactcttcatgttgaagcatttctgtgggctttgcaaatgcataatttcatgtatccaccatcacagtatcatacaaaatagtttcactgctctaaaaattccctgtgggccaggcacagtggcttatgtctgtaattctagcactttgggaggttgaggcaggtggatcgcctgagcccaggagtttgagaccagcctgggtatcatagtgagaccccatttctacaaaaaatgcaaaaattagttgggcatggtagctcatgcctgtggtcccagctccttgggaggctgaagcaagaggatcacttgagcccaggaggtcaaggctgcaatgacctatgatagtgtcactgcactccagaggcactgggtgacagggggagaccctgtctcaaaaaaaaaaaaaaaaaaaaaattccctgtgctccacctatttgtccctcttctttcctcccccaacccatggcagccactgatctttttattgtctctgtagttttgccttttccagaatgtcatatagttgggatcatacagtgtgtagccattttagactggcttctttcacctagcaatatgcatttcaagttcttttcattgctcaattctttttatcactgagtgatagtccattgtatggctgtaccacagcttgtttatccattctcctatgaaaggacacctcgattgcttccagtttttgacaattatgaataaaactgctatagacacttatgtacaggtttttgtgtggatgtaagctttcaactcattggggtaaatgcctaggagagtaattggtggatcatatggtaagactatgtttagcttttaagaaattgctaaactgtcttccgaagtggctgtattgttctatattctcaccagcaacaaatgagagtaccagcatttgatgttgtcagtgctctagacattagccacgaaacaggtgtgtagtggtatctcactgttttaatttgcagtctcctgatgtcgagtatctttcctgtgcttatttaccatttgtgtatcttctctggggaggtgtctgtttagatctttggttgacttttttttttttgagaaggagtctggctctgtcacccaggctggagtgcagtggtgcaatttcagctcactgcaacctctgcttcccgggttcaagtgattctcctgcctcagcctcccgagtagctagaaatagaggtgtccaccactgcacctggctaatttttgtatttttagtagagatagggtttcaccatattggccaggctggtctcgatgtcctgacctccggtgatccacacacctcagcctcccaaagtgttgggattacaggcgtgagccactgcatccagcccttcggttgactttttaattgggtttttttgttttctgattattattctgagttctttgtatattttgggtaaaagtcctttatcagatatatattttgcaaacgttttcttctactctgtggcttatcttttcattccttaaccatgtctttcacagagcaaatgctttcaggattaatgacatccagcttatcaattttttctttcatgaatcatgcttttagtgttgtagctaaaaacttattgcccaactgaaggtcacctacatttttctcctgttttattctagaagttttacagttttgtgtcttagatttatgtctgtgatccattttatttttttatttatttatttttttttttttgagatggagcctcgctctgtcgcccaggctggagtgcaatggtgcgatctcggctccctgcaacctccacctcccaggttcaagcgagtctcctgcttcagcctcccaagtagctgggattacagacatgtgccactacacccagctaatttttgtatttttagtagagccaggattttgccatgttggccaggctggtctcgaactcctgacctcaggtgatctgcccacctcagtctcccaaagtgctgggataacagacgtgagccactgcgccaggccgagttaatttttatgaaaactgtaatgtcagtatatagattcatttctctcttttttgtatgtggatatctagcttttccaggaccatttgttgaaaagattttctcttctccactaaattctaacttgattttaactgtcaaaagaacaaagagaacaggctggatgcagtggctcatctctgtaatcccagcattttgggaggctgaggtgggaggattgtttaagcccacgagttcaagaccagccagagcaatatagtgagacccctgtctctaaaaaacaaaaattttaaacaaattagccaagtgtggtagcatgcacctgaattcccagctacttgggaggctgaagcgggaggattgcttgagcccaggaggttgaggctgcagtgaactgagatcaggccactgcactgcactccagcctgggcaagagtgagatcctgtttaaaaaaaaaaagaataaagaaaacagaaatccactgttaccgcggtgactagtggaacagtaggtatgatttagtcagcccaacagacagttcagcagcccctgagaagagggagccttcactgagtgtggcagtcactgtgccggtgagaaaacagaggcagctccttccttctccccgttctgtgccactctactagacagcgttgacagcatatggtaagaaagtgtgaacaaaacattatgagaagacaaaaagtgcaacttttttttttttttttgagacggagtctcgcaccatcacccgggctggagtgcagtggcacaatcttggctcactgcaacctccgcctcccggatgcaagcaattctccggcctcagcctcctgagtcgctgagattacaggcgcctgccaccacacccagctaattttaagggcaacttttaaatcagtaagattggaaactttttcacagaaaaggtaactttggaactgagacttaaagagtaagtggcattttaccatggtctgggaaaggtattctggataaaaggaatagcatttaacatggctcagtggcataagagagtatgatgtaatcagagaccactggttggttatttgtggttgaagtaggcagttccagggcatcaatgacaggaaacagacaaagtgatgtgttggggtcaggttggaaggcatccacccacttaaggaatttaggctttccctttcaccatggtgaataatggaaagggaacgtttgaagcagggtagctgggtggatgacatgattagatctatgttttggaggaataattttgctggcaggaggggcagcagagggtagagccaaggaagggaaaccagctggaatgctagcccaagagagagatgacagagaatacattatgaaattgacaataagaataaagacttgaaggccgggcgtggtggctcatgcctgtaatcccagcactttgggaggccgaggtgggtgggtcacttgaggtcaggagctcagtacgagcctggccaacatggtgaaaccccatct

SEQ ID NO: 11971 - DNA, 6000 bp, Homo sapiens
gaagacagtgagatgtcaaacaagattcttagggatgactttacaaccatcacaactctgggagaaattgccctacatgtgtacaaagtgactctaatctagaaagaaacataaatttacaaataaagtagcaagcaagaaaggatgaaatggaggaaggaagggaagcagaaagaaaaatgcatacattaaggggaattacaacacagttacagcactcctgctttattgtaaaggcatacctaagtagctccacttaattgaaaggcttgtcacctctggaacaaccttgtggatgctttcagcctccacaactctgagcagagaaattgccttcatttagcaggagcaatcttgaaggttggtgctcaccctcatgccccagcacccatgcacatatttttaccaggcttcaaacataaatgaaagaatggggcctattatagtattgctgcaaaacatctcaaaattatgcatttataattcctgaaggtaagctgatgtgcactgtactcagcttgatccagacaaatatgttttggcatgaggcagaataatgaaaaattggtattttgaaatttgtgaaggttttgaaatgcagagactccaaaatagttaaatattgacatcagccacaatatatcttccttcttcttatatgagattgaaaatcatacaaaaacatatatagtcgtttcccacagtaagtagctgacatgaagtgatagcttttgttctaaacttttttttttttagcaaattagctcggcatgggcacatgttagattgccacacagagggcatattgctcgctgagcaatttgccctacagaatagttgctatgctgccttgctttgggcacactgctaagctaaattcctgtctcctgtcatcattgacagtagaacagctggaaattaaagattgcaagatacattataatttcttccttaaacaatttttttagataacagcaagttatttttatttttatttttagatatggtctcactctgccacccaggtaaagtgcagtggcgcaatcccagctcaccgcagccttgacctcctgggctccagcaatcctcctgcctcagcctcctgagtagctgggacaacaggcatgtacaaccatggctgactaatttttatttttatatttatagagaaagacaggtcttgcccaggatgaagtgaagtggcatgattatagcttactgcagcctcaacctcccaggctcaagggatcctcccgcctcagcctctggagtagctgaaattataggtgcatgccatcatgccctgctaatttttgtatttttttttttttgtagagacaggttctccctatgtttcctggctggtgtcaaactcctgaactcaagcagtcctccctcctcaacttctcaaagcactgggattataggtgtgaaccaccatgcctgaccagcaaaagtattctgagaaaaccttcgaggggaaatatagcctatttttatcaatcctgccatgagaaccatgttaattttctcaattttttttccttatttgtatgtcattttaatcagagattcaagtatattttattcaaaattttaaacattttagactttcctttttcacttaaaaaaaacctcaagaaggacaggtttatgtgaactgatttttgtggcatataattgtgacatttatccatacgtaactaaaatactgaatttatgaagctggaaaagccacaacatcacagttataccctgcctggtttgacttcctagaaagtgaatgtaaaccactggcttgcaatcatgttgacggagtgtcacatggcatatgtcataaatttggggaccacagagctcctctcctggcatcttcctcctacggccaactttcagcataaatagtttgctccagtaagttgagagaaattgaacaggggcagaggctgggagaaggggtaccacttgtacaaattgtgggaaatcactactcaactttttataacattaagacactttgtaagggcttttagaatattcaagcagcaggttatcgagctatttgcttggggctttttttggtactaaaatatttaaatgatataacactatttcgctgaccaatagataatctgaggaaatttaactgcttttaaatagagatgtaagattagtaaatgaaaaggtgttacactttatatatctgattctagtagatcattcgtgtgaacacatccctacttatgctcagatataattctctacctgatgatatcttactcttcctttttaaagtaaaacttttatatttaaagattcatagttaattttcattttatttctcattttactagtttctctgttttaatgaaatgctcatttttcctcctgaaaaccaaattattactaacttcaaggccactttaaaaatattaatttaattgagaattacaatttggcacagtgttagaatataatacatactgaatataatttaggctttcttggcttaaaaaaacaaaaccaggccagatatactagtattactgtgctcacacctgtaaccccagcacttcaggaggctgaggttggaggatcacttgagcccaggaattcaaaaccagactgtgcaacatagggataaatttaaaaatttaaaaattagtagagtgtggtggcacacacctgtaataccagctacttgggaagctgaggcaggaggatcctttgagcccggaaggttgaggctacagtgagctatgacagtgacactgcactccagcctcagcaagaccctgtctctaaaaacacaaaaccaaaaaccaattcagagttttgtagtgtctcatcctcaccaccatattcattcattcactcattgattcatttcagctctattttttgagtttactacatgccgggcacagaacaaggtgcaagaaattttaaaacaaacagatgcataagacatagaccttgccctccacgaacttggatcaaataatattgaatgggtagatcaaagaaccactcactaaagctttctagttgacagcatgccaggtatcaaagagttcacagtgcctgcctttaacttaaagcatgacaggttttctgctggtcttttagtcagttcttagtttatattccagtgcccataattatgtcaatttgaattgatttcttcagtacaatttcatgtaactatatgaataatttataaaattaaatatataaagtgtaataccttatcatctattaatcacactgatctgttgaaaggcagttattttgtttcttagttttattttagtatgaatgtttttatcggtcacaaaaatagtgtcatatcatatacacattttgcttgctctgaaacatgttcagtatctctaagagtgcattagtttagattatcagttgtaatggatggaatgactagtctacctcccaaacttgttacttcccagtagaaggtattaggtcatctctcttttggcccagaggcataaattaccccactatgaagagaagagttttgctgtttacttagcatctaatttttattctctgctcagatttatttcatgaataatatacctgaaagagctaagggaaatgaagacagtgatccagataattttggaaaatccagttccattcacattccatcctctgattgtgccttaggcctgttgcttggaagagcaaatgagtcgtggacccagactcaggctggggagcaggcagtcctagggccatagtggcacacaaagcccctagcaccaaaggcatcaccaggcatgggcagtgcagccagtggggagggtatggggtttgcatcatcttttctacttcccacatcttctcccttgcgttctgtctgaattaaagacaccacccaggtgctaaaaactagacttagtgtgcaagcaaagaagacagtatcaggattgacgttgaaatttaggctggataaggaggaaagtgaggatttgatttgggtgaagcacggtgaaaaagtaatagaaacaattggtcatggatctgatgggtggaataattgttgccattgaggcagtaaaaggaatggagtgaaagtggctaagaaggtagaggaatggggcagggaacaggatgtgaggagttcagggaggggagttagtttaagcttcaaattctagtgtggccaccgaagggaggggctgggtggggtgacaggcagtctttaaaggagggcaccactaaattctcaggagtcaccactaaagaactcatccatgaaaccaaaaaccacctgtaccccaaaaactattgaaatgttttaaaaatgcagattaaaaaaaataaaggggagcactgcaggtactgagagcccagagtgagtgattcttagagagatggttggaatggagatggaaataacaagacctcatgcttagtgcaaggatgccttccagaaacaggagtgctaactgaattccagctttgggagggtatttagtattgcctagtttctagaagatgcatttctgtcatcgcctatcacctaccttccgcacatgttaatgtacaagtaggagtttagtggctgagatctctgtttatgtatgtcctttagaactgtcctagtggagtgagtggccctcacttcagcagcctggacatttgaacactccacccatttgggaggtggggcacttggcaaatgatgatccacgctgccttttgaactgcccttgagctagggatggtttgtacatcttcaagtggatggaaacaactcaaaagaagagtaacactttgtaagcaatgaatattacatgaaattcacatttgcgtgcttaaataacgttttactgcaacacagaccacccattgtttcacattgtctgtggctgctttcctactacaaagacagaattgagtagttaggacggggatcacgtatttcacaaaggctaaaatattcacgatctggctttttgcagaaaaagtttgctcttccacaggaggcctgcacaccgccgcttgtgctgctgccttatctcttgtgatccctgagaaattccagcatattttgcgagtactcaacaccaacatccatgttggcagaaaatagcctttgccatcactgccattgagggtgtgggtcgaagatatgctcatgtggtattgagaaagcagacactaacctcaccaagagcacaggactctctgaggatgaggtggaacatatgattgccactaagcagaatccatgcattcaagatccccaactggttcttgaacaggcagaaggatggaaaggctggaaactatagccaggtcctggcgaatgatctggataacaagctccgtgaagacctggagcaactgaagaagattccagcctgtagagggctgcaccacttctggggtcttcgtgtctgaagccagcacattaagaccactggccactgtggccatactatggctgtgtccaagaagcactaagtctgtggccttgtctgctaatacatagtttatataccaaaagaaaaaggaaaagagaaagtttgctgctccctgctctaaacattaaataaccattcatttgtatatcctctggaaaacaaactatctgctgtatgctaaggatcctcatcaaaaaataagatgttaatcacaggagaggccattgtgcagccaagaaaagagatcgagatcggagctgagggaagactggattggcggagagtgtcggggaccctgtgctggctctattgctgctgtgggacaagagtgtgctgcccaggaccacttggcacagatctggggtggattgaacccaattttaccctggtaccccacttttgtagccagttactcgttcctttgagtctccgcttattattccatgaagtgggatagtgattccctcactgggtggtgacatgtgacaacctttacagaaggccttgtgtggagtcagccttcggtcatgttctcttccttccc

SEQ ID NO: 11972 - DNA, 6000 bp, Homo sapiens
aaaaaaaaaagctgggtgtggtggcacacacctgtattcctgactattagggaggtcagggctgcagtgagctgtaattgtgccactgcactctccagcctgagtgacagagtaaggtcatgtcacacacacacacaaaaattaactttttaagagacacagtattgctatgttgcccacgctggtctacaactcctaggctcaagtgatcttcccgcctcagcttcccaagtagctggaactacaagcatgtgccactgtgcccagtctatttctgtttttaggccattgtgaatttctattagcaatatttttttctcaatgtagagatcatgtgacatctttcattaaatttattcctgaattttgatttttaaaatgcttttgtaaatggcattttaaaattttcattttccagttgtttcatgctaacatacagaagaaatacaattgaccttgtaccttgtgatcctacattcattttagtagttcatggattcttttgaattttgtacgtacactatatcatcattagtgaataagtttggtttcacctccttccaattcattttcttgtcttattgcactgataaaatttgcagagatgccaaataacttgcccaagttcacccagttagtaagagccaagattgaaactcatgtcaatctcactcagaataccctggaatgagtgtgggtgtattaatatttgtttttgcttgagaaataagggaggtatgaatagagggggagaaataagggaggtatgaatagagggggtatatcaaagaggttcttaatctaagatgaaggatttgaattgtattccatagttaatgaaggatcattaagtgttttcaagtgggaaagtaacaaaataagactgaggggatcaatcctgtgacagtgtacagtatgacttgaagggagcccattcattcatttattcattcttttcatgatcatttattgagtatgcattatgttctaggagacagagtcttgctctgtcaccaggctgtagtgcagtggtgcgatcttggctcactgcaacctccgcctcccggttcaaacaattctcctgcctcagcctcccaagtagctgggactacaggagcgcgccaccacacccagctaatttttttttttttttgtatttttagtacagacggggtttcaccatgttggccaggatggtctcaatctcttaacctcgtgatctgcctgcctcggcctcccaaagtgctgtgattacaggcgtgagccactgcgcccagccaatgtgtttctcagagtagtagaaatacaagtgatgaagagtagaatcctaacacaatcttagatatgcagcgaaggcagttctatgactttgcattaatttacttgaagtctctgaagctcagctttattgtacataaaatgagaataatatacatacaatgactacttcagtaaggaaaaaatttatgtaatatgcttgacttatattagacatttgtttattgtagttatactatttaagggatttagaagagagcaaacaataagaatgaaacatttcatcacagtcgttcaataatcaaattgacaaacaaatgttttaactgacgcccccaccctatgattacattttaatagaatgaactatagatttttgctttggcaatttaggaatgcaccaaaacagagataactgtgctacatattagctgacataataatattcccttacatctgtataaagagcttgatagttaacaaagtacatttatttacaccattttgagtcttgcaacaattacacagatgaggaaattgcgatatttagtgacttgtttgaggtcacacagtaacttacagagaccacttcacatcatatttatttgcttatattctatagctcttttttaccatactgttacctctaatctcatgatgtatgctagtagtattaactcaaaaatagtatagaatctcccacttttatgcagtttacttatgaaaaaagtgagtactttgaaaactgtggaagaaaaggcagacaaaaatagaaattcttgtcttgtagcagtcatattgttctgattattcctaggttatattgttaaatatataatttgtcattttctttacttttccatgctgcatttatgattctgctgacatttttggtgtttccttgcctcatccattcacggtatgttatttctacttccactaaatttcaataatttccttcccctttatgatctgcacccacatattttttccttgttgttctctcttggtaatatacctagttcctatatctttgccttcttttttctttccttcttcttcctttcttaatttgtgtcattgagccaacttatttaccgcctcctctaccttttcattttacattatcatagtgatgattcactaaaaattatggctagttttaataaacaattgttctgaggtctcatgggaatcaaagttctttctaagtatggaagatgttttttataaacatgttttatgagcaagggattggaagatgaggtggggaagaggacatgaggatcggaatagatactattatttatatttcacaaattcaatgaaacaacaaacatcatacattccttgttaggtgctatagcatgtacaaacaagaacaagactaggtcttgggctctgttgcacttacaatctagtgaaagagaaagacaaacatataaacaactctagtgcaagacagactactgttacagcaagagcctgaagttcagagggcacccagagattgtaccagagcgcgtttaagtcacacaattcaattcaagctcaggcaattgagtagcacttgggcatggaactcatctactatgctgtcagacgtttttgtttatttcttgtaagaaaaagtcttcagccgtcgtaagacgttttattgggtaatacgggaatgcaatggggggagtcatttgtttgcagaggtatcatgggtagttttaaaaagtgtgaaatctacgattgcagaggactgatagactctggacttctgccaaaatgggagggatagcaagcaagaaggagaatcttttttttaaatttttatttatttatttatttattatcacaactcctgataactcacagttgggggtgaggacaggaaagcaaatcgggagttcagaattgtgacaaacctcaggtgactactaccccattgtagacaagctacagactggtattagcagaagataggccataaacaaactctccatttcctctcaacgctttgggaacataattctattattccagctagctaaaaaaaaaaaaaaaaaaaaaaaaaaaaaacctttaaaaatatacattaatacatagtcaatgcaaacatttcaaacattagataggtgtgcaaaataaaaagtggaagtgcctcatcacccacttcttacactccccagcgctaacatttgttgttataggcttccaagcattttctatccacaaacaaacacagacacacacaccccacacattttttttattcttttcccaaataaaattggcggtacacccacaaattttaggatgaagacatgtttaaaagcatgggctttggagctcaccagaactgggctcacatcctctccaactactggctgtgaccctgggcaaattactttaagcttcaattttttgtgtgaagtgaaaagcggcaatgacttcggaaggtttgaggattaaggcctatagcatatatacatcacctagcacagtcagattcacagtaagtgttcaataaacactcttattgtctaccgcaagtgacctttctcattataagattaaaatcagggaatatgttcctctcatagtttgataactgccattaaacaaaagttttttttttcaactaattaccgtataagttggaaaaaaaacttgcttttccaaagcgtaaaacagattggtctaagtaacacttaaatgggggttctcgcattttcagtgccaatctcctacgtcccctcagtactttgttcacggatgtctagagaatggactttccaatacaaacttatgatttcatgatgtgccgaaaattctcaaccaggttaagtttcacactctgtgtgcagcatttgctttatcccgcaattgccgggtggtgccccttccagctcccacagtcgcgcctctccatcccctctggagctaggactgcaatgggagaagcctctccctgttggagccgtaggggacttgacggatgcggggcgcctccggggagcagcggcaggaccgggagttgggtagggtgaggtgcgcccgagggggtgcagggtgctggccgaagggtccggccggacgggcgcgagggtcctctgctggcgaccctggaactcggctctccccgatcttcgtcctggggcaccgtccctgccgtctgcagcccccaggccccactgcctctaactcagcggcccaggcccgtcccagtcgctagttttctttttggcattgccctttgccctcccatgcagtcctctgttgactctctcttcagttccagtcacctctaggtcaccctccctctaccacagtcacccattttgtcccctgtccccttactcttcttcacctctccccgggccgccttctcagaggactctgccgacggagatgctgcggaccccgcggccaggggctgctccccggacaaccctgcgtccacctttgccccttcctcgggggcgcgagaggcaagtttccgccccgtccttttcccggtgacaggacttggcggcggccactgccggggaggcagagggagggacggcctggctcccgagccccctcccctgctcgcgagctcgcgctgtctgtctctccgcaagtgcggagacgcggaggaggaggaggaggaggaggaggaggagggagttgggggaggatctccattgaaataaacaaccaggcagcagttattaacacgggaacatggcggccgcagcctcggctacagcttcggcggcgaaggtcagcgccgacggcagccggcacctgacggcgtgaccgacccgagccggtaaccgcgccttcccccggggccgcgagggcgggcggggggcgggcggcaggcggggggcgccgcgtccccacccccggccgcgactgcccttcctgcgccgagctccgacagagccgtgcgcctccgagaggctgtttttgtgtgcggggaccgccgccggagtgcgcggaaaacgggagttgcatcccggaggcgcagcgacgctggggagttggggcttgggggtggggagggcgggaagcgacggggagacgcggagtccccgggagagaaaggaggcgctccagcgccttgcgagagctcaggagacgagtcccggagcgcgaggcgggcggaggctgcagcccgcggcgcgggcgagaggtgagcgccgaggcgcggccgggggtgcgggcgcggcccccgccccgaggagcgagtgcccattgcccagcccggtgcggggtcggcggagaccgaggctctaacccctcgggggcagcgcggcagagccgagaaggtgaatcctgggaaggtgcattctttaatggaagcgcggagcggctgcagcggagagtgggagccgggcgaggggaggcaggactcgggaagtgctgggggtgtgtgaaggtgaagcggggtgtcggggcggccggcgagctgcagcgcggggcggggaaggggagccgcggcccggcgggtggcccgggcccgtgtcagccccgggggtggggggcgaggggcgccgagcaccgcgggcggacgggaaggagctgcggcgggcggggcgggcggcgcgctggggccgagcaggccgggccgtggtgggggcggggagccgggggccgggccccggcggcgccgagccgggctcgcccctgactgaactttctgggtgcgggcgtgtatgcaggaggcgcgctggggccggg

SEQ ID NO: 11973 - DNA, 6000 bp, Homo sapiens
tctgcaggaattcagagagcagctcacctgcatgcctcacaggagggagaggcttgggaagactctgaggtgacaaccatggagccccagtagatctgcaaggtggaagaggaggaggcagtgagcagcgaacctgcagttggcatcacaaggcatcgcacagggggccaggcacagcggctcacgcctgcactcccagctactcaggaggctgacgcaggaggatccctggagcccagcagttcaagatgagcttgggcaatatagcaagactggctctacaaaaagttttaaaaaatagctgggtgcagtggcatgtgcctatagtcccagttattcaggaggctgaggtgggaggatcccttgagcccaggaatttgaggctgccgtgagctgtgattacaccactgcactccaggttaacagagtgagaccctgtctctgaaaaaaataaaaaataaaaaaaaagccaattcacagattaggctcagagggcaggtggatggctcaatggctaagagcagccctagagaacttccaataaattgaaatggcctggcagcatcaaggggtggagaagctcagaggccgagcagaagggagggtacgcccccgccctggggcacagcctgagtgaggccagggagggtgtgccgcagcggccaccacttctgtgcgtgggcaggcagtaggacgacccactctgtgcatgggaataaatgctgggacgcatccctgcacgcgaacacatagctgttgtcacgttactgttcttaccacgggggtcatgctggagcagcaccagagatggaggagtagcgtaaaacagcacaaacagattcgctcactgtgctggaggctggaagtgcaaaatcaaggtatcggtagggctgatgcttccggaggctccgagggagaatccatcccaggactctctcctcaccactcatggccctggcagtcccaagtagggtccagccccacagggacggtgggtctctccccgtgtgcagagacgagagagtgtagaaataaagacacaagacagagataaaagaaaaggcagctgggcccgggggaccactaccaccaagtcgcggagaccggtagtggccccgaatgccaggctgcactgatatttattggatacaagacaaaggggcaggataaggagagtgagccatctccaatgataggtaaggccacgtgggtcatgtgtccactggacagggggcccttccctgcctggcagccgaggcagagagagagaggagacagagagaaagacagcctacgccattatttctgcatatcagagacttttagtactttcactaatttgctactgctatctagaaggcagagccaggtgtacaggatggaacatgaaggcggactaggagtgtgaccgctgaagcacagcatcacagggagacggttaggcctccggataactgcaggcgagcctgactaatgtcaggccctccacaagaggtggaggagtagagtcttctttaaactccaccggggcaagggagactccctttcccggtctgctaagtagcaggtgtttttccttgacactgcgcctaccgctagaccaaggtccacttggcaacaggcatcttcccagacgctggcgttaccgctagaccaaggagccctctggtggccctgtctgggcataacagaaggctcgcactcttgtcttctggttactcctcactatgtccccttagctcctatctctgtatggcctggtttttcctaggctatgattatagagtgaggattattataatattggaataaagagtaattgctacaaactaatgattaatgatattcatatataatcatatctaagatctatatcagtacaactattcttattttatatattttattatactggaacagctcgtgtcctcgagtcccaggcacgccttgacctgtgggtacatccctccaacactggcctccatgttcatgtgactgtctaccttatttctctgcaccccaagtatcccttttctttctctgataaggacatcaaacattggatttagggcccaccccagcatctcaagatcctaaacttatttacatctgcaaagaccattttttttttttcaaataaggctgtgctcctaggtactggggatcaggatgtagacttttgggggacactatgtgacctaccacagaacatgtgtgtctggttatgggggcggagaaaggggaggaaattcattgagattcttctgctcaaggcttacctccttaggggcttctctggaccacacccgccaaaacgcacccctgcccacccacagatccattcaacaagtgtttgctgagggcctgctgtgtgccgggtaccgtcctcgcaccagagaaagagcagggacaacgagcagacactcctgccctgcgggagctcgaatcgcaacagggacacagacagtgaagaagagagatgagaaaaacccagatgcaagtcaggtggggtgaatactccgggaaaagtcaagtcaagcaggcgaaagggtgtggggactgtgatgtcaggattcgtggtcaggacaggcctctcaggaagtgacctcagaggatgtttgggaagggcgttccgggcaaaggtataaccagggcagagaccctgaggggaagtgcctgtcatgtccgatggcacagggccgtgtacttggggtgggctcagctgaagaaggcagctgacgtgaggtagggtaatgggaccaattactgggccttcatgtttaggccctcataccaagtgagaagggaccactgggggggctccccaaaaccaccctcaagttcaatggttcactagaaggactcacagaactcggaaagggtactatttattacagcaatggatgcgttaaaatcagcagtggcaaggactcacagaacagaacccaggacagaccagcacgggtctgcaggtgtccccacccactgcaggcatggggacagtgctcaacctcccagcactgaggtgtgacaatgagcacagcatgtcagcagccagggaagccctccgtacctcagtgtccagggtttttattgggttggtcacacaggcatggctgacctcccaggtggctgactttggcctccagcccctgcagaggtcaggctgatgccacatggcccaaggtccccccgtagaccatattgttagcacagaccaggggtgtccaatctgtgggctttcctggcacacattggaagaattgtcctgggcaatacccttaaataaaatacacttaacactaacaacagctgatgagctttaaaaaaaatctcaataagaaagtttatgaatttgtgttgggccatattcaaagctgtccttggccgaatgcaccctctgggctgcgggttggacaagcttagcatagaatctggtgtggccgaggtaaacacagacattcaaatcaggcagaacattccaagggcttagagggtgtctcccaggagctggtcagggccagtttcagggtggaggatttgaacaccccaaacctttactgcagagggcctcagcaggatcacctggcattggtggaaaccacacacaaggtgcctggtgaccaaggctggtcagaaaagagagaccacaggggacgcagcagggccagatgcacctctgccaaagaaagaaagaggcgtcccaaagggccagtgcatggagctgcgcggaggggaggagcggagttccaatttgggctccagagagagaaggtaaaggatgaggacccgccgtgaaggagggaggagaccacaggaaggccgtgggggctgtgggctgaagggggttttaggtgagaatcggggacagccccggtggtcggcgtggctggagggtgtgcttagagcggcctccggagggagaggtcgtgtgagccgggtgggctcccccctcatggttccactgtcccatgggagccagccgcggaaaggaaatgcgcgtttgaggagaaaagagaaaatcgccatcctggaaagtgagaagatgggcttgtgggcgggaggaggcactggtgggcgggccagggagagattcgtggtcaccgatcaaagtcagcctgggtcagcctgctggtgggcctttcccccgccctcggtgccccttcgacctgtcccttgggggtcggccggggaatgagtgcgtggccaggagagcgggtcccgctttcgagcccgcggggtcttctgcagctggagggtgccgtgggcttgggggcccccagatgccccgggtcttcccccagatcctaggggagcaaccgcgagagaagtgggcgctccgggctccaggtgtccgcagggcggggcctccgagggggcggggatttgggggcggttcctctgcgcggggcggggcctcataggggcggggcttcgaggaggtgaggcggggcctggggtggggcttcgcggaggaccctgggaacgggcgggggcggggactaaaacggggcggggattcgcgggggtggggcgggtcctggggcggggcttcgcgaaggaggcttggaggacgaggaggggacagggcctggggaggggcttcgcggagcaggcctgggagacgaggaggaaacagggactggggcggggcttcgcggggcggggcctccgggggggcggggcctgggcgcggcccgggctcggcagctctcggggaagctctgctctggctccggcaggcacaggcggctcgggaggtgcgcgccggctccgcccccgggccccgcccgtccgccgcgcgcccgcgcctcccaattcccagagccggggctggggctctaggctgccgcggcggctctaggctgggctgctgggcgcgaggccagggcgggccgggagaggctgcgccggcggcggatcgcgcagagggcggtggcctgggctggccgaaccatggcggccccggagccggcgccgaggcgggcccgggaacgggagcgggagcgggaggacgagagcgaggacgagagcgacatcctggaggaaagcccgtgtggtcgctggcaaaagcgacgggagcaggtgggcgcgggggttggggcacggggtgacaccgccctcccagagcgggaggggcctggaggctgcgcggggcgtgggggcgctgggagagcgcggcggctggaaacctctccgcggcccctcgcggcccgcgaatcagccacccctggacccctttggcctggcgctcgccctgggactccctgagggccagtctcctcccaggaccacctccccatgcctctggactcagccgctagcttcctggggatccccctcgaccccctgaaacctgctccaaatccccttagcccagcccttggataggagcccttggctcctgggggcagctaccctccaagccccaccttcccgcagagtggctcagggcctgcagcccacgcttgggcccactggaaaggtgtggacagggaccaaatcctcacccacaaccctgacacacaccagggcacacataaccctttattcacccccaggtaaaccaagggaacatgccagggcttcagagcaccttcctagccatggacacggaggagggggtagaggtggtgtggaacgagctccacttcggagacaggaaggccttcgcggcgcacgaggtgagaccgctgccccctcctcatcctgcttgggtgaccacctgctgaccacccagcgaccaccctccctccccaggagaagatccagaccgtgttcgagcagctggtgctggtggaccacccgaacatcgtgaagttgcacaagtactggctggatacctctgaggcctgcgcgagggtgagcacgggcaaggccccgggcaggcagagaccacagctaggtggggcgggcatggggacgaacccgcagctggtggaaatcctgagctcgcaccgtgcaggtcatcttcatcacagagtacgtgtcatcaggcag

SEQ ID NO: 11974 - DNA, 6000 bp, Homo sapiens
tagtgaataagtttggtttcacctccttccaattcattttcttgtcttattgcactgataaaatttgcagagatgccaaataacttgcccaagttcacccagttagtaagagccaagattgaaactcatgtcaatctcactcagaataccctggaatgagtgtgggtgtattaatatttgtttttgcttgagaaataagggaggtatgaatagagggggagaaataagggaggtatgaatagagggggtatatcaaagaggttcttaatctaagatgaaggatttgaattgtattccatagttaatgaaggatcattaagtgttttcaagtgggaaagtaacaaaataagactgaggggatcaatcctgtgacagtgtacagtatgacttgaagggagcccattcattcatttattcattcttttcatgatcatttattgagtatgcattatgttctaggagacagagtcttgctctgtcaccaggctgtagtgcagtggtgcgatcttggctcactgcaacctccgcctcccggttcaaacaattctcctgcctcagcctcccaagtagctgggactacaggagcgcgccaccacacccagctaatttttttttttttttgtatttttagtacagacggggtttcaccatgttggccaggatggtctcaatctcttaacctcgtgatctgcctgcctcggcctcccaaagtgctgtgattacaggcgtgagccactgcgcccagccaatgtgtttctcagagtagtagaaatacaagtgatgaagagtagaatcctaacacaatcttagatatgcagcgaaggcagttctatgactttgcattaatttacttgaagtctctgaagctcagctttattgtacataaaatgagaataatatacatacaatgactacttcagtaaggaaaaaatttatgtaatatgcttgacttatattagacatttgtttattgtagttatactatttaagggatttagaagagagcaaacaataagaatgaaacatttcatcacagtcgttcaataatcaaattgacaaacaaatgttttaactgacgcccccaccctatgattacattttaatagaatgaactatagatttttgctttggcaatttaggaatgcaccaaaacagagataactgtgctacatattagctgacataataatattcccttacatctgtataaagagcttgatagttaacaaagtacatttatttacaccattttgagtcttgcaacaattacacagatgaggaaattgcgatatttagtgacttgtttgaggtcacacagtaacttacagagaccacttcacatcatatttatttgcttatattctatagctcttttttaccatactgttacctctaatctcatgatgtatgctagtagtattaactcaaaaatagtatagaatctcccacttttatgcagtttacttatgaaaaaagtgagtactttgaaaactgtggaagaaaaggcagacaaaaatagaaattcttgtcttgtagcagtcatattgttctgattattcctaggttatattgttaaatatataatttgtcattttctttacttttccatgctgcatttatgattctgctgacatttttggtgtttccttgcctcatccattcacggtatgttatttctacttccactaaatttcaataatttccttcccctttatgatctgcacccacatattttttccttgttgttctctcttggtaatatacctagttcctatatctttgccttcttttttctttccttcttcttcctttcttaatttgtgtcattgagccaacttatttaccgcctcctctaccttttcattttacattatcatagtgatgattcactaaaaattatggctagttttaataaacaattgttctgaggtctcatgggaatcaaagttctttctaagtatggaagatgttttttataaacatgttttatgagcaagggattggaagatgaggtggggaagaggacatgaggatcggaatagatactattatttatatttcacaaattcaatgaaacaacaaacatcatacattccttgttaggtgctatagcatgtacaaacaagaacaagactaggtcttgggctctgttgcacttacaatctagtgaaagagaaagacaaacatataaacaactctagtgcaagacagactactgttacagcaagagcctgaagttcagagggcacccagagattgtaccagagcgcgtttaagtcacacaattcaattcaagctcaggcaattgagtagcacttgggcatggaactcatctactatgctgtcagacgtttttgtttatttcttgtaagaaaaagtcttcagccgtcgtaagacgttttattgggtaatacgggaatgcaatggggggagtcatttgtttgcagaggtatcatgggtagttttaaaaagtgtgaaatctacgattgcagaggactgatagactctggacttctgccaaaatgggagggatagcaagcaagaaggagaatcttttttttaaatttttatttatttatttatttattatcacaactcctgataactcacagttgggggtgaggacaggaaagcaaatcgggagttcagaattgtgacaaacctcaggtgactactaccccattgtagacaagctacagactggtattagcagaagataggccataaacaaactctccatttcctctcaacgctttgggaacataattctattattccagctagctaaaaaaaaaaaaaaaaaaaaaaaaaaaaaacctttaaaaatatacattaatacatagtcaatgcaaacatttcaaacattagataggtgtgcaaaataaaaagtggaagtgcctcatcacccacttcttacactccccagcgctaacatttgttgttataggcttccaagcattttctatccacaaacaaacacagacacacacaccccacacattttttttattcttttcccaaataaaattggcggtacacccacaaattttaggatgaagacatgtttaaaagcatgggctttggagctcaccagaactgggctcacatcctctccaactactggctgtgaccctgggcaaattactttaagcttcaattttttgtgtgaagtgaaaagcggcaatgacttcggaaggtttgaggattaaggcctatagcatatatacatcacctagcacagtcagattcacagtaagtgttcaataaacactcttattgtctaccgcaagtgacctttctcattataagattaaaatcagggaatatgttcctctcatagtttgataactgccattaaacaaaagttttttttttcaactaattaccgtataagttggaaaaaaaacttgcttttccaaagcgtaaaacagattggtctaagtaacacttaaatgggggttctcgcattttcagtgccaatctcctacgtcccctcagtactttgttcacggatgtctagagaatggactttccaatacaaacttatgatttcatgatgtgccgaaaattctcaaccaggttaagtttcacactctgtgtgcagcatttgctttatcccgcaattgccgggtggtgccccttccagctcccacagtcgcgcctctccatcccctctggagctaggactgcaatgggagaagcctctccctgttggagccgtaggggacttgacggatgcggggcgcctccggggagcagcggcaggaccgggagttgggtagggtgaggtgcgcccgagggggtgcagggtgctggccgaagggtccggccggacgggcgcgagggtcctctgctggcgaccctggaactcggctctccccgatcttcgtcctggggcaccgtccctgccgtctgcagcccccaggccccactgcctctaactcagcggcccaggcccgtcccagtcgctagttttctttttggcattgccctttgccctcccatgcagtcctctgttgactctctcttcagttccagtcacctctaggtcaccctccctctaccacagtcacccattttgtcccctgtccccttactcttcttcacctctccccgggccgccttctcagaggactctgccgacggagatgctgcggaccccgcggccaggggctgctccccggacaaccctgcgtccacctttgccccttcctcgggggcgcgagaggcaagtttccgccccgtccttttcccggtgacaggacttggcggcggccactgccggggaggcagagggagggacggcctggctcccgagccccctcccctgctcgcgagctcgcgctgtctgtctctccgcaagtgcggagacgcggaggaggaggaggaggaggaggaggaggagggagttgggggaggatctccattgaaataaacaaccaggcagcagttattaacacgggaacatggcggccgcagcctcggctacagcttcggcggcgaaggtcagcgccgacggcagccggcacctgacggcgtgaccgacccgagccggtaaccgcgccttcccccggggccgcgagggcgggcggggggcgggcggcaggcggggggcgccgcgtccccacccccggccgcgactgcccttcctgcgccgagctccgacagagccgtgcgcctccgagaggctgtttttgtgtgcggggaccgccgccggagtgcgcggaaaacgggagttgcatcccggaggcgcagcgacgctggggagttggggcttgggggtggggagggcgggaagcgacggggagacgcggagtccccgggagagaaaggaggcgctccagcgccttgcgagagctcaggagacgagtcccggagcgcgaggcgggcggaggctgcagcccgcggcgcgggcgagaggtgagcgccgaggcgcggccgggggtgcgggcgcggcccccgccccgaggagcgagtgcccattgcccagcccggtgcggggtcggcggagaccgaggctctaacccctcgggggcagcgcggcagagccgagaaggtgaatcctgggaaggtgcattctttaatggaagcgcggagcggctgcagcggagagtgggagccgggcgaggggaggcaggactcgggaagtgctgggggtgtgtgaaggtgaagcggggtgtcggggcggccggcgagctgcagcgcggggcggggaaggggagccgcggcccggcgggtggcccgggcccgtgtcagccccgggggtggggggcgaggggcgccgagcaccgcgggcggacgggaaggagctgcggcgggcggggcgggcggcgcgctggggccgagcaggccgggccgtggtgggggcggggagccgggggccgggccccggcggcgccgagccgggctcgcccctgactgaactttctgggtgcgggcgtgtatgcaggaggcgcgctggggccggggccgggggcgggaggcggaccgggaggttccgggttggctcgccagcgcccccttttctcgcccccttctctccgcccctgaagggacaggccctcggggccccaggcgggaagcgggaggggccctgtggccgcctcgcgacggtcacgccccgggcacggggacccggccctctcgggcccctggggggtgctgggggagggggccggggtcgtcgctgccggctgcgctccccgcctcctcccctcgggggagtcccagaggcgcctcttccgagaccgggggtgggtcggtccctggttagatggcccctccctcttcccctccctctagtggtttccggggcctgcgggaccgaggggcgggaatcggggactggagcccccttccgctggcccggagctggactgggcctcccgcgttctgggtccgtcactggtaggggaaactttcccaaaccagagaccgagcctgaacaccttcctccgccacctcgtcctctaatcccactccctctccacctcctccgac

SEQ ID NO: 11975 - DNA, 6000 bp, Homo sapiens
cctcagcctcccaaagtgctgggattacaggcatgagccaccgcgccccgccagcaagtttcataagtaactaaaaatgtccaaaggttaacaagtccaaacttgtgctgctgctgcatgacagccaatcagtccagacaaggagttgaagccgagaaggcaacttcattttggagagcagcaagcccagcagatgcgaatgagcatcctcaggaaccatctcatgccagtatgaggttcaggccctttacaagttcagggcaggggaaagaggagggcttgcgatcaaggggtgatggatgacagctgggtgccaatgaggctccaaggaggttgggaacttcctcttccttttcaggtcacaatgctcctgtaaatcttcaacaaaatatagatagctgtttacatgctttcccttcaatcctcgaattagtttcaaaaactacatgaaaactactgtccttgcattttatctcagtgctctacaattatcctaacctatgtgcaagagtgggtaaagaccccttcaacaaaaaaggagtgagtgatgtgagttgttgtgcggtctcactgtcacgcaaatagtcctttaaagcaatttggtgcatacgccaagatcccaccagggagggctgttgacacgaggagagctcaccataggtgtcaattatcttcaacttggactttgccttatctgtatgctgaatagatgcctctattccttaggattgagttatgactaaatatattgctatcctcctgaaatcattttggaaataattattcctaatcagtacttcacatacacacatgtgcgcacataccagcttccaagctggttgctggccgccacaggccttcatggctgctgtctggaaacggctgtttctggctgtgtgtacccttcacaggcttgctcggagtgagctgggaagccagcaagccactgtctccaccgcccaatctgggaggcactagcccagtgcctctgctgtgttctagccctggaagcaagtcactcagtccagtccacactcctgggaggggattgcacatgaggcggaagaccaggaggcagggtcaccaggacagacagtgggaggggtcctctggtgctcctctgaccccccagagctggaaccccctggctttctcccaccctaggattcctggcatccaggacagcagtcctgagccctgcaagcccggggatcgtccacctgccaatgggaaagaaatctgcaggaattcagagagcagctcacctgcatgcctcacaggagggagaggcttgggaagactctgaggtgacaaccatggagccccagtagatctgcaaggtggaagaggaggaggcagtgagcagcgaacctgcagttggcatcacaaggcatcgcacagggggccaggcacagcggctcacgcctgcactcccagctactcaggaggctgacgcaggaggatccctggagcccagcagttcaagatgagcttgggcaatatagcaagactggctctacaaaaagttttaaaaaatagctgggtgcagtggcatgtgcctatagtcccagttattcaggaggctgaggtgggaggatcccttgagcccaggaatttgaggctgccgtgagctgtgattacaccactgcactccaggttaacagagtgagaccctgtctctgaaaaaaataaaaaataaaaaaaaagccaattcacagattaggctcagagggcaggtggatggctcaatggctaagagcagccctagagaacttccaataaattgaaatggcctggcagcatcaaggggtggagaagctcagaggccgagcagaagggagggtacgcccccgccctggggcacagcctgagtgaggccagggagggtgtgccgcagcggccaccacttctgtgcgtgggcaggcagtaggacgacccactctgtgcatgggaataaatgctgggacgcatccctgcacgcgaacacatagctgttgtcacgttactgttcttaccacgggggtcatgctggagcagcaccagagatggaggagtagcgtaaaacagcacaaacagattcgctcactgtgctggaggctggaagtgcaaaatcaaggtatcggtagggctgatgcttccggaggctccgagggagaatccatcccaggactctctcctcaccactcatggccctggcagtcccaagtagggtccagccccacagggacggtgggtctctccccgtgtgcagagacgagagagtgtagaaataaagacacaagacagagataaaagaaaaggcagctgggcccgggggaccactaccaccaagtcgcggagaccggtagtggccccgaatgccaggctgcactgatatttattggatacaagacaaaggggcaggataaggagagtgagccatctccaatgataggtaaggccacgtgggtcatgtgtccactggacagggggcccttccctgcctggcagccgaggcagagagagagaggagacagagagaaagacagcctacgccattatttctgcatatcagagacttttagtactttcactaatttgctactgctatctagaaggcagagccaggtgtacaggatggaacatgaaggcggactaggagtgtgaccgctgaagcacagcatcacagggagacggttaggcctccggataactgcaggcgagcctgactaatgtcaggccctccacaagaggtggaggagtagagtcttctttaaactccaccggggcaagggagactccctttcccggtctgctaagtagcaggtgtttttccttgacactgcgcctaccgctagaccaaggtccacttggcaacaggcatcttcccagacgctggcgttaccgctagaccaaggagccctctggtggccctgtctgggcataacagaaggctcgcactcttgtcttctggttactcctcactatgtccccttagctcctatctctgtatggcctggtttttcctaggctatgattatagagtgaggattattataatattggaataaagagtaattgctacaaactaatgattaatgatattcatatataatcatatctaagatctatatcagtacaactattcttattttatatattttattatactggaacagctcgtgtcctcgagtcccaggcacgccttgacctgtgggtacatccctccaacactggcctccatgttcatgtgactgtctaccttatttctctgcaccccaagtatcccttttctttctctgataaggacatcaaacattggatttagggcccaccccagcatctcaagatcctaaacttatttacatctgcaaagaccattttttttttttcaaataaggctgtgctcctaggtactggggatcaggatgtagacttttgggggacactatgtgacctaccacagaacatgtgtgtctggttatgggggcggagaaaggggaggaaattcattgagattcttctgctcaaggcttacctccttaggggcttctctggaccacacccgccaaaacgcacccctgcccacccacagatccattcaacaagtgtttgctgagggcctgctgtgtgccgggtaccgtcctcgcaccagagaaagagcagggacaacgagcagacactcctgccctgcgggagctcgaatcgcaacagggacacagacagtgaagaagagagatgagaaaaacccagatgcaagtcaggtggggtgaatactccgggaaaagtcaagtcaagcaggcgaaagggtgtggggactgtgatgtcaggattcgtggtcaggacaggcctctcaggaagtgacctcagaggatgtttgggaagggcgttccgggcaaaggtataaccagggcagagaccctgaggggaagtgcctgtcatgtccgatggcacagggccgtgtacttggggtgggctcagctgaagaaggcagctgacgtgaggtagggtaatgggaccaattactgggccttcatgtttaggccctcataccaagtgagaagggaccactgggggggctccccaaaaccaccctcaagttcaatggttcactagaaggactcacagaactcggaaagggtactatttattacagcaatggatgcgttaaaatcagcagtggcaaggactcacagaacagaacccaggacagaccagcacgggtctgcaggtgtccccacccactgcaggcatggggacagtgctcaacctcccagcactgaggtgtgacaatgagcacagcatgtcagcagccagggaagccctccgtacctcagtgtccagggtttttattgggttggtcacacaggcatggctgacctcccaggtggctgactttggcctccagcccctgcagaggtcaggctgatgccacatggcccaaggtccccccgtagaccatattgttagcacagaccaggggtgtccaatctgtgggctttcctggcacacattggaagaattgtcctgggcaatacccttaaataaaatacacttaacactaacaacagctgatgagctttaaaaaaaatctcaataagaaagtttatgaatttgtgttgggccatattcaaagctgtccttggccgaatgcaccctctgggctgcgggttggacaagcttagcatagaatctggtgtggccgaggtaaacacagacattcaaatcaggcagaacattccaagggcttagagggtgtctcccaggagctggtcagggccagtttcagggtggaggatttgaacaccccaaacctttactgcagagggcctcagcaggatcacctggcattggtggaaaccacacacaaggtgcctggtgaccaaggctggtcagaaaagagagaccacaggggacgcagcagggccagatgcacctctgccaaagaaagaaagaggcgtcccaaagggccagtgcatggagctgcgcggaggggaggagcggagttccaatttgggctccagagagagaaggtaaaggatgaggacccgccgtgaaggagggaggagaccacaggaaggccgtgggggctgtgggctgaagggggttttaggtgagaatcggggacagccccggtggtcggcgtggctggagggtgtgcttagagcggcctccggagggagaggtcgtgtgagccgggtgggctcccccctcatggttccactgtcccatgggagccagccgcggaaaggaaatgcgcgtttgaggagaaaagagaaaatcgccatcctggaaagtgagaagatgggcttgtgggcgggaggaggcactggtgggcgggccagggagagattcgtggtcaccgatcaaagtcagcctgggtcagcctgctggtgggcctttcccccgccctcggtgccccttcgacctgtcccttgggggtcggccggggaatgagtgcgtggccaggagagcgggtcccgctttcgagcccgcggggtcttctgcagctggagggtgccgtgggcttgggggcccccagatgccccgggtcttcccccagatcctaggggagcaaccgcgagagaagtgggcgctccgggctccaggtgtccgcagggcggggcctccgagggggcggggatttgggggcggttcctctgcgcggggcggggcctcataggggcggggcttcgaggaggtgaggcggggcctggggtggggcttcgcggaggaccctgggaacgggcgggggcggggactaaaacggggcggggattcgcgggggtggggcgggtcctggggcggggcttcgcgaaggaggcttggaggacgaggaggggacagggcctggggaggggcttcgcggagcaggcctgggagacgaggaggaaacagggactggggcggggcttcgcggggcggggcctccgggggggcggggcctgggcgcggcccgggctcggcagctctcggggaagctctgctctggctccggcaggcacaggcggctcgggaggt

SEQ ID NO: 11976 - DNA, 6000 bp, Homo sapiens
gaacctgcacttcttccccccagagtatggaggtgagtggtgctgggtccgggtgccccgtgcctaccctgcgcttctctcctacgtgtcctgtgctctcttctgttcagaggtggccgatgggaccgctgtggacatcttctcctttgggatgtgtgcgctggaggtactgcccccgccctccaccttgtgctctgccctcctcctaactgtgccctgcctggctcacctgtgtggtcccttccccatgcctgacctggctctgtgccccagatggctgtactggaaatccagaccaatggggacacccgggtcacagaggaggccattgctcgcgccaggcactcgctgagtgaccccaacatgcgggtaagcagcttgccctgcccctccccagctggctcaccgtgctcagctagggctagcaaggtgctccaggcagacctgggagaacatcacagtttgtgcagttgaggggtataccagctgactgcacccctcccaaagaggacctcagtgggagcacatactggttccaggcctgaaggccctaaggggtcagcacattctaaggacaagaaggcaagagagaccctccctctgtggctgccatcaccatgcccgttttataaagaaaccaaggttcagaggagatgagtcctttgcccaaggctttagagtgagtggtggagccaacatctgcacctgggtctgcttcactccaagtccttgactttaagcttccaggaggtgatgaggctccagcttgtggggggacatggtgggtgccaagcaggcaaaaagaggtatgggatggaagctgcatccacagccccctctgctcggagtctagacttaactccatggcctcaggagatgggggtgcctggtcggggctggtggcgagctggagccgggctgggcacggatgtggacagagtggggacccatcaaggtcgtctccagtgttgggcccgagctgagccgatcaaaaggccatgggtaggaggcttgcaggtgtgactttaggatcatggcttctccccacgattttttgggggtcgagggaagcagagcatggtgctccaatcccagaacccagctgtcctcaagctcagaggaccaggtcctggcctggctgctgctgctgggactcctccctatgggcatccctgcatgtcctgtgtgtccctgaggagggacatggggaactcaggggccacctctcctcgaactgcggggccagagcagagagcccttgcacaccaccagcctctcctccctgtgccccaggagttcatcctttgctgcctggcccgggaccctgcccgccggccctctgcccacagcctcctcttccaccgcgtgctcttcgaggtgcactcgctgaagctcctggcagcccactgcttcatccagcaccagtgtgagcagcaggccggcccggggggtggctggggaggtggaggttgggacgtggaaggggccctgcaggacccacggcctgagcacaccgccttgatgctcttgtggccgcagacctcatgcctgagaatgtggtggaggagaagaccaaggccatggacctgcacgcggtcttggcggagcttccccggccccgcaggcccccgctgcagtggcggtgagcagtcagcacccagaagcctcccctccccacacatcccctccccgcacctcccctcccctcgccccggccagcccctcatgtgcctcccacttccatgccaggtactcggaagtctccttcatggagctggacaaattcctggaggatgtcaggtgagaactgatgtaaggttgggggccaggcagctgtcaggcctgaacccccagccaccctgttgtgtccccaggaatggaatctacccactgatgaactttgcagccactcgacccctggggctgccccgtgtgctggccccacccccggaggaggtccaaaaggccaagaccccgacgccagagccctttgactctgagaccagaaaggtgagtcccctctcctgctgctcagtgccatccctcagaccttctaacagccagataagaggtgcccctccttctcttagggcctgcatccccacagcccagctctcctcctggctgccagagaccagatccaggctgacccccttgtgggggtcatgggggttataggacaggctgggcactctccttttccgggaggctccctgtcccctcagatccttcccctgcatcctgctgcctgccctgaacctactccaagcatccttcctccagaactcacccgggctcttccaccctgccagcaatcttcccccacccccgcacccctcccaccccccccccacccctcccatcccccacctggtgctgattcccggacatctatgtcctggtgtctccccagacttttcctgcagcaccccctcctggccaggggcctctctcggtgcagtgcagccagaattcatgtcctaacaggcaaactgcctgctcctggctgccagcagagatcatgggagtcctcagctgacgcccaggctctgggaggcctgatcccgcaggcaccgtgcacttcggcgcggtcctgtcccgcccaacctccctttccccacgcccacagttccctctttgttcaagttgttctctccgcggtgaaagctcctattcagccttcagtacccagcccctaatgtcgactcttctcgaagctttccttagcttgccaagccactagcagtgagatgggctcctcttagagattcccccctttccagtctttgctgtcccttcccggcccctttggggccgcggcatgtggtcttgctgctgggtttgtgagtcccagccttcccccgctgcaggtcatccagatgcagtgcaacctggagagaagcgaggacaaggcgcgctggcatgtgagcggggcctgggagggcggcgctgccgtggggaaggcgggagcgtggcggagccctgaacccccagccgaccacgccccgccgcctccccagctcactctgcttctggtgctggaagaccggctgcaccggcagctgacctacgacctgctcccaagtaggctgggcaggggacttgggcggcgggcggtgaccccaggcggcgggtgggcagcggcctcatgcctcgccttacgccattgcctcagcggacagcgcccaggacctcgcctcggagctcgtgcactatggcttcctccacgaggtgcgctgggcggtgcggcgcggcctggcggagggggcgcacggggcaggccgcgcccctccgtcccccatgcctccctccttccgcaggacgaccggatgaagctggccgccttcctggagagcaccttcctcaagtaccgtgggacccaggcctgacccggagccccagccccaggggaccatgccggggtgctgcctgggcaggccatgttggggagactccagcaccgtggggctgccctcctccatgcgcctgggagcacaaaggccccggtagtgaaggaaccccccgtctcctgagagtggggctgaccctgccttgggcgccgaggggttggggggtgggtgtgggggagccgttaggcctcccaggtccttaggatcagggttgcccccagaaccccttcccatatcctccattctccgccctgagttcctacccaggctgcctggccggggccactgcctcctcagcatgcaggaggctgccctgtagggaaccccagctctggggcttgggggtgagggtcagccctggacagacctctgcccagggaactgctccatggggtctgggagagcagccatcccctgctggcaccatagacccacacaaggagcctgcacagcaagccagcggtgacacacctgcaggtgtcaggcatggcactgggcacaacagggacctggcaggagaaacagaccacagagaggtctggagttgaggctgttgtcagcaaagcccctggtcccacacagctctgccctagagccacctctttgaccctttacccaccctgagaccagaacttgcagcccctctgcagatctcctctggccactgcagcccctccaatgggctttttctctcatgcattccctggcctggaggcgtcagggaccccacatcctccctgctcctcagactcacagcccctccatgttacctcccgcacctcctccctggggcagctgctccctgggcctctgaggatgtcagctcctggctccctgcctctctcccactccactcctggctcagtcttagagatttctatgccctcatggattctacccctgccttcctggcctcttgattcttggcttgcctctcctccaattccaaacttagtgaaatggccttaagcattttaaactgtatgtatacattagcgcattcatgcctttctaaacgcatttcaaatgtcaaccaggaaggcacaccactgtattagttttatactgccgctgtaaaatttaccacaaacttagtgacttaacacaaatttattgcaattctgtaggctggaagtctgactatgggtctcactggactagaatcaaggctggcaggctgccttccttcctggaggttctaggggagactctgtctcctgctccttcaggctgctggcagaatccacatcctttcggtggcagggccaaggtccccactttcttgctgactgtaaactaaggccacttccagcttgtagaggctgcctacattccttggctcttggccccctcctccatcttcagagctagcaggttcagtctgtgtcacgaaccatttctctggttccctgcagacaggaaaggttgtccctaaggactcatgagattaggttgggcccagccagataatacatgataatctccctcctcaaggtttttaatattaaacacatctgcaggacacattttgccatgtaaactaacattcactggttccagggattaaggaatgaacctcttttgttggggaagggtggcattctgctgaccacagcactccaaccaaaagccaaaaaccaaagcaagacttactaacgcatatcaaataaattaaaggtacaaaatcgtgaatctcagttatcttaaatattccaatactatttacaaaattattcaaattctcacgccttccaactcaaaattagcaatctaaagtaatttccatatcctagatggaaaccctcatgctaaactgtctgattatgcatggttctaaatggtttcagtggcaaatacataacattgtactactgattaaactgaacttaaaagcatcaataccaccattgctgcacttaatcatgtctctgttgaatttttccttttaaattttatcttttcagaattatatatgtattgtttttaaagtagaatagttttttttttgaggccaataataaataataaatgcaggctcctactctgatcctctccaaattcaactctcttaactgtttcttcaggcatttgaaatccatgtttttcaaaaccatgagcatgcttttagtcctgtttattcgtttttctacattagatgtccctggctggcatcctctgggaggagggcggtcacctgcctcagtctcctggcggcatcattccagtgttacgggcatcatagctgcatgggtgttattacagcttcattaccacacgtctcaggagagaacacggtgttctaggatggcatttcttgcacaactttttgttttccctggagttaataattgccttttttttggtttgcctagttttctatatgtgtttgtcattgattcatctttagactttcctgaagaagcatgagcatcctgtcacagcttaggactcatcacataactgactgctcagtttcttcttttcctggagcccccaccatacaagccccctgcccaggctacttgttcttggacttacagcccagtggtcagcatgggttaactcttcaccagtgtcctgtactgctttc

SEQ ID NO: 11977 - DNA, 6000 bp, Homo sapiens
ccctcctcatcctgcttgggtgaccacctgctgaccacccagcgaccaccctccctccccaggagaagatccagaccgtgttcgagcagctggtgctggtggaccacccgaacatcgtgaagttgcacaagtactggctggatacctctgaggcctgcgcgagggtgagcacgggcaaggccccgggcaggcagagaccacagctaggtggggcgggcatggggacgaacccgcagctggtggaaatcctgagctcgcaccgtgcaggtcatcttcatcacagagtacgtgtcatcaggcagcctcaagcaattcctcaaaaagaccaagaagaaccacaaggccatgaacgcccgggtatggggagcgggctggggcagccacggggacaggacggggttggggcagcctcggggactgggatggtgagggggtgcccggcggcctcggacaggggctgggcgaggatgcggggcgggctccgcaggcccagccgcctctcctgcgcccacccgaccgacggagtcgtgcgtccgccgccaggcctggaagcgctggtgcacgcagatcctgtctgcgctcaggtgagggcctgggctggcctgggcgcggcgccaccgagcccccatctctccagagcctcctgaccggctcctcctactctcccctccccaacgtctgcagcttcctgcacgcctgcagccccccaatcatccacgggaacctgaccagcgacaccatcttcattcagcacaacggcctcatcaagatcggctccggtgctggcggggcagggctgggtgggggaacggggcaggggaaggtgcctggagccaagggcagaggagttctgatgccccagcagctaactccactctttctcccgccccttggcagtgtggcaccgaatcttctccaatggtaagtgcggactttggggggacggggtcctggagaggtccccgcccgctcagctctgcgccctcccacagcacttccagatgatctccgaagccccatccgcgctgagcgagaggaacttcggaacctgcacttcttccccccagagtatggaggtgagtggtgctgggtccgggtgccccgtgcctaccctgcgcttctctcctacgtgtcctgtgctctcttctgttcagaggtggccgatgggaccgctgtggacatcttctcctttgggatgtgtgcgctggaggtactgcccccgccctccaccttgtgctctgccctcctcctaactgtgccctgcctggctcacctgtgtggtcccttccccatgcctgacctggctctgtgccccagatggctgtactggaaatccagaccaatggggacacccgggtcacagaggaggccattgctcgcgccaggcactcgctgagtgaccccaacatgcgggtaagcagcttgccctgcccctccccagctggctcaccgtgctcagctagggctagcaaggtgctccaggcagacctgggagaacatcacagtttgtgcagttgaggggtataccagctgactgcacccctcccaaagaggacctcagtgggagcacatactggttccaggcctgaaggccctaaggggtcagcacattctaaggacaagaaggcaagagagaccctccctctgtggctgccatcaccatgcccgttttataaagaaaccaaggttcagaggagatgagtcctttgcccaaggctttagagtgagtggtggagccaacatctgcacctgggtctgcttcactccaagtccttgactttaagcttccaggaggtgatgaggctccagcttgtggggggacatggtgggtgccaagcaggcaaaaagaggtatgggatggaagctgcatccacagccccctctgctcggagtctagacttaactccatggcctcaggagatgggggtgcctggtcggggctggtggcgagctggagccgggctgggcacggatgtggacagagtggggacccatcaaggtcgtctccagtgttgggcccgagctgagccgatcaaaaggccatgggtaggaggcttgcaggtgtgactttaggatcatggcttctccccacgattttttgggggtcgagggaagcagagcatggtgctccaatcccagaacccagctgtcctcaagctcagaggaccaggtcctggcctggctgctgctgctgggactcctccctatgggcatccctgcatgtcctgtgtgtccctgaggagggacatggggaactcaggggccacctctcctcgaactgcggggccagagcagagagcccttgcacaccaccagcctctcctccctgtgccccaggagttcatcctttgctgcctggcccgggaccctgcccgccggccctctgcccacagcctcctcttccaccgcgtgctcttcgaggtgcactcgctgaagctcctggcagcccactgcttcatccagcaccagtgtgagcagcaggccggcccggggggtggctggggaggtggaggttgggacgtggaaggggccctgcaggacccacggcctgagcacaccgccttgatgctcttgtggccgcagacctcatgcctgagaatgtggtggaggagaagaccaaggccatggacctgcacgcggtcttggcggagcttccccggccccgcaggcccccgctgcagtggcggtgagcagtcagcacccagaagcctcccctccccacacatcccctccccgcacctcccctcccctcgccccggccagcccctcatgtgcctcccacttccatgccaggtactcggaagtctccttcatggagctggacaaattcctggaggatgtcaggtgagaactgatgtaaggttgggggccaggcagctgtcaggcctgaacccccagccaccctgttgtgtccccaggaatggaatctacccactgatgaactttgcagccactcgacccctggggctgccccgtgtgctggccccacccccggaggaggtccaaaaggccaagaccccgacgccagagccctttgactctgagaccagaaaggtgagtcccctctcctgctgctcagtgccatccctcagaccttctaacagccagataagaggtgcccctccttctcttagggcctgcatccccacagcccagctctcctcctggctgccagagaccagatccaggctgacccccttgtgggggtcatgggggttataggacaggctgggcactctccttttccgggaggctccctgtcccctcagatccttcccctgcatcctgctgcctgccctgaacctactccaagcatccttcctccagaactcacccgggctcttccaccctgccagcaatcttcccccacccccgcacccctcccaccccccccccacccctcccatcccccacctggtgctgattcccggacatctatgtcctggtgtctccccagacttttcctgcagcaccccctcctggccaggggcctctctcggtgcagtgcagccagaattcatgtcctaacaggcaaactgcctgctcctggctgccagcagagatcatgggagtcctcagctgacgcccaggctctgggaggcctgatcccgcaggcaccgtgcacttcggcgcggtcctgtcccgcccaacctccctttccccacgcccacagttccctctttgttcaagttgttctctccgcggtgaaagctcctattcagccttcagtacccagcccctaatgtcgactcttctcgaagctttccttagcttgccaagccactagcagtgagatgggctcctcttagagattcccccctttccagtctttgctgtcccttcccggcccctttggggccgcggcatgtggtcttgctgctgggtttgtgagtcccagccttcccccgctgcaggtcatccagatgcagtgcaacctggagagaagcgaggacaaggcgcgctggcatgtgagcggggcctgggagggcggcgctgccgtggggaaggcgggagcgtggcggagccctgaacccccagccgaccacgccccgccgcctccccagctcactctgcttctggtgctggaagaccggctgcaccggcagctgacctacgacctgctcccaagtaggctgggcaggggacttgggcggcgggcggtgaccccaggcggcgggtgggcagcggcctcatgcctcgccttacgccattgcctcagcggacagcgcccaggacctcgcctcggagctcgtgcactatggcttcctccacgaggtgcgctgggcggtgcggcgcggcctggcggagggggcgcacggggcaggccgcgcccctccgtcccccatgcctccctccttccgcaggacgaccggatgaagctggccgccttcctggagagcaccttcctcaagtaccgtgggacccaggcctgacccggagccccagccccaggggaccatgccggggtgctgcctgggcaggccatgttggggagactccagcaccgtggggctgccctcctccatgcgcctgggagcacaaaggccccggtagtgaaggaaccccccgtctcctgagagtggggctgaccctgccttgggcgccgaggggttggggggtgggtgtgggggagccgttaggcctcccaggtccttaggatcagggttgcccccagaaccccttcccatatcctccattctccgccctgagttcctacccaggctgcctggccggggccactgcctcctcagcatgcaggaggctgccctgtagggaaccccagctctggggcttgggggtgagggtcagccctggacagacctctgcccagggaactgctccatggggtctgggagagcagccatcccctgctggcaccatagacccacacaaggagcctgcacagcaagccagcggtgacacacctgcaggtgtcaggcatggcactgggcacaacagggacctggcaggagaaacagaccacagagaggtctggagttgaggctgttgtcagcaaagcccctggtcccacacagctctgccctagagccacctctttgaccctttacccaccctgagaccagaacttgcagcccctctgcagatctcctctggccactgcagcccctccaatgggctttttctctcatgcattccctggcctggaggcgtcagggaccccacatcctccctgctcctcagactcacagcccctccatgttacctcccgcacctcctccctggggcagctgctccctgggcctctgaggatgtcagctcctggctccctgcctctctcccactccactcctggctcagtcttagagatttctatgccctcatggattctacccctgccttcctggcctcttgattcttggcttgcctctcctccaattccaaacttagtgaaatggccttaagcattttaaactgtatgtatacattagcgcattcatgcctttctaaacgcatttcaaatgtcaaccaggaaggcacaccactgtattagttttatactgccgctgtaaaatttaccacaaacttagtgacttaacacaaatttattgcaattctgtaggctggaagtctgactatgggtctcactggactagaatcaaggctggcaggctgccttccttcctggaggttctaggggagactctgtctcctgctccttcaggctgctggcagaatccacatcctttcggtggcagggccaaggtccccactttcttgctgactgtaaactaaggccacttccagcttgtagaggctgcctacattccttggctcttggccccctcctccatcttcagagctagcaggttcagtctgtgtcacgaaccatttctctggttccctgcagacaggaaaggttgtccctaaggactcatgagattaggttgggcccagccagataatacatgataatctccctcctcaaggtttttaatattaaacacatctgcaggacacattttgccatgtaaactaaca

SEQ ID NO: 11978 - DNA, 6000 bp, Homo sapiens
acaggcacttctccctagatacccctccctcctggaaatgctgttttcttgctgtatgtcacaatcctgtcctgtctctgtcctggaggtgctaagaatgttgctgggggaaacagacacagattatttcaacacagcatggttacgctacagtagaggcacatagaggaacacgggagcgcagtcccccaaagaaaagcaaaatgatacagatcgaaaatgtggcaaaggtcaggtgcagtggctcacgcctgtaagcccaacagtttgtgaggcaaaggtgggcagacggctcgagtccaggagtttaaaccagcctcggcaacatgatgaagctctgtctctataaacaatttaaaaactagcaggacgtggtggtgtctgcctatagtcccagctacttgggaggctggggtgcgaggatcacctgagcccagggaggtcaaggcttcagtgaattgtgatcgcagcgctgcactccagcctaggtgacaaggtgagaccctatctcaaaaaaaaaaaaaaaaaaaaaaaaaagacaaagcttttccattcctctcaatctgagagtctatgaaaatctgttcaagaccaccacaggctctgttcagccggaagggtaggtaacattagcatgatattaacaatgtgccttccttataacatgcttacatgctttcatcttgtgtccaaagcctgagcctgcacaaccccaactcctcagccagtgctgttctcgtttcctcctctaccggctccttctatcaagccctggaaaattctggttctgctctgggcaagcccctaacctcccccttttccatgagtgctctctccatctctacaccatggctgatactggccttgcactgagaacaatcactttccctgaaaacttctcaaaaacaacaacaacaacaacaacaacaccattccttcgcttttcttgcagagtaaatgttttcaggaaaaaaagaattctaatcatccctccccacagctgtgcatttctgcctctaggtctttgctggggccactcctctgcccaaggtgctctgtatcccactaactgtctggatcgtgaaagtccccagtgaggttcagtccccagcagctccaccaagccctctccagtgtccctgcctgcccacacctctctgacctcacactttactgcaccacagaactgagtagccactcatgaaatcatttgttcattctaagtgcccactatgtacaagacactatgctagatgccacaagcaacatgaggatgactaacacctagtcctcaagaaatgtgtcatggagaagacgatataaaaccgcattgaataacgaagctacaaggaagtagtgtgaggccgcaggagaggtggaaagtagtgacctctcagaaaaacaggggtaacttctaacaggctggaacagggaaggctttaccaagatcacatctcaactaaaacttgaagaaccaggtcaatatcaacaagagaaggaagacagtccctgcagaaggaactctgcaaagtgtgcctggggaaggggtgggctggcgagacttcggagtctctaatgccaagccaagaagtctcagtcattttttgcaggcagcagggagcaggtcaatgacaactttttttttttcttctgagacagagtctcaaaaaaaaaaaaaaagagtctcaccgtcactgaggctagagtgcagtggcaccatctcagctcactgtaacctccgcttcctgggttcaagtgattctcctgcctcccaagttgctgggattacagacatgtgccaccacgcctggctgatttttgtatttttagtagagacggggtttcaccatgttggccaggctggtctcaaactcctgacctcaagtggtccgcccacctgggcctcccaaagtgctgggattacaggcatgagccaccacacccggccattggcaccttctgagcagtgttttcggaagactcatctggcagttggccttgggagaggaggtaaaggcaggaagaatatgcttagaaggccactgcaacatggggagggagggatgacattcacagaactggaaactcccctcagtccgcagggcatcttgtcttcttgcaaagctagttggtaggggctgcaacccttctcaaaagtagcaccacccacagttattccaaatattccatccctgtgcagtgaccgcatctcactacattctatgtgacagtgcctgctgtgctgagcaatcatctcttctgctagatgatgagctccctgagagccagggttctgtgttttacagctagcctgccctcaatgggctcagcacatagtgaatacccatgaatatttaccagatatctcaggaaactcctggagagattctttccctagttccttgttttagaaagtcctctggcccttcaccagccctacaattatctcataatttctgtgatggggtctcctttagcctcaaaattggcttatagtctttgaaaaccttgagctgggctttaaccaaaaagaatactccagtacggcaggagacacgggagaggcaggttaaccagcacaggccattagagagctggtgacacaggtgtgtgatctttacctaactccaccaccagctatgataactccaaaccaaaggcactagacccaacaatttctctttaacgatattattagtggccagacatggtggtggctcacacctgtaatcctagcactttgggaggccaaggcaggtggatcacttaaggtcaggagttcgagaccagcctggccaacatggcgaaacctcatctctactaaaattacaaatattagctgggcgtggtggcgcagccctgtagtcccagctactcaggaggctgaggcaggagaaccacttgaggtggaggttgcagtcagctgagatcgccccactgcactccagcctgggtgacagtggaagactccatcttaaaaaaaaaaaaaaaaaaaaaaaaaaaaagctgtaatgattcctaatctgttagatcagaagagggcgggaaggagcagtcttcctactcaatgagtaatcagttgacttactaggatcacacttggtgaccaaggcttgggaaagacctagactggcgacctgagggtagagcacaaaagaggaattcccgtctccctgtagggccaaccacaccgcccggacatagcctatatggtcaatactaaagggcccggaagatcacctgcctaaaaagatctccctccactgccaaaatctcctgccactgatgcctgtacttctgtcattggaagccttagaatttgactcctagccgggtgcggtggctcatgcctgtaatcccaccactttgggaggctaaggatcgcttgaggccaggagctcaagaccagcctgggcaacatgttgaaaccctgtctctacaaaaaatacaaaaattagcctggcgtggtgccgcatgcctgtagtcccagctactcaggaggctgaggtgggaggattgcttgagcccaggaggtggaggctgcaatgagcggagatcgcaccactgtagtctagcctgggctcagaaataaataaataaataataaaaagaaaagaaaaagaaagaaattcactcctcaggactgaggaactgtctggcctgtctcacctcctgtaaatggagtgttccccagaggtatgaattggtttatcagatcacttttgaagatcacagctgttttgactggggatgggggaaggggaagaaaaatcattttggaaccctctctacctggatgccccaaggccctggccctgggtcaacagcagggctgggaaggtggaggaagtcatagtttctgactttcttcccaactttgcctaaggcaaacttctttcaacaggagctcccatgagggttggggaggaggtggtggggaggaaggagggtgaaacccaagactttctctcctgagaaaatctgatactcaactcatcaattgggggaagatttatactaggaggcagaagtattgctgactttacagacagcttcttggcagagttactttcaacagcgggcaccccccccaccctaccgggaatacccccacccttcctacacagcgctacatcttgctgaacgaaccctagtagtaggctgcctgccagcctgcagccccaacaaaaaatggcaaaaacacaaactgacggcacgtgaaacatcaatggactctcctccccgcacagggccacccaggccccaccacgggcggcatgtccctaactcaatttggcttgtgaggggtcacagccacgctggaaacatctgcacccaatagaaggcgatttccccggctgggggcccaccagcctgccccgggtctttacccttcgtggggacttggaccggcagggcctgcacttcccacgtcccggggtgacgggaagggcgtcctgcaccccaacaaggtcctggagttgtctgggagatcagaccgaggggaagggacggcgattttttcaagcccaggcgaggcggtggggtggagcggaggaaggaggcaggcccaccgggactggggggaggcggcctagggccccggggggcaggaaacaccccaagcggtgacagggagcgtcccggcggaggcgagttcgggaattgggagagactccggggccaggacgcacagacaggaagcgacgcgggagcaggccggggaggtggggcggtcgggaggagtctgggagcgggactgggaagagcgaggggaagcggggcgcggccggggaggcagaggaaggggcgccgcggcccgggggtccctgcccgagggggcccgcgcccgcccgccctcctgcgggccgcgcccggctccgcgcccgcccagcccggcctaggcccgcgactcccggcggcccggcccggccctgccggcctcaccgcccccacggcttcctgcagcagcgccccgagccggctcagcatgatggcgcccggcccccggctcccgggcgaaagcggcggcggcagcgctctaggcggaggaggcagccccgtggccccggcggccccggcgcgacgaggggggcggggcccggccgctccgccccttcccggcccggctgcgtggcgctggctaaccccggctgggggcgcccagtcgggctgggaaccgccagcggtgggccctgagagttggctgggaggtgttttttttttttttttttttctttcctttcttccgagacagggtctcgcttggtcgcccaggctggagtgtagtggcgcgatctctgctcattgcagcctccaactcctggactcatgcgatcctccaaccccggcctccagagtagctgggtccacaggcgcgcgccaccacgcctggccaattgttttttttttttgtttttttactgggaggggaggtctcactgtgctgcctaggatgatctccagctcctggcctcaagcgaccctcccgccagggcctcctgagtagctgggattaaggcgggagctaagggaggtgttttcgaagagaaattacaattcctcctgaattgaagtctcagtcagccccaggcacatgggctgatgagctcctgaaatgtgctggtcccaaccaagatgtgccgtgccaagcacaccccgatttggaagatacagtaagaaaggaaagtgtgaaactgcaacaaccatggcttatattgattacatattgaaatgactattaggtgtgttgggttaaataacgtatattgttaaaattaacttcacgtgttgctttttacttttttgacagggctatcagaaaatgtttatgggctgtgggcggtggctcacacctgtaatcccagcactttgggaggccaaggcggtttgatcacttgaggccaggagtttgagaccagcctggccaacatggtgaaaacccgtctctactaaaaatacaaaaaaattagccaagcgtggtggtatgtggaggctaag

SEQ ID NO: 11979 - DNA, 6000 bp, Homo sapiens; identical to SEQ ID NO: 3471

SEQ ID NO: 11980 - DNA, 6000 bp, Homo sapiens; identical to SEQ ID NO: 3829

SEQ ID NO: 11981 - DNA, 6000 bp, Homo sapiens
aaatgatggtggtagtgaattacacacccttggtggatgtagtggaccggtgctcagcattcatttcgacttccgtcctcctagtaggtcttcctggtttgcagaggtagggcacctggaaactacattacccaaacttccttgcagctagggttctgtatgcaaattaggctctgccaattaggctgactcagagaagatttaagaggcagaagatttaagtggcagagcttttgactgttaacttctagcgagcatagaccttttcagatgttgggtttttgtttttccccaaaacctcccagcgtccaatcattagctccgagcgtataaagaggcggggtgatggggtcagtggctttctgaacctggcatcgggcaatgaaatattctcagagtcacaattgcaatggaaattctttggattccctactggactgaatagaggtaacagtttcacagtgggccaggcccaaatttctgtccaccctcccttcccccacccccgcaccccaacctccccgtgtttctccctgtgtcttcccttcctcagtaaatggtaccaccattcatccagttgctcctaataaacactcaggagttggttcttcaagtcttatcagtccccaacatgcaagtcacctgcaagtcctgttcaatctatatctaatatatacccaatatgaccacttctccatccatctccactgttaacaccttggtccaagccaccattacctttctcctgtgctctggtaatagattcctaattagtttccctgcttcctgtcttgccccttgataacccattttccatatagctggacgctgcagaacattattttatttatttgttattttttgagacagagtcttgctctgttgccgaggctggagtgcaatggcgccatctctgctcactgcaacctccgcctccctggttcaagcgattctcttgccttagcctcccaagtagctgagattacatgcgcccaccaccatacctggctaatttttggatttttagtagagacagggtttcaccacgttggccaagctggtctggaactgctgacctcaggttatccactcgcctctgcctcccaaagtgctgggattacaggtgtgagccactgcgcctggccagaacattcctttaaaatcataattcagataatttacactcctacttaaaatccttaagtggcctcatgttgcatttagaattcgaatctttgctgtggctcaagaggtcgtatgagctgacctcactctaccatgccccctctggctcaatgctctgtggtcattctggccttgcagttctgcaaagccaggatctcctgcctcagggcctttgcacttgcagtaacttctgcctggattggtttcccttcagatcgtgaaatggctggctcactctcctcatggacttttcagctcacttgtcacctctcagagagccttttctcaccaccctcttgaaagttgtcccctgtgcctatcactatcacagcattgatcactgtccaaaactacatattattactctttcattatcagtccctccaactaaaagcagacatagtataaacaaggattctgtctatgttgtatccctagtacctctgcacagagtagatgctcagtaaataattgttgaggcggggcatggtggctcacacctttaatcccagcactttgggaggctgaggggggtggatcacctgaggtcaggagtttgagagcagcctggccaacatggtgaaaccccgtctatactaaaaatacaaaaaattagccaggcatggtggtgtgcgcctgtaatcccagctactcaggaggctgaggcaggagaatggctggaacccaggagacggaggttgcagtgagccgagatcgtgccactgcattacagcctggacaacagagtaagactccatctcaaaaaataaataaaaataaatttaaaaaactgttgaatgtattaacttctttatgtctcattctagggtgcatgtgggtttcatatgaagacataaagcattctaaatattatgtcactgttaggtaacatgttatgttatgttatgttatgttatgttatgttatgttatgttatgttatgttataggcccttcctctcagcgggtttctagaactgggttctctctttccttagtactgagaaaagtgatagacttaatggagaaagggtggggggctacaaatgaagctcaagagactggcattgtccccctcccacaccccacagtcagggaccactgggggtggaaggggcagggatggggtccttcagaatacacgctcactaattctttcgctcagtccttcacccgtctcaggcccacatcagttctctgcctatcctatacgtacttacctgttgtgtgcccagaactaccccttagctagcttccctacctgcacatcatttgagggttacctaatccccaagccggcccaaggagtcagacacagtctcctctcctccttcctttgttgccccaaagacaaggtcccagccctcttatgttaggattgggttgctaatcactgcagcagaatagtaatgaaaatttcttggagctgtggttcctgactcctgctgagagaaactgttgtaagggacaggatcccagtggcttagaatgagccacaggtggggtttggagtgccttttcctttcccgtaaaaacaaagacaagccaagaggcaccctcaactcctttacagtgctttttctacacatcattggtgcctgtggaccctaagggcttctcattctgtgcgcttctgctgtgtcttggagcaatgtctctgggctcctgtttacagggtttccccatggctaggcagaaggtactggggttagtgcttctacatcagggtcgccacaaatcctgctagggacagttgaaggggcctagaaggactgcaagggtgttgctcttggtatatactctgctgccctatcttctgcagtcaacggctaccggagaactcctccagcttccataagcaagggatgacaagggagtgtctggattgcctggggttcaggcctccgggtttaaacaactttcaagtaatctggtaaacttgggtgcccccctgtggttctgagtggaatgtgtccattttgccttcagggaaggcgatcaggttagcaggggacatcctctgtcaccttgctactcagtgtgctttgacccacccaccaccggcagcatctcagggctcattccagacctactttattggagtctactttgaacaagatctacatgttacagtttggaaggcactgctctggcagcccctaagatggccataaagccctcctcttctcactccctgcaccaaagaccatgcagctcccaggcagagttgactctccttagggactaaagaggaagattaggtcacatcccatttccatacccctaaccacttcccaaggtgtgcttttcccaaaacagtatgcttggttctcccttgagctttggatcaacctcttcaaacccaggcatcacggctgagggcagtgagtttgaagtgactcatccttgtcctcacagagctcatgacattcatttttttcaagcttatttggtccagtccatggcatgtacagcagaaggcctaagctgtgcacggtgctgctcgctccttgccacggtaactgaacccctgttgtagaggaaatgggcctgtttatataagcacctgttatgggattaaccccaagagtgttggtctgagtctcagttttttccaacccttctgcactgtgcctccatacagattgcttctctaaaccatctggctttaagttaaacttctctgagcagcttggatttccccacagcaatggatctttttgcatggatctggattccatttaggggccctgcaaaatgttgaattaaagatcaggagccctggtctctacttcttcctctgcccccaactacctctgtgacctcaggcaagttgcaaataagtgtgttcatacctgccctgcctttgtcaaaggatggcgtggctgatgaaaagtgtgtgcctagaagctttgcgagctacgaagcactttcggtaactctgaaccattttcaaaatgtatatgaaagtgattgctattgaaacttaagataatttgcagatgaaacctaagcatctttctaatgctcaggaatgcttgcaagaaggcaaaaatccaacagttgagatgtacttggggagtcagtcccttctccagaggggatgatcatctttctagaatctttacagggttggtgtgagtgtgtgttgttggcagacagggagtgctcgcatgtagttaaacggttgcctctctctctctctctctctctgtgtgtgtgtgtttgtgaaactggtatctggttaggcccacatgagctgtcttatgtgtctctctgtgcagtgccgtgtgtgtcattcagctgttaagcgttgagagacctgggttctggtttggtgaccttgaataaatccctcagactttccaagcctgtttccttatttgtaacttagtggtttgtcccttccaacttgcgtacagcttggaggggggggccttcactactgatttcactgtctagtttggtttctgggtctctgttccagtgggccagccactctttgctggcgcctccctgtgccaacttctgtacctgaattgttgctcactgaagagctggcatttagctttttggaaattgtctctaactcactggaaatgcaggaagcttgagtataaaactcactcagaaaaaaaaaaaaaaaagaaaaaaaagaacacacactcagaagaaaccgcagggcctatcagcctgtcgtcatcgagcagactagaatagtatagaaaaccctaggcagagaggaaatgaacttcagagaagggaaacacacggctaagaagagagaggcaagggcaggagtgaaggagagagctgaagcctggggctccgagatggtcagaggatgggagacggggcagtgaaacaaggcttcttgtatcttcagcagcagcagacgtttggaaaggtaggagtgaggctgggctggggttgggcagggggcctgggaggctgctagaattcctgggttggagagggagtttcatattcaaaacccttataggtctgactgtgcacccaccaagttagacccagagctcaactttgggagggctcttttcctacccgacgctgtctcctgaaccaggccccaaccaggtcccaaactgtgctccttactgagggctgtttgccctgggtgggggtgggggatgtgctgctttcatctcttgcctcttttgctctcttgctctatgttgacttcttttcaccggacaccttggaagggaatggaaggggcagctggagggacagtttaggatgacaatagaggttccttcccaaccccagtggggtgcatgtggctggtgttcagcttgggctggggcctctgggggcctggaccccagccggctgtccatcctctttccccttccctggcctccttgaaccaggaagtcctcgtcccctaaccaacactggggggcacacctgtctctctctcatggcccaacctatcaaggaatgaggcagcaaggttcaggagggtggagagaagttctccttcaggatttcgcacagaaggagaatgaggtctccagcccgggtcacacgccgccctcctcactccctcctctgggcctcggccactgccccgctttcctccccagactggagtccactgcggtgggcctgtttggccttcttgcagcctgctttgggctcatcccggcgttgctttctgcctgggcagtctctgctcttgctcgtgggcctccttctcggggctggcggctgatctccgattttctaattcctgcagtcactgtcctcttctctgcctccctgggtctcatgtgatcttcacctctctctc

SEQ ID NO: 11982 - DNA, 6000 bp, Homo sapiens
ggtcttgctatgttgcccgggctggtctcaaactcctggcctcaagcaatcctcctgccttactttccctaagtgctgggattacaggtatgagccactgtgcctggccatgggtgtcctgtatttttatttgtaaatctggaaaccctatgagtagtagtttgtacaaaagtagtgaaaggcattacagatagagaaaacagcatgtgcacacagcatgagcccaggatgagaggcaagcgagaagccattgggtgggaaagtgcaagtacttctggagactggaaactaggctggtggggggtgctggggaggtgaagctggagaggtcatgggggtcagggctgagtcttgatactatcctggaggttgggctttttcctgtggacaaagagtgtgtgagaattttaatcagagaaatagtccatttgatatttttatttctatttaaaaagtcatcttaaaatatgccttttatttttagttctcttctttctaagaggtggtatacaagtcttcatttatttatataaaaattatatttataggcatgaatatatttataatataaattataaattaattaatgtagtaataaatgaacaaaaattgtcaagcccagtttgacagaacctcgcctggagagtgggcaggtgtgactgtctgagtggaggggcggggacggtgaccttggcctcccagtttggggctccgctgagggtgtcttcctggctgcttacgataggaactgatcctaggatggcctagtaagaaattacagggagcagagtttcccttcaaggaaggaagaacattctagtggattgtctgaacttggtgactatatcccaaacaaataaaagggatgctccgttagcttctgtcaagaatggtgcagaggactgggtgcggtggctcacccctgtaatcccaacactctgggaggctgagacaggaggattgcttggggctaggagttcaaaaccagcctggataacatagcaaaatcccattgctcaaaaaaaaaaaaaaaaaaaaaaaaaaaaaaaagctaggtgtggtggcctgcatctggagtcccagctacttgggaggctgaggtggcaggattgcctgagcccaggaggtcaaggctgcagtgagccaaggtcctgccactgcgctccagcctggggaacagagtgagactctgtatcaaaaaaaaaaaaaaaaaaaagatgaagaggtaggggtgcttactctaagaagagatgaagagatggggctggaatttgccttcaactccaaatttttaagatgcttcccagacattcccagacttcagttagcaggtcaggccagttctttaaagagttagaaaggatcaggattacacatctacagaggcagaatgcagaagaagcttgtccaagtaagagcatgaccaggtttcaaggcatctgacaacgaataccactttggccccttcagacttgcctggaagtctaaggatgtgcctcgagtgaccctacatgctgagaattcacacttctgagctagcagggcagccgggcaggcattaatagctctgtttcacagatgagaacactaagaccagagagaggaagtgcgattcccatgagtcgcccagccagttaggagcagagctgaggctgtagcctgtgtccactgactgtgggccagcatgctttccttggcattgcccctgacccacagatacccagcttcaggcgggagctccctccctagtgctgctggctgagggagagcgagctgaatgtatctttggagaggatggcagacatcactgatgatatgatagtggaacacaatgggagctgtggctgggaaggctcccctcccagtttttccaggagaagccaggaaaaagctctgcgtgtgggaagaggccacctgggaggcacctgggggggccctctgtgaccctctgtggaggctgaagaactgagaatgcctcctgaagctggtgttttgaagcaacagaggacgaactttcaggcttcatgcatgggcatctagcagtgtgggaaaagcagaacttctgggaaatgagaaacataagttaaagctgcattttgcctctgtttatttaagccattcaaaaaggagggaggatatgtctcctggcccacagttctcatactcaggaaccctcatatctgggagctctgtcatgtcagttgcatgtttaaagggcctttgttctagaaccttctgctgtacacacaggagtgcgtgcacacacaaacacacacacacttgccattaggaaaagggggactggattttgaagtgcaaagagttgacaataagtaaaaggacaaaagtactgtatgtacctctgcaatacaaagtcttcaggctgttctgcctggtgctgttatgcagcatgtgaatttcccgagaggacggggggcgggtggtccctctcccacatcccaggaatggattaaagtctctcggtgggactgaggtcttagggtccttcctttccagctgggtctgggaggagtcaggagtgcactggatttaggatttggggtcttctcccatcactccctgttccacggagagacaactgtgttcccagcaggggtcagtaaagcagtaggaccactaggggtgagtgggggaggtggtgactggaggtgatcaaagtctactcggagtgaccagacataggcgaggtcttcccctgaatggatttgtgagatttactcctgacttgggacttccagggcagtcacctggacgaatttccagcatttaaccgtggacagacacaagtcctcctgccattcgggaaaactgaaaacgtgagtgagcggtcagctaagcctgggttcagaggtgagaggatgttatctgcaaacatccatctttgcagtgagcaaacagacgcatttggcttgaggtggagggcctggccctaggagacaaaaagaccccctaccaaacagcatttttctctaaatgccccttgaattgagacacagttgccgggtctcctgcggtcttattctctgtgaggaatgtcttcctcagctccacaggccggcctcaccaattgtcttgggattaacccttggccatcccgatcttgctctctcttctctgtgttttccttccagcctccatgtcaccttttgagtgtcaaggcatcttccattggccacgaaatgacagagaagtcatccatctgcagaagcctcctgtgtgcaccgtggaatcaccgtgtctgtacgggcacgaatgctttaagaaaacagccctgcttcttcacaaactctagtcatttcacttggaatctgtccatcaagaaattaggtttgcagagtccaaagcaagctccctagagctttacaaacaagctggcgggcaaggcagcgcgccctatagtgtctctgtggagcgctaagatctgtgacccctttgccacatggggtgtgcgctcagactgggctatgaatatatcagcctctctccacccgcacttagggacagaagatatggagactccaggaacttcatgaactatttgctgtggtcttctgtcccgggatagtccgggtctcactcccagctctccagagcttaaccctccctctcaggggaatgtttgaaacctacgaagaattctcaggaattcgaggtagaaggtggcagagagacttctgttcctgggggccgagctgttgtgctgataccgtcctcttggcgtctgccctagtggggacccttgattttaacttgaagttcctggactgggtctaaccttagcatgtgtgcctgagtgatggacttggtatttacaccagccacgctgataagtgcacatgtgtttttaatgttttggctttccacaccacaaacacacagatgtgctgtcgcccgggctaggacttgagtagggtttttctatttaaatatatattatatatttaaaaaagtgtcctcccagagctaataccgttgctagcagctcttcctgccgccacaccgggcaaagtccacccactgccccagtgttgagggccaccatgggcggccccacctggagaggtgctgctcacagcaaacagctccaactgcgccttcgcctcgccttccagggagcccagccaggcccactgggtatttacaagcagacctccctcgcttcagccttcctgaacccctgttagttgggaaaccacctgtctgcaccgcagctagagaaccgaggagaggagccgctagtctaaagggctgttggttgaaattaggaagcagtgtaaagaaaaagaaaaaaaaagtttgggaggccaaggcaggagcatcacctgaggtcaggagttcgagaccagcctggctaacatggtgaaaccccgtctctactaaaaatacaaaaaattagcgggggcatggtggcacgcggctgtaatcccagctactcgggaggctgaggcaggagaatcgcttgaacccgggaggcggaggttgcagtcagcggagatagcgccattgcactccagcttaggcaacaagagcgaaactgtctcaaaaaaaaaaagtcttcataatttcatgggtttgcaagtatgatccaggctccccgcttctctgcaagccaatgcgagttaattacagcgtccgccctggtctctctccaccccacgccgtgatccattccccttctttttctccccttgtctctttcctcctcccccttttatttatgtatttttggttttgttttttaaggggtgttgagccgcgtctggttctagtaaaccgaacccgctcgcgagggaggcgattggctcccgcgccggtgacggacgtggtaacgagtgcggctcgccccgccgggagctgattggctgcgcggggcggctccgagggctcggccgtaggagccccgcgcactccagccctgcagcctccggagtcagtgccgcgcgcccgccgccccgcgccttcctgctcgccgcacctccgggagccggggcgcacccagcccgcagcgccgcctccccgcccgcgccgcctccgaccgcaggccgagggccgccactggccggggggaccgggcagcagcttgcggccgcggagccgggcaacgctggggactgcgccttttgtccccggaggtccctggaagtttgcggcaggacgcgcgcggggaggcggcggaggcagccccgacgtcgcggagaacagggcgcagagccggcatgggcatcgggcgcagcgaggggggccgccgcggggcagccctgggcgtgctgctggcgctgggcgcggcgcttctggccgtgggctcggccagcgagtacgactacgtgagcttccagtcggacatcggcccgtaccagagcgggcgcttctacaccaagccacctcagtgcgtggacatccccgcggacctgcggctgtgccacaacgtgggctacaagaagatggtgctgcccaacctgctggagcacgagaccatggcggaggtgaagcagcaggccagcagctgggtgcccctgctcaacaagaactgccacgccggcacccaggtcttcctctgctcgctcttcgcgcccgtctgcctggaccggcccatctacccgtgtcgctggctctgcgaggccgtgcgcgactcgtgcgagccggtcatgcagttcttcggcttctactggcccgagatgcttaagtgtgacaagttccccgagggggacgtctgcatcgccatgacgccgcccaatgccaccgaagcctccaagccccaaggtaaggctgcctcctcccacgtgcgcgagccgccccctccatcccccggccggagctgcaggagaacccgcgccaccctacgcccgcccgccgctgggtcccggtgctggggactgagggcccgaggttgctcgcatgctgtgcacgtgattcctaagcgcgtctggtctgtcccaggtatcgctcagcgcccctcgcgacccaggtgcacggcggggc

SEQ ID NO: 11983 - DNA, 6000 bp, Homo sapiens; identical to SEQ ID NO: 3106

SEQ ID NO: 11984 - DNA, 6000 bp, Homo sapiens
gcaatgacacaagctaagggaaaggcatagaaggacccacacttccacctaggcgtttgcacatatcctgtctgtaactccagtgggtcttcagagacaatctacaattactttctccaataaaaaaaaaaaatcttgagtgcttcgtatagaacagatactagatcaaaaagatgattataggctgggtgtggtgactcatgcctgtaatctaagcactttgggaggccaagacaggagaattgcttgagcctgggagttcaagaccagcctggtcaacatagtgagacctaagctctacaaatagtaaaaaaaaaaaaaagaaaaaaaaaattcagccaaggctgggttcagcggctcatgcctgtaatcccagcactttgggaggccaaggcaggtggatcacttgaggtcaggagttcaagaccagcctgaccaacatgtgaaaccctgtctctactaaaaatacaaaaattagctaggtgtggtggcaggtgcctgtaatcccagctactcggaggctgaggcaggagaatcacttgaacccaggaggcggagggtgcagtgagctgagattgtgccactgcactccagcctgggcaacagagtgagactccatctcaaaaaaaaaaaaaatcagccaagtgtggcagcacacacctgtagtctcaactactcagaaggctgaggtgggaggatcatttgagcagaggaggctaagggttcagtgaactgtgatcaccccactgcactccagcctgggtgacagtgcaagaccttggctcaaaaatatagatgattatacatgatcaccatctcaggagttcagatctggatggagcatgggcaggactcagtatcgtaaaaaatgttccttgcaaaatgactaatccactcccagcatgaaggtgtggacaatgtacgctgagagcaaagaagaaccatcaattcatcccggtgttatgaaggaagccttcaacaaagtgacagtggtacaaagcccttgaaagccaagaaggcaaagggggccttcagggatgcaaatgtatatttttttgttttgtttttgtttttgagacggagtctcgctctgttgcccaggctggagtgcagtcgcacgatctcggctcactgcaagctccgcctcccgggttcacaccattctcctgcctcagcctcccgagtagctgggactccaggtgcccgccactgtgcccggctaatttttttggtattttttagtagaaacggggtttcaccgtggtctcaatctcctgacctcgtgatccacccgcctcggcctcccaaagtgctgggattacaggcgtgagccaccgcgcctggctgcaaatgtacatttcttgtacatggcgtcccctagcactttaaagaaaaatccccatttcgggccgggcacggtggctcatgcctgtaatcccatcactttgggaggccgaggcaggcagatcacaaggtcaagagactgaaaccatcctggccaacatagtgtaaccccgtctgtactaaaaatacaaaaattagctgggcgtggtggctcacgcctgtagtcccagctactcaggaagctgaggcaggagaattgattgaacctgggaggtggaggtttcagtgagccaagatcacaccactgcactccagcctggtgaaagagcgagactccgtcagaaaaaaaaaagaaaagaaaagaaaaagaaaatccccatttcaaaccatgacctataacttcctcagtagtctagctcctcccgctttactttccagcctcatcccctcccactctccctgacaccctctgcacctccagccacattgcatcccatggggccaggtccttcctgctgtaagactgccttagctgctccctctacttaggtgcacttgcccgggatcctcctatcctctcatgaggttttcagcttaaacatctccttggagcaagcttctcctatatctcataccaaaccagttgcccagtcacaatcttaccaccctgttacaatttggtgcactgtaagtgaacttacctaccttaatggtgcttttgtgtgtgtgtgcgtgtgtgtgtgtgtgtgtattcgacgtgtacttatctttgcctcccctggcctgtcttgttcactgctactgtccctggaacagtgcctagaacacatagtagatgctcaacaaatagttgtcgaatggagtggataaacgaacaaaggcatgtgcaacatagtgtttcctgaatgaggatgtggctcggagacatgaaaatgcaccatatgtttgaggaacagcaagcggtttgctgtggctgtgggcaagggtaagtctgggtggaagacgaggtggggagggttgggagagtcctatagttggaggctgactggatagctcagaactgaatggcctttcatatcctggcaacaggagccatggatcatttttaaggagagaatgttatgattggatcatgacttttaaaaagccattccagtcacagtatggagcttgggcaatggaaaataagctggagtgtgggtggaggttgggtggggggattgcagattgtttaatcagagcaagacttgatgacagattgatctagtgcaacatttggagggtagaaatggaaagtgagaacagagacatttctgaggcaaaactgctgggtcctggggaacaatcagatccagggctttgagagagaaggtgaaggctggaaggagacaaggcacgcatccgggaaggagtagaatcagcaattctagttttggatatgttgtctgaggagcccggcaaacatgtttctctgaatctctaggaattgtgccaccaccacactgttcctcctaccccttttctcttttctttcctgttttgaatcactctcacaagtcaagaccgctccctgcttcttagcccgctggggagccaggccagcaggccccacattcctgaggaagggacagggttctggcctggagggtctagcagaagccaccccaggggagggcccgacaggaaggaaggtaggcctgccggaggggcatacaggagcttcctctcccgccacagtgtccagggccaactgctccagccctcaggctgggtcaacaggatgggacagcccaggcggaaggaaacctgtggggagggacaccccgcagacagaagcagggacatggggtggggagaggcaggaagagctgccgggctgctgagctggcgcctctccagcagactcaggaggggcggtgacaggaggccattccctcctcatccccgcagccctgggcctctctggtcctggccaacagtattactatcattattattgctgttgttcgctagcctgggccttagatacattagaaaaaaaccatcggaagatacgcatagcattggcagtttctaaaagaattaattcccttcctgtgttcattctgtgattactgggatagaaatgctatttgcattaccagcctttcattcagttacagagacgtgagtgctcgaaggagagacagtgatttttgccttaaattcagcctgtccaaatcggataagatctccgatttgctttaagccccgttatcactgccttcctctccaacaacagctgctgtgatcacgcacaaacggccaaacgggggcaaatccgtgccaaagcagggccatgggctttcctgatcagaaggcctagccccagcccccaggcgcagcacacgggcggcttcctttcagaaacccagcctgcctcccaccagctggagtgggtgggtggggcggtagtggtgccagtttcagggaacggccggcaaacccacctccaggcgtgctccagcgggagcctggagaccctaggagagccctccccacaagcggcttccaggcaggacgcttccagaggtcttggtccaggggtgggggtgaggtggggtctacctttgaaacagctacaatttaaacttcagctacaccgagctcaaactcgattccgcagccgagtgtcggcgccagagaaggataaaaactcgggtctacggctccccaccacgcccctggtccggtcctctgggcttccaggagtcctcacgccatcctctgggttgcccaggaggaaggatgggcggggcgggcaggcgctgcgggcgctgcagatggggagggcgagcccgcggcacggcgtgagcgggggagaggcgcgcgagcaggtgtcggctccgtgacagggtcccccatcccgcgccccagtgctccccgaggcttagtgaggcaaaacccagcaaatgcttcagaaatgcagctcagtcggtcaccgggttctgcttcctcatcagacgcgcaagaggatggcgcttccaatgcaaatctcttggctccggccccttggctggcagccgccgcgtcccccgcctgcctggcgtcccgcccactccgtggcgggctgagacgaggcccggcgcggaggggacggggcggagcgggcatccctccccaccccccacgtggggctggccctccgcagtgcctgggcgcgctgcagtcgccgcgcctccccggccgcggcaccgcctctctaggcaggggcgggggacgaggggcaaggagtgggcgaggggtgggcgaggggcggggggcgtcactcaatcaggtggcctctggagttccccggggcagggcagagggaacacgctgccggggattgtgtacacgctccactgacaccagcttcacgctgccgggcagtcgccgatcacgcgtggccccgcgagcccattggccggcgcctcacacacctttgccgttgattggccggcctcaggctccgcccccacccccgcccgcggcgcggggcaggctgagcggctacctgaatggggagggggcagacggcgctgagcgcggcggcggcgggagcggcgtcgagtgtctccgtgcgcccgtctgtggccaagcagccagcagcctagcagccagtcagcttgccgccggcggccaagcagccaaccatgctcaacttcggtgcctctctccagcagactgcggtaagtcatttggggatgcccctgtgcttcctcgcctggtcttgtctggggggccaaagggggcgcgaaccccgagccccggacatcagccatgcctgagaattggggctgcagcggagtcgtggggaaggaaagggcttcctgcctgcagactatgggcattagtgagggcgtgtgtgttcgggagggggtcgaaccagggggctgggatcttcagacagggacaggggtcttgctctagatgtactgaggggaagggacaactccgcatggagacccgagagggctggtgaggaggaggatgacgagcgggggaggagtggggagggggccgttgccctgcagcgaggttggggtacagtgtggaacgagagtcgcgggagggacaagggggctaccctcacctggtaccgaggagagatgcccggtctggctcaggaacgcgagccaggggaggaaggggctgctcgcaagcactcgggaggcggggtgtccacaggagaggcgagtgggctacccatcctgggggtctgaacccacgcttggaagacgggggctgctcagcagatagctcggggctgggggaaggggcgcctgtcgtcggagcggggggatgacacgagggcccgccgacagccctgggggacgagttgctcccccagacgtctggagggggactcttaccccaggggcaggtggccgccttctgacgactccttggaagaggcggggagccgcctctggggcaggagggtgggaagcgggacccagcagctggggcgggaaggtgggcggggggagctgggccgcgagacgcgggggccgcgcgtctggagccggggcctgtgggggctgcacgtctgggaacccgtggagacgcgcggcgggaggggcctggagctgccggaagccacggggagggggcgccgcgtctacagggagagac

SEQ ID NO: 11985 - DNA, 6000 bp, Homo sapiens
aggagctacagccaagtgccctccctccttttagatagagctgccacttctataggcctgatgatagtcttgatccctaaaagtgcctgagcagagtcacagaatatggcacccttggtgtggtgaatcacattgtgttcagaacacaaagtaggagaatactttcccacccctttttcccctataagtggttgtataaataccagaggactatttccttgaatctcattgcctggtggtatttttgagaaataaatactattttttttcatatattttgattttattgtagagcaggagtgatgatcaagatatctaacagatgacatggcataggaccaaccatttagaatatttctaaagtataatccgattaatcagattggctgttggtaagcatatcttaccatactggtgcatcctgatttaatattatccctgttttggaagatcataacatgaatctgtgaaagccctgggtttcagaggaaagggacctctgaagggggaagtcaccatgttgttcttgttccctaaattataagaaatattttctcaatactgaagtattgtcataaacaatatagctcagtgggaaatgaatgtgagcctcacagttagatggattgaggatcaaattcctgttctgcctcctaagagatcatagatcctgggcgattaatctctatggctccacatttctcatcagcaaaatgggaataataatatataatattacataattatgggggttctgtaaacattagatgagaaaattatttgttaagtgttaaaaaatactatgaattattattgtactttgctcttgcgtctaactcattctttagaataagtttggctttatcctcagttcttcatgcctagggattctaggcaaactcacccaacaaatgcaatgaatgtggccagtcatgtagtaaccagatagagagtcaggaagttgcatcaactgagtcattaatcagctcattcatttatttgcttattctttcattccttcagacaaagtgcatagtgaatgttgaggaatcaatgatgacaaagagaagatcactttagcagctcacagcaaaagcaagagacagataaaaaaaaaggcaacaattagcaagcaacgtgagcagtgcagttttggagacatgaggagaaggttattgaaatttaacacagagagcatttattggacctggagaaattaagaaagctttaccaaagaattatcaaagactgtttcttaggatagatttaggcacattaagttctggtataaatggctcttggtccctttggaaatttcagactaagtgggacatttactaggactctttgtaaatatgagatcaaaaccttaaagcctacacttccttattccagatctctaataaaacacaaagcttttgggttcaagctaccacagaattcaattgaacagaattgtttagttctttataaatattttatccttcatggaggtgtggtagatgaattttaattggcttgttcttattactcgcttattattattattattatttagaaagggtctcactctgtcatccaggctggagtgcagtggcaatcatggctcactgcagcctcaaccccctggactcaagcgattctctcacctcagcttcctgagtagctgggaccacaggtcctgggcgtgccaccacacctggctaatttttattttattttatcttgggtagagacagggagggtcaccctatgctgcccaggctgtactcaaaatcctagtctccaacgatcctcccacttcggcctcccaaagtgctgggattacaggcatgagccactgaacccagccctactccctaaattttaatgcatcctgaattctgccccatttctgaataatcagcaacacacaacagtgttgctgttgcttagatgcatgatcccaaagacatattatctttagtgtgtcaggatccttaaatgtacctacagtctccttaactggagttccaaaaacaccggagtcaattctgcacatccttgtgttttctaattacttaaaattcatcttcagacattttttttcagaatgacactagtacttccagtgttatggtttaaggttgattttgtttttctgcaaaagaaataaatcagtctctacatttttctctgtctctttgtccctcgacccctccttttttatttgcatttcaggcttctctttcttagtgtctacttttccctcaggaaattgtgcattcctgcttttcatttattctaattgcgaaaattcacatggataaggacacagagacgtacacagacacacacgtggaggaacagatttttaacagtctcggctatttaaaaacacaggagcactttaatagaaacctcaccactcatccattagtcttctgccaattttctgctgtatttagttcttcgcaaaacacttctaggtgtcgggtttggactctcttctttccatggataattttcaaatcaagcattattggaaagtgttcttagacaacctgcattttgccagtgcacttcatctttgtggctgtgcataggttacctgtcactgtgtgtgtgcgtgtgtgcgtgtgtgcgtgtgcgcgcgcacgcgtgtgctggaaaaggcctgaatcactttggagagatactctggttttaacagtgctttttcttctaggtacgtcacttctcctggtttaggactgtaaatcaatgcagctggagcgcttttgaaattgctttcattccttgcagagatttccaaaagcaggctggcctggtggtttgaaacaggctctgagtcagtttgcctgagttcacatactggcgccatcacttgccagctctgtgaattacatcctgttagcctttctgtgactcagtcttcccattgataaaatggggttaaacggatgatatccgtgatcttaggtttgttggaatgattaagtgagatagtgtgtaaggagtgcttcgcctggaaaacagtaaggtcttaatgcatgccattattattgttgcacaggagtgatacatgactcaatgaggagacacgcaaaagttcaagaggctgcaaaagtggttcaaatattttattgctgtgtttggcataacttgcttccatatctgtccaatcagaaatttgttatttggtgtggaaaggactgatgaatctcggcaaggtttctttccccaagtaaatcgcatttgttctggaatttgttttgacctctcctctaacttctccctaaatgcccatctctaaccactacggaccttcacccactgccctgttctccttccaagacatgggagatgacagctgtggcttctgttttcacaccatgactgcagttgtctaaaagccctcccagttcctaatgaaaatcccaactcataattcaggttttctgcatctagtaaagatctcaaagccgttccctaaattctacaattattgcctgtttatgtttatgggtccctttgttcaaatgtttatacgctgcctgtgggaaatcatcttctgataatttttctttcttccttcacagaagcacagagatgtctcctgtacagcccattgctggctgttagcacacctgatatatgcttgttctcacatagtatgtctgtgcagccacaggaggtttttatgtggaacttccacaccagtgttaaagacagccatagccaccaaagagatccttgtaaaatacaggattaggatataccacaggaattaataattctcaagccactgctttaaattgtagccacattgtttttgtagggaagttgctcaatttatatacacagaacatgaagggttgcattctgatcaggacaccagtttcatttaagaaccctataccaaaaggtacttagataaccctctttaatatgcacatactatattgctttgtgcaacatattgctttgagcaacaaatgatgctaattttcttgctaatttgatcctctctgattattttcttcaactcctaaaagtctaagtgaatacaatgaaagaataccatctgtaaaaactgttttttaacatatttttcctcagagtcaagaatacatgttttttaaagacatttaataatgatatgggtttatcattctctatcaaaaataattccattggacattatgccaattttcttcttagggtccctcgactaaatagtaactttaaaaacatactgctagtttgctatattttagtaggtcagcatgcacaccaaaagtgtattaaggtggactgctctatttattgatttgccatgaatctgctaaaggctcaaggcaattgtctgtggaaaggggcgggagggccatacatgatcgaggtcatgcgcatctagccaatttgtaagacgatcccgccgccctaagccatcagcaatccttagtataggggcacactcatgcattcctgtcaagtcatcttgtgaaaggctgcctgcttccagcttggcttggatgtgcaaccttaataaaactcactgaggtctgggagaaaatagcagatctgcagcagatagggtagaggaaagggtctagaatatgtacacgcagctgactcaggcaggctccatgctgaacggtcacacagagaggaaacaataaatctcagctactatgcaataaatatctcaagttttaacgaagaaaaacatcattgcagtgaaataaaaaattttaaaattttagaacaaagctaacaaatggctagttttctatgattcttcttcaaacgctttctttgagggggaaagagtcaaacaaacaagcagttttacctgaaataaagaactagttttagaggtcagaagaaaggagcaagttttgcgagaggcacggaaggagtgtgctggcagtacaatgacagttttcctttcctttgctttcctcgctgccattctgactcacatagggtgcagcaatcagcgccgaagtccagaaaacagtgggagaagatataaccggattcaacatgggcaatgtgcctacactttcattcttccagaacacgatggcaactgtcgtgagagtacgacagaccagtacaacacaaacgctctgcagagagatgctccacacgtggaaccggatttctcttcccagaaacttcaacatctggaacatgtgatggaaaattatactcagtggctgcaaaaagtaagtgattgctttcagtttctaatagcacggacctttttcctttcttgcactgcagctaacttaaagttccttaggggagcatttgtgtatttaccttttgctccaggggggcagtgtttgcaattgcaagacggctgtctgggtttggcttcctgggtaagccaaggtttgggggcttgcccaaacctatgaatgtgtgggggcaccccgtttgtgtgtctagccctggcaaattttatgacatttttggtttctcttttctaaagttcagcattaaggttctctctgtcaaaacactaccttaagaaagaaagtatgtacctcttaagcaagttggtgaaaaataaataataatgacaatattaattaataagatcaaatcgattttgcaccagaaaattttgtgccgctggggtggcaaatcatcacaaagtatttgtttttttaacctttataaaaattaacatgaagtgagagtaaatataaaatatgatatttggttggagaaattgtatatttatgtaaagggaactgttagtttcagcaagtggtagaatagtagactgatttctgttaaatatttttttcttctgtccttgagaaaaaaaattaaaaagatacattgtaatgttaactgtcggaaaggggttgctcgctcacgatgagggcatgctggctgttgaggaagacatgcacctgcagatatgggctgaacgcagcatgtagtctactatattcctgaaatacctcccttctcagggcattgtagttagagacagta

SEQ ID NO: 11986 - DNA, 6000 bp, Homo sapiens
tccctacctgctcactgatgtcatggaaggaccaacaatttcactgctctggtagaaatcaggttgtcacgccattgttcttaaaacagaaccattgactttaattggtgcacaagtgtaaatgactgataatagatgcttttcaaaaacagcatttagagcaaataagcaagagaaggcaaataggcagagacagttgaaagaggagggaggagactagaaagagaaagagcaaagaaaaaagaggccaaagctctcaagtcacaattttcctattctacattttggcttagagtagtccctctttcccttgccacttagaggctcttgcaactaatgaataggtgatgcatctttacaacatgctacatcctggagctaggaaggtcttgtgcttcattggttttaagtagactaagtttctgggatccctaccttaccctaagatgtcccttgacgagtggctctgggagtgtcaaaaatgtctggcatttctatcagaatgaagtcttcagggagtcccatatttaaaaccactaaattttattcctgctaaaacctcgaagcattgatttttgttgcaggaagtcagggaccccgaacggagggactggctggagccatggcagagaaacatacattgtgaagatttcatggacatttatcagttcccaaataatacttttataatttcttatgcctgtctttactttaatctcttaatcctgttatcttcgtaagctgaggatgtacatcacctcaggaccactgtgataattgtgttaaccgcacaaattgattgtacaatgtgcgtttgaacaatatgaaatcagtgcaccttgaaaaagaacagaataacagtgatttttagggaacaagggaagttacaatcataaggtctgactgcctgtggggtcgggcaaaaagagccatacttttcatcttgcagagagcctataaacggacacgcaagtaggagagatatcactaaaatcttttcctagcaagaaatattaatattaatgccctgggaaaggaatgcgttcctggggggaggtctataaatggtcgctctgggaatgtctgtcttgtgcagttgagataagcactgagatacaccctggtctcctgcagtaccctcaggcttactagggtggggaaaaaagtccgccctggtacatttgcggtcagaccagttctctgctctcgaaccgttttctgttgtttaagatgtttatcaagacaatacatgcaccgctgaacatagacccttttcagtggttctgcttttgccctttgccttgtgatctttgttggacccttatcagtagttctgcttttgacctttgtcctgttccctcagaagcacgtgatctttgttctgctttttgccctttgaagcgtgtcatctttgtacctactctctgtttttacaccccctccccttttgaaacccttaataaaaaacttgctggtttgaggctcaggtgggcatcacggtcctaccaatgtatgatgtcactcctggcggcccagctgtaaaattcctctctttgtactctttctctttatttctcagccggccgacacttaaggaaaataaaaagaacctacgttgaaatattgggggcggattcccctgatagatttttgtgaaaaaatcatcttggttgtatgtctgtagttaacgaagactagttagagaagttacgtgtccttatcttggggatggagaagggatgcccaaaatattggctgattttttcttacctaacaaattcctaatggtattcaccacttcaaaggggcaaataaaaagcacggaaggcaatggagtagggagatttcatgggtaagcatagaaagctaccgttaattaaaatagataatgaaaatggccaggcacggtggctgacacctgtaatcccagcacttggggaggctgaggcaggaggatcacttgaggtcaggagtttgagaccagcctggccaacacagcgaaaacccatctctactaaaaatacaaaaattagtcagacatggtggcgcacacctgtagtcccagctactcaggaggctgaggcaggagaattgcttgagccggagaggtggaggttgcagtgagctgtgatcgtgccagtgtactccagcctaagcaacagagtgagacttatctcaaagaaaagagaagaaagaaaagtgggtgttacaggtaatgtgatcgtttatctaaaaacccaagagatcaactgaaaactatttaagctactaagaaggtccattaaggtgaccagatacaagctaaacatacaaaaaaaaaaaatcaggccttcggaaagcaggcttcaagttgtatttgatttagagctgcaagataatgcttattttaattggctaacattatagtaattgttggaaaaggaatggaaaagatcaacacgacattctaataataaaattctttctcaccctagagacaaagcacgtggatttttatagtgaaataagacctgtgaaaaatacagctttggcagtttttgttttcaaatttaaaatcatcttgagattgtctcattcaaggataataagccttgtgatgaaatagctacatgtcttgggaagcccttatacttcttatgaattctgttcccatcttaatacagacccctgtattaatttgctggggctaccataacaaagaaccacagagtgcgtggtttaaagaacagaaatgtattctcttatagttctgaatggcagaaatctgagagcaaggtggcagaagaatgggtattctctgaggcctctctcctttgcttttatttatttatttattatttatttattttgagacagtctctctctgtcgcccaggctggagtgcagtggtgccatctcagctcactgcaacctcgcttcccaggctcaaatgactctctcgcctcagccccccaagaagagcctctaagcggcaagagaaagagggacgactctcggctaaatgtagctgagccagggcagtgaagcttgacaataatggcacaagagaggtggacctggcacatgcatagtcagcatggaggggatactgcgaccgagaggaggaatctagacccaaccccaggctccaacatggagtgagagttaagcagtcaattcatggggtcagaatgaaaagaaatctcacggtggggcaacttaggcagatttactctctcctgtgtgcatgctccaagtcctttgctcagaattctccccagaacctgacaccacattgcagtggtctaaatgcttgttcactccttaaaagtagccatgagagatgatgtctcaaccttcatagccgtaatgttaatcacatagcaaactcctgttgaaataatcacctagttccctttcttaataaacaagagatgctaaaacccagaaggttaagtgaattctgagaggcatggagagtttgtgccagtgtcagcatctgaactctggtctttattcccaggcaactgctctctgcatcgcaaggcaagcgagtggcaaagctcgggctagagctggcaacagaatatagaattcttggttcctcctgcagaagtgactgagaagcattagtttgttataaatggcagcacttctttcgttgggtgttgagggacaagtccctttcctgttatttagaattgagctccctttaatagcagtgcctggtgctgaagattacaatgagatgggctgcttctcaccgggggaacacacataggcatctcccccgctagcaaactgctttgatcatgagagtctgcaagctcagaaacgcaggatggctctctgcagagggacttgtgaaagcccgtatcttctgccccactgttacctgatagagttgtccaggttcttggcctgttgaacaaaaaattgaacgaaatgcacggagtaacgaaagaaagaagcaaggaaaaacaaagcaacagaagggaggaaggaaaacgtagatttatagaagacaattcacagagggcgctgcagcaagccacaagagcctgacgctccccagggattttataaagcgaaaagaacttggcaacacccttgggttccctttagaggcctccaactggttacaccttacgaaggactggcctgcgaccagtccgaggctgaagtggaaacttctgccttgttatcagaggagcgaggatgtggcctgtgtgccgcctaatcatgcctagaactgtctgcacctgctgatcttttgcttctgcgaactggctgcacctgctgttctcctgctcataccctagcccgtgcttaccctaattccctgttctcctgcctcaccaccagaggcccgggttgtctgcacagtctcattttccacgttattcctgtaatgaacccgtcctcccacccccaccagcagttacagggctgggtgcggagaccaactctggccagacacagaggagcagcaagaacccggggcaacggtcctgtgagtgagtgcatgtgggggagagaaatggaatgaacagaaataatttaggaagcactttttacagagcactaaggttctgcctgaggaggtggggcgggcgctggtaacatttggacaatcgtggttaaaagtgaccccatcagcacccgctgatccttcttgaacttgataaccttggtgaaaacgccaagcgttggagaaattcaaggaatggctgttgtaatgtacatttcacgcttagcctttcctccccgcgctgggaagaagtgctgcgcaccgcggctccgccagggggcaggagaagtcacattacacagagaactaaaaaaaaaaaaaaaaaaaaaaaaaattccccaactttttcccccaaaccttgttcctcctcaagaaaccgaatcctcccgcttcggcgtcccaggagcccgcccctcgcccgccgcctcccctgcgtccccgccccgcgcagccgccgcgctcctgcgctccgaggtccgaggttcccgagatgaaggtctggctgctgcttggtcttctgctggtgcacgaagcgctggaggatggtgagtgactctgggcgcggggccacctagcttgtgccctgactttagccgggacccgaagcccccgccgccctcctgccagctcttggtctaacgttcggccctcggtggctcagcccccgcgccactgcctgcccggtgcacctgccccctcctggtggggtctcctttcctcccactctttgcctgcccggagagccctctaggggtggtggcagctaccccgacccttaggagcccaccaggacctctccaagtccccatctccgggcgaaccaagcatccccagccagcgcctggtccagcccccagtgtcaacgtgtcggtctgggaggtggggcgggagcctcggatcgcttccacctcccagcggcgtggctgggacctctgctgctgagagcgagtgccacctaagctcggcaatcgctgattcggttgcagagttccaggtgacctccccctcccctcgcagttctgggcgtgttttcgtctaccaccttttgcttgaatcctgcaagatctgcctagatcttcgaacaaaaatgtcagtgtatgaaacttcaaaacgaatcaaaagcccacggcttattatatttatctaattggatgggaaatggtgaagaaaatgcatttttttggtacagcgtatgggaccatgaccgctgtgcggtttttgaatgtgtacctgtcctgggtccaccctgtcgtgtacacccgtgaccacagggtctgggtgtgtgtattactgtggtgtgtattatatattattgttagcatttaaatgttgtgtttgctctattcactccatgggtgttatttgtacagtacatgtttcatctgggtgcctcctggtgtcctcaaccctctcttgaaattcctgggctacaacacaatttttgcttagatttagtggaaaagtagtttttgctgttatgcaacttcatg

SEQ ID NO: 11987 - DNA, 6000 bp, Homo sapiens; identical to SEQ ID NO: 1309

SEQ ID NO: 11988 - DNA, 6000 bp, Homo sapiens; identical to SEQ ID NO: 3472

SEQ ID NO: 11989 - DNA, 6000 bp, Homo sapiens
agtacattgtaaattgtttgtagatttactttgttttctttatgaaaaaaagagagtaggaaattggggaattttaaatagttcttttttccttgtttctcaccgttttgtttaaagtttttctttctttctttttctttttcttttttttcctggcttgaaatacagctgaaataactgaattttctacttgaaacgtgtgtgcctctccactgaggggccaaggccctggaaatgtaaagggccaatctttgttacagaggggttcattgcagtgaagggcgggttctgcaaagacaaacaggtctcacagatagttgccaagggcaccgaatacatctttgcattacaccttgaactagcatgctcatatcacctgtttttattgcatgcaccataaatgactgtaaaagtttgcaaatcttgtagagaccttggcaatcaatacttcagcaggaaatctacaaagaggggagtgggaagagaagggatccagcctagtagtttgcctatttgttacaagaaccataccttgacattgagaattattaagtatgttcgattttcacggtgtctcagccagatgcgtaacatacgcagagtagtttcaatttagacgctcaatttgaaatcttggctttgcatttttatttacaggtaacggagtctgggaacattcctgtggccttccttaaactgaacttactctgggtgcttctgatctgtgacttgagcgcaaaataaagactaatttttatctgggtcaatgtggggccaactagggtggccggtcctgaaggccacgcctgcagctttagtgtttttaaatgtctgaccaccaaacgggtcatgcaagtgtatggacttttttcttttctttttagagtctgcacagtgatggtaggactgggagtactaatcaatccctgtgccatgttcaatcggtctgttctactgatttttttcttgttgttcttgtttcaccgtgttaaatttaagtctttaagaagtggacgccccgtggaaagcccgacaaatgaaacagtagaggagggtaccaaagtcccggggtcccagttgcagtccgctattgctccaggcccagcgggggcggacctcgttggaggctacggtgcaggtcggagaagatgaaatggcctagcatcccccttcccaggggctcgagtcggcagctttagagctccgacaatctgtgccctcgctttgggctgcgccagggagcaaaaaacctctgcttttttgaaagaggccggggcaacaaggtagagagccgcggccagaagcagccccgggccataaacccgaggcctggatggcttaaggctgaaaccgcctccgcccccaccctcaccctgctggccgagccctcccccctcctagccacagtgaccggaatcccagacttcccttctgatgcataaaacattcagtggcctccagggagtttttgaaattctggcggaggctgctttatccgttgtttcgccccctgggtcaaacactggtccactgggtgagttggaggagcgagtagctcagctatagattaaatttaacctgagccccggtggccgcgtcccgcccgcggtcctttctatacgagtagctttgaaggtgtcaccgagctgtgcccaaatctagaaaagaatgggaggagaactgcatgagcttttaattttcttccctttttccccccttcctgcgtgtaaactggggtaagggtgggcggtaatccccactgattgagcccgcgcggggaggtaaggactccggcgtgggtgccaccgcggttgcgaaaaatcgggttctgaacccggtcagcaggagtggcagcgccccagcagcacctaggcaggaagaggacacttcccgttcgcgtttggtgatggtttcatgtaccaggacatgggtgcggagttgtcctcagaaatagggtctctggatgctgaaatcataaagaccttttccctgaggttgtgcgcgcgggcccgcgccctccctacttcctgagccctctgcctgaggccactgcttttaattaatagtatcagaacggttcgtgggagaacctggagttcttatcaagacaatcttggtggcgttgggaagcgcgagagtaggggtggggggatgggggtggggggaatggtgtaaaaaagtaccaaagcgaaaaggaaaagtacaggctaaacgagacatttaataggaaagtgaagtaaagggttttttgacgccacattttgtgtatttagttttaggttaagagcagatgcaacataaatatatatgtgtataatttccccctaaccactaactagcgaaatggaacattgtatctactgagaacctttccctgaaaaattatcctgagcctttcttcttattgttgtccaacccccgccccccgcacccccaagcatcaggggacgactctccatagagcacatttttcatcttcagcagcttcaagccatgccatggagaatcgtaataaattagtttcaggaacaatataagtgatgctctaaagcttggtcgtgtagcattggtttatctagtaaaaactgccaagctccagaggggagtcaaatccttgttccttctagttcttaacgtcgtttatttattcattcatccattcattcatctgaaacccctcctttcttgctcctggcacaggaggattggcagtgttacctaaactcttctcaggggtttttaaaaattgaacaaatgcaatgtttttcttagataataactaagacttcacagagtttaatttcttgaatgcatgactttttttcattattgaaaatcctcgtgttgataaattttatcgcaaaggttctacatattgtgtcaaaataattttgtacacagaacatgtgattatttcctggtagatcagcgattctaccacataccagaaatgaattgattatccaaaacccaacccacttacatcgcagattaacagtggaataaactgagactattgaattaaaatattatttctctgctgagaacaagagatgtcaggtgtcattaaagcttctgtgaatgaggatgaagaacttgtctccagactttgtgttttatggaaactatacattcatattttggcatagaatagaccttcattctccaagtatctggaaatatttttaaagaaaatgtccacaggtgatctgtaaacaacacacctatgaaagatttgcataataaatataacccgttaattgtaactcttttgcctctgccgtgtctggatggtttcccatgagcgacatgaacagaggccactttcttgacacggtttgcaaaccgcgtgggcaatgaggaaccaaagaatatgttttgttcaaaaaggtcgattttaagaaaaatagtatatgatctctctcctttgtcctcatttctaaaacagccaacaacttgtttttcaaagaacctttcagcaagatattcagaaggagaaaactgagaaagtttagtaaatccgatctaaaaagaaaaagaaaaaaacacctagccctttgatctccctggcattgttattacagccttaaaatatcagccaaccctctggtaggaaaagaaaaatcttacggattaagtaactatttatctcacgatgataattacttgtttgacctgaagtcactcattcctgaaaccacgagttaaattgttgagatgtttttaaaagccggcgctctggctatatttctggtgaacaaatgcctgaccaagaagatcagcgcatctgggacgggtctgagacccacttctgcaagtcgaaagctaaagggtatgggagggagaaagggaagttttccatcaaatacatatctaaagaggtacttaaagactaaaaccacaggtagctggcacggatgggaacggaaaaccattccccctcctcttcccagaactcttgctgagctaggtggtcaggagcgtcatggtagaatataaccccagaggcccaaggtgcagtttgaagaaacggtggcggcttcccctagtggtgtggcttcagagctgctcctaggaagccatttaattccctttaatgatatttccagccgttttctggacctcatgagctcaggatgaaatcagcattctagggtcagcaggcttctccctgctaccacgtgtccagaagcacttccacaagccagggttgacatcgcccaagacgaggcgtgacccggggcgggggaggggacttcgcccgcgtcgcgtgaaggatgccctggccttgggctgcaggcgcggacccccgggggctccccagggtgtaggaggcggagactgatccgctctagccccgagcggtccagcgcggggcgactcgcccgcatagtggagattccggcatgaggcggcggcagtcaccgcctggctgccccgcggaggcccgggagagccgctgcggtctcgggaggccgggctttgggacttgctggcccgaccgccagtcgccctggggccttgggaacagggaaatgcgcgcgccgaggcggtggcggcctcgctgctttcagttttcattgagtctgctggttactgtttaacgtccccacccacgtttcagtttgtttagtaaatcgataggactgtgagagtcaggccgctgccctgtcgccattgagcaaagctaatattctcccagcatatggtctaaaatctttgctagagatcgggaaaaagaaacaaacaaacaaacaaacaacaacaaaatccttaagcttcctctcccaagtccccccatccccacccccacttcccacctcctcgctttcagcaaacttcccagcctgggaaaagtgcggcgcgggacagcgcgacggggtgggtgggggacctgctgccgggagatgcggcggcggccgcgcggctgactgcgactcgggagctccgggagcggcccgcgcaggtaagtttctccgccgccgcccggggcccgggctggccgcagcgcaccgccccggcggctgccgggcaggaggagcctcggttcccctcgggcggctgaaggaggggctgagcctcaggacccctaggccaggccgtgttgaaagcagataccccgaggcctcgcccagcctgcgctggagggaagaaggcgctggaggtgcggcagcgggcagtggggggaccggggaattgaaaggtgccagtcctctaccttagaaaagaaagaaagagagaaggagagagagagagagagagaggagagagagagagagagttgtatttgtttgggtgcagagaaagctttggtggctgtagcgggtcatgtgattcccaggtctctggggggtcttccgtgtaagtacttctgtggcctggggcaaggccaggacaaatggatgttcgtggaccctggaggtctgtgggtaggtgcttggtcctgcagcatcaccccatgcatggcctttgctcaagtctcagcttccatccatctctcatggacacatcttgggagtgggcatctgccggtgatgccgttgggggatattttaaatatagtattgagatcttcctagttaactttgggatgaaatgtcctttggaagcttagttaacaacgtgccagttaagcaataaccgttctgtgtctaactgaaataagccagcacgtgataagatcttagaatggaatgaatatatgtgcttcatacctgatgatctgtgcttataaatcttgctcggaactgagtcaaagcactgtacaacaagcaaaacaatcagcatgagttttcacttgcgggcaagggcaagagaatacagaatccagaagctcaaaagtgaatgggatgtcccggaaactaaacactcattgagagcaccatttcctggttttgtttttgttagtttcttctgctttctcgttaattttacaggtttcccttctctctttagaagcggttatttgtcattaaacattcttcctgtctagctgtcacc

SEQ ID NO: 11990 - DNA, 6000 bp, Homo sapiens
tgggactatgggtaataattttgtactaaaatcttcttctgtgatttaagataatacttcctttgtgtggattattttgcttaacctctcagcggtgtctgacactgttcagcacaagctccttcctgaaacaatctattcttcctgtgacttccatagccggactctcctgattttcctctgacctttccagttcttcccaatttttgttgttaatggtgttgcctcctcttcctctttctgttccttagtgttcccattggctctgtcctggaacagcttcttcctcacttctcactttatccattttcctcaccgttacccatggtggaaggaagtatagtgcacatttattgaatgcttagtatacactaggaactataagtgtgttatatatagcatctcacttaatcctatcaacaatcccaaagctaaataccattgttattgatggaggttggtgtcatctgtccactgttgagtaatgccaggtttggattttagtccaggactatctgactccatggattttgagcttactatcacacccacccacctttctctaaccatgtaaaaggaaaaccctaccaggtcccagcacacactcaattgcttactggatatatccactgatgatcatgcacacatttcaaacccaagatgcccccgagtaaactcctggttctttcatcaactatttattgagcacttattatgtgccaggcactgctgtaggtgctgaatctactgaagtaaccaatagaaacaatctctaatttcatgagatttactgtttagctgaagggacaaacagtgaaagaaacaacatcagtttgagagaaacactacaaaaaatgaagcaggctaaatggacagagagatggagagggctgtactgtaggtggaataatggccccacaaagatgcaaaccctctaatccctagaagctatgactatgttgcattacatgaaacagggaattttacaggcgtggttaaggttaagggtctcgaggtggggagtttatctagaataacgtagatgaacccagtatcatcacataggccctcaaaagtgaaaggttagaggtatgtgacaaggacaatggaataagatgcaggagaaatttaaagcatgagagagacttgcctgccatagctggctttgaagatggaggaagggaccacaagccaaggaatgtggcatctcatagaagctaggaatggctgtcagtttacaatcagtaagaaaatggggacataaatttctgctgctttaagccactaaattctgatatttttttccagcagcaacagaagactaatgcaggctattttttttctttttttttttttttgagacagagtcttgctcagtcgcccaggctggagtgcagtggtgcgatctcggctcactgcatgctccacctcccaggttcacgccattctcctgcctcggcctcccgagtagctgggactacaggcgcccgccaccatgcccagctaatttttttgtattttttagtaaagacagggtttcaccatgttagccaggatggtctcgatctcctgacctcgtgatccacccgcctcggcctcccaaagtgctggggttacaggtgtgagccacagcacccagcctgatgcaggctattttaagtagggtggccagaaaaggccactgtaaacaaagcctggagagatagctgagagaagagcttcccaggccaaaataaatgagtctgaagtgagatgaacttggagtgcacaaggaatagtaaggaggtgtatgtatctggagtgaggggagagctgtgggaactgagagagcaggaacagcctaggccagcacatgtggaggtgtgcaggtcatgcagctttggattttattctaagcacgatgagaggacaggagagcaggggagaatcataacctgacttagcttgtaagtttgcctgtgggtgctgtaatgagtgtggactggatggggcaagtgtagcaggaagggagttcaattaggagactcttgattgttatccagcattctaaataagagaagacagcttggactaggttgaaaggggtgaagtaattggtcacatataggatatatttgaaagtcagagttcattctattttctgatgacttggaagtagggtgggaaagagagaagccaggatgggcaactaaatgcatggtggtgccagacaatgacatgggaaaagtgtggtaaagaaggttgggagggatcaagagttgggttttcttagacataagttttagatgccaaatagccatccaagtcaagatgtcaggtttttaggtatgtgagtttgaatttagggacagtttggattggcggcatgtggtaggcagattttagttactccccgaagatgtccacatcctaattcccagagtctgtatgtcatgttacatggcaaggggcgattaaggtagcagacggaactgaagctgcaaaacagctgaccttaaaataaaaagatatcctggattatctaggtggacccgatgtaatcaaaatgatacttaaatgaaagagaggcagaggactcagaaccagagatatggcatattcaactagccaattctggctttgaaaaggatgaaagctggtttttgcagttggtggaagtggtcatgagccaagcaattgcggcagccttctaaaatctggaaaagacaaggaaacagattccttctgagagcccccagaagggaacacagcccgccaacaccttgagcgtagttcagcgagaacaatttcagacttctgagctaaaaagctataaaataataaaaggtgtgctgttttaagccacaaagtttgtggtaatttgttacatgtgcaataggaaattaacataaggcataatttctcggaaacttattttttcttcagtgtatcctgtcttggtaaatgacataaacttcacctgaagtttcacatgaaagcagaaatacgtgccatccttaattctttcctctccttaatgttcctgatccagttactatcaagttctctagattctacttactaaatatttattcaaagttaccctctgtctcctttctctgcacaggtcatgatcatcatcatcattcccctttgggagagaagacaatagaaacccaccatctgttccccatttagcaaccagaataagtgttctaaaatgaatatttcaaattattcctctcaccttgaaactcttcaatggcttgctatttcactccataaattctcaactgcttgacatgggttagaagatcctccagggttgcctctgtcttcagccttatttcctaacactcgtcctcacactgaacttcttccagatcctagaaagcattaggaggcctcttcacttcaggtgttggcactggccttcctcgtcctcatagaaaagactctatcattcgttactcccttccctatccaccttcaggttccacactgctcccttcaggtcgttctcaatctcctaaattgttagcaccctgatatcaggaacttttgcttcaagacgctcatcacaatagtgttctgtttgtccccatgacaaacatgctgcagggcttttgcctggtttgttcagtacgctatcttcactcctagcacccagcacataataggtgctcagccaatatttgtcgaatggtaattaccgaagacctgcgaattactatgtttaaaatctctaccagggttcctatgacatatttagtaactatttcctggaaagtccgtacaatggagcattcagatacttctaaaaaatgcaatgtttgtgcctatcactaattttacattcttcacttttccccactttggagatgaacagtaagtgagagacattgtgagagacattttaatttctcttgcatttatcatgtcactcaacaatcattcaataagtatttattgatacttgtgccaatcactaggtgttgagaataagtgaataaaatagtctgttttcatggagttggcagtgtgtgtagatagggtgagataaagtctgaaagtaaacaaactgaaagctatataaaatatcagacagtaggccgggcgcggtggcttatgcctgtaatcccagcactttgggaggccgaggcgggcggatcacgaggtcaggagatcgagaccatcccggctaacacggtgaaaccccgtctctactaaaaatacaaaaaatttgtcgggcgtggtggcgggcgcctgtagtcccagctactcgggaggccgaggctggagaatggtgtgaacccgggaggcggagcttgcagtgagccgaggtcgcgccactgcactccagcctgggtgacagagcgagactccatctcaaaaagaaaaagaaaaaaaaatcagacactaataagagccagagtcagaaagaagtgtgtgtgttgatcattttttttgcttacagatactgggaaaactcaaagaataaaacatctgagcagggaccaagagcaatcggggagtccgtatcatgtcacagagaagcgtacaagcttaggaatcttgttttctgaattcgaatcgcaggttgccagttacacctgtatgcgactcaacaagtactttaacctgtctcttagctgttatactacaaacctcaggcttgttaagagaaaatgctccgcaaggaactaaacacagaaggttctaacgctgagccaagactgggaaacgaactctgggaactcaccccaggctccccaagaacatcgcccctctggctggagcgcaattggtgattggctacttaacccgtccgtcctttcccgcccaggggtccaatccaatccagcccggctccgctcggagacagttcgccgagtgggcggtgtctatgacgttttctgacgtgttacgtcacagtgggcggaagtcgcggccgctgttttgaaatcgggccgcggggggtctctcaagctggttccaacgctgaggccccacagcctcccaattccgggcagacccctgacacctgctgtctggccccttccggcctgaagctgcagccgcgccatgtccacccctccgttggccgcgtcggggatggcgcccgggcccttcgccgggccccaggctcagcaggccgcccgggaagtcaacacggcgtcgctgtgccgcatcgggcaggagacagtgcaggacatcgtgtaccgcaccatggagatcttccagctcctgaggaacatgcaggtaggaaggcgggcgcgcgaggccagggggatgcagctgggagggaaagggcctctggtttcctctttacgtggggcccgtggatgtcatcggggctgccctgggcaaaccttaggtgtagggtctcccccattcacactcaagagtgtccccaaaagtcggatttgtagaggtgatgttttccagaccagatttctgcagaattgaagccaattttttttagattcaatcgagctctttagttactctgtaaactcttgcacctttcaaggcagagatgggtcgcactccacttccctctttaggttgctttaaatgttttttccagcatttcttctggggaggtccaaggagttgaagaatttacattttttttaaaaaaacagtcctcctttttttggcatagttaatatacagtaaactacactcacctaaagttttgatatatatgtgtactgtagtctgtatacttgtgaaattatcaccacaatcaaaatagtgtacacatcatcccagaaagtttcttcatacccctctgacatctttgcttcccaccttccatcgctaagcaaccattgatctgcgttctgtaatcataaattaatttgcatttgctagggttttatataaacggagtctacagtatgtgggcttttttttttgtctgagatccttcactaagaatgcatcaataatttcctttttattgctgagtaatgttccattgtatccatgtatcaccatttgcctaccttttct

SEQ ID NO: 11991 - DNA, 6000 bp, Homo sapiens
aggcccctgggtggacgggtggtcccctccactggtgttctcagccagctcctcgggctccaggatgtcgtagtgggggacaaggctcagctctgagccctgcaaccggtgctcctgctgcaacactcgttctgccacttggaggaagggaaaggacagaaagcctgtcagatttctgcaggagagggacggtcggctgggtctgcccagccccactcaccttgccactgctggaaggaggcaacagtgcccaggggcccgggtaggcgttgcaggtcctccaggggccccccaccactgcggcgctcattctccaggtacaactccagcaacagcaggtccacagaggcaccatcccccaccacacgcaccgctcgggcctggggaacccgggccagggacaccaaggtcccctccaggcccagattctgggcctgctcctccaggacacggacatctgtggggtatgtgcaggtcagctcagggaatcccccctagccagcacctcaaccccaaccctgcctctcacctgcctcagaaaggggcttgggcaactggaccagagcccggtctggccgggggctggccaaggcacagcaaggctgtactgggagccccgaggcccgcagcaaggcctggacatgctgctccaagcgctggggcgtggtgccagggggcagtccttggagcagcaggcgtgcaggggctcgtggtggagctggccgcaggctcagctgggcaccatgtagttcgtgatctgcctgggccaagaccctctcggcgtctgtgggcaggggcggggcaggatgtcaggcattagaatatcagggcacccaggctgtcccttcagccagccctctcacctgcaggctctctgaaggtgaggacgcccccacagcccagtctctgccagctcaacacaggtccccctccagagcgtcggcggttttcaaagtagagagtgagcagctcgtcgggcacggcagggggcagtccacggacctccactgccacccctgcctctgcctccgccattgcaaccctgggacggggcatcaggtgggtagggaaacagcccattccacccctcctgcccctccccaggcccctccaaggtgtgtcctcaatgctcccccattatgggtggccccacatacagcacttacattccccgtggccgctaggcagcctcaggccatgagctcagccaggactcctgtgcctgcccctcagcaagcctaaccctgctgggagcaggaaaacaaaagtgaaactgaaagacggaaggagggagggagcagctgggccctgggcgctgaggcctgggtactggggctcagatgcttcctctcctgctgcagcctcaacccccagctgaccaggaggtattggccaggctggacccctcaggaccctccagccaacccagcccagcccaccggccctacctggcccactccagcccctggttggcagggtagacaggagtgtcccctggtggccctccactcccctggcctccatggcctgaaaatggccaatcacccgccccactaaacccaccaaggggcctgagtcactgcccctcactcaggatctccaagcctctgtgtccatgacaccctctgcacacaaagtgctgggtctccaggcccgcccccggccaaggctggccttcaacgcccccagcaaccttctcaaccctgctcctggtccctcacacctgccaggtgctgagcatgggcggttccccacccttggtctccaagaatgtgcattgcagcacagccttcctcccgcctcaggtcttgcctgcccattcctgcagctttctgtcctgcctgcacctccccatctcacaccatcattggcatcgtcacaagtaacctcagaaggtgacaaggtaatggctccactgcattccttgctgccgctaatcctcaccacagaaagggaaacggaggtgcagacaggcccatagcagcaccaggcctcaaacctgggcggtgccttcagagtccacactcccactcgccacagatctcccacatcacccaagctccgtttgcttccagcctttcaaagagctgtggccactaccactctccatctcctacttcccactcacccctcagcccaccaaaacccagccccacccctgctgttcctccctccagggagctgaggaccctggccagcctgcactcctagccctgcacatgccacacctctgctgccccgaccctggtcccagcctccagcatctctcgctaggtagctaggctaacctcttaactagtctctgtctgccactcccatggtgggtcctcaacagaggtgtcagggtgagccttgtaaaatgacaccagcagctgctacagctcccagcatcagcaacagtagaaaccaaagtcctgggggccgggcgcagtggctcatgcctgtaatcccagcactttgggagactgaggcaggtggatcacgaggtcaggagtttgagatcagcctggccaacatggtaaaaccctgtctctactaaaaatataaaaattagccgggcatggtggcaggtgcctataatctcagctactcaggaggctgagtcaggagaatagcttgaacctgggaggtggaggttgcagtgagctgagatcgtgccactgcactccaaccaaggtgatagagtgagactctgtctaaaaaaaaaacaaaaacccaaagtccttttgaggacctgccccctgcccagctgcacctgaccagacctcagtcccttctctggccccatgccccctgcacaccctgatgctcagagggctccaggctctcagctcttcctgcagagctacaggccactcctgcctcagtagcctgggactggcccttccctctgcttggccctaccttccccacaaacccccatggccacccctctggcatgatctcccttactctgccttttttttttttttttctgagacggagtttcgccctttcacccaggctggagtgaagtgccgtgatctcggctcactgcaacgtccacccactgggttcaagggattctcctgcctaagcctcccaagtagctgggattacaggcacgcaccaccatgcccagctaatttttgtatttttagcagagacagggtttcaccctattgggcagactggtctcaaactcctgacctcagatgatccacctgcctcagcctcccaaagtgctgggattactggtgccagccaccatacccagctattttatttttatttacttatttatttattttttgagacagagtcacactctgttacgcaggctggagtgcggtggcacgatctcagctcactgtaacctctgcctcccaggttcaagccattctcctgcctcagcccccccaatagctgggattacaggtgcacaccaccacgcccagctaatttttttttgtatttttagtagagacggggtttcaccgtgttagccaggatggtctccatctcctgaccttgtgatccacccgcctcggcctcccaaagtgctgggattacaggcgtaagccaccgcgcccagcaagcattttatttttcttaaaggtctctcaaattttgtgagcttctgcttctacaaaggtagaagttaccttctacaagggtaaatccatccctgctttttccacgttttctctaatggaactcatcacaggttatccattacgccgaccctggctgcagagggcctgccacaggcaccactcacaccacaagcagactggtacagtttcgggaatttctgtggactggttgtccagctgggggtaacttgaaaccagccccggtggagtattcacaccacgcgcatgtgcaaaacacgcaccccaggcttcccctcactaggtccggctgctaaacactgcgccagcgcaccataggtgcaggactcagagcggcctgggagaggccggccctccaagggcgggagggcaggtggggtctgggccccgggtgggaaggctggcagcaggatgtaccctgcctgtgtcagtcactgctcccccaagaggacttgggagctaagcagggaggtggcctggcctccagtcctgctgcatccccaagcctcagcccctcgcagcttgtgaggacgttaggcagacaagcgagcgttcagggtctctagtgtgaaaacaagacatcgtatttgttagtacaaagggtgactgtggtcaagaataattgtacattttaaaacaactccaagagtataactggattgtttgtaacacgaaggacaaaatgcctgagctgatggataccccatttaccttgatgtgattattatccatggcatgcctgtatcaaaacatcccatgtagcccgtaaatatacacctactatgtatccacaagaattaaaaaaataaaaaagggtctctagtagcaggcctggcagagtttgggctgacagagcaaatggggcaattaaaccacgaggcctcgatttgggaactaaaggattaggcttcttgatttgggagagatctggatgaaaagaagtgaacgtcgggttttaaggccgagaacggacggtcagtcccgggcagcttcagcaaatcccgcatttaggaataaatttcttaactaccgaacggccagtcaaattggccagaccagacttctgcctccaggggtcttcagcgcccaccgcccgaccccacccctcggcagacagtgagaggcgggcctctggccggagcgaagaggaacacgcaaggcggcgcagcgggaggggtccgcggaagccccgcccacctgcccctcccaccccgaagctcgcccggccccgccccctgccccgccccgtcacaaggccccgctgcgtcttccgagccgcaggcgcaggcccagctgagcggccgccgagcgggtgcgggtgcgggcgcatcggccatcaccgcgcggccgcgcagcggacaccgtgcgtaccggcctgcggcgcccggccaccggtgagtccccggcccgagcccaggagcgcctctgacccgctgcgccgcgcggcctgccgcccccgcccccgcccccacgcggatcttgcgcatccgagcgtggccgcctcgggtcagtaagttggtccggccggggcgcgcggcagctcgcggccagaggtggcggcggtggtgggggcggggagccgcggcggcctggagccggagggagggggcggcgcgctgcggcgactgctggacccgtgaccctgtgcgcccccggcccgcggagggcccatccgctctcggtgccagtgccacggccgcagcccctacccgcctcgccccacgcccgctttgttccccgcacgccccgtggtcgcttccatcccccacacacccccgcaccccgctgttcccggcgtaccccactggcaggcaccggcagccgatccaggcccgatccccccaccccggagccaggggccgttgggccctgttgttgggctcgcgggggtgggggggctcgggcctttgttggtcacagatggcccggggatttcctgggatagaaatagccgccggctccggccccttaaagctgcttaaggggcgggatgcggaggggagggtccgggcacaccccacacgtccccggccgagaccccagcctccgcgctgagctcccacccgggagacgccggcagcggcgcaggcctccggttgcttgtgagaaacgacccaagccccaaatcccgaggctggcggtcgtcccctcgcccggcccctcccccaccctaaaggcggcctagagccctgggaaggccccacggcgccgcccgtccggtcctcacgcgcttctccgggcccaggctccggggctccccacagcccggggcaaaggtcacggtcttcccttgcttccccctgggttcccagaagcaggtggagttgcgcagggctgggtcccgacgctgtcgtcaagccaactgttccactgttccttgtctgtc

SEQ ID NO: 11992 - DNA, 6000 bp, Homo sapiens; identical to SEQ ID NO: 3832

SEQ ID NO: 11993 - DNA, 6000 bp, Homo sapiens
aggggccaagtggcaagacaagaagtaaagtctaatgtgtaacacattcccatactctgatttctcctccctggctgctcccccacctacgtaaactacattcctttacacggtcatggcaaaggaacattaatttttgatttgaattgtgattgaaagcaacacaatcagaagagtgaaatagtttccaatgaagcaatatcacttctaaccgggtcgtggtgtgtatggcaggaaagagtggttttggggttaggtgtgggttctgatcctgattctgtctcttacaaactgtggcctcatgctgttgttacttaacctgagtccttctccttgattataataaagtactattgatgccttcttaacatggttgctgcgagtattaaacaaggagtcgtagatagacatatcccattctcatctgcagagcccagcatgtggtgggtactaccttacaatggctcacttctctgcagacaagagggcgctcgccttgtcagctggagtatgcattagtttctcccatctctaataaataaaataaattaaaatattaaataataaagctttcacaaatgcagtttctcctttgccagagaagtctctttcaaccaggaggcactcttttgccatttcataagtgaagtcattttgaaatgtaggtgaaactgggaagagggtctgagctcctccctgtgatcttcttggtccatttaatcagtactccaagtttggggtccattctaaagaattttggaaccatagagtcagcatggacaacatgcagattaaaagtgcacatttagacatgggtttcaacttaggattagtgactttaggcaagccaacttaaccccctatgcctcagttttctcatctattagatgggaaaataattatgccttcctcctggagttgttagaattaactgaggaaatgcacggaaaatacttagcacatgttctggcaggtcacatgctttcataattgttagccactgtgatttagttcaggttaaagactttcctcagggtgtgtgggtggaagccttgcatcattaaaaagagggggcttggtaattttctattaaaaagagttcagaagatacgcaaattatctggtgactggcacctagaaagtgatttccaactcctttgggaatatctcgggctgaccagtcttaaaggggagttgattgtacccgcgacactgtgtgttcagtctgcttcgtttatagagcatgtccacgctcatttatcttcatcagcagcccctgtggagtcattgctacaggatgtggctcacaggttaacactgttaattcagtgtccattgggacagagaaaagagaaagcagagttggtgaatgggctgattttcccacactcctgggagttgagaacagaagcagccctggtaccatattggatttgaagagagctcatcacctggatttatcaattaggacttcaccagaacttgctctaatctgccagaaagtcaaagtagatttggattttgtgtaggtcttctcagttggcagaacattagtgctgcctgtcagtggggattagtggttgattagcgattgactgatactagcagtacctgctgtcttaccgccatagagacccagtagtagaaactgatttctcccatgctgtggttggacgttgatgtttaatgcaggaagcatgaccatttgaaacaacctttaactttcccttgctgagtgcacacacatagttctgcctgtcattttataggactcaattttcaaggaattgtaggtctttcaatgttaaaatactaaaccaataacttgctcttcaaaacaaaaccaaacaaaaagaaaccctcatggtcaggcgtggtgactcatgcctgtaatcccaacactttgggaggctgaggagggaggatttcttgagtccaggagttctgggcaacatagtaagatccgtctcttaaaaaaaaaaaaaaatcagccaggcatgatggtgcatgcctgcaatcccaggtacttgggaggctgaggtgggagaattgcttgagcccgggagtttgaggctgcagtgagccgagatcgagacactgcactccagcctgggcaatagagtgagaccctgcctccacaaagacaacaataaaaaacaaaaacactcaggattttttgtctttgaatgatgagatcaatagcatcagatcatgtggagtaaattgggttataggacccttttttctcttaaagcagtgcatgataactggatttttaaaaagagcaatgtgatttagctttgaaatttatttgaggatctcctggcaccgatggccattacagagagataccactggacaccacagaatagggggcggaggcggtggcagaatgggtaactgagaccttgattttttttttttgagatggagtcttgctctgtcgctcaggctggagtgcagtggtgtgatcttggctcactgcaacctccgcctcccaggttcaagcaattctcctgcctcagcctccttagtagctgggattatgggcgcctgccaccatgtgtggctaatttttgtatttttagtagagatggggtttcaccatgctggccaggctggtctcgaactcctgacctcagaggatctacccactttggcctcccaaagtgctgggattaacagaccttggtttttatggataaaactgcctgtttcttgacttgttacttgcctttcattttcttctccacctcagctgtacacttgggttattgttctagatgaaaagctttgttccacagtaaacactggagattccaaaagacatgagggaggatggccgacactgtaattgctgcttgggcgatggggttattagaagcccaaacctcagcatcatgcagtatacccatgaaaccaactctgcacctgtgcccctgaatctaaaattaaaaacatatatatttacaagaagaaagtataagccaaaaaataaaataataaaatgcaatcactttgaggatcaaaaaaagaaaagctgtgttctaaatgctttctcttaccctcttttctcttcttctgtcctctccatctctagcactgaggatgaaaataaaagaagtgaaaaaagaaaatggcgacaagaagattgtccccaagaagaagaagcccctgaagttggggcccatcaagaagaaggacctgaagaagcttgtgctgtacctgaagaatggggctgactgtccctgccaccagctggacaacctcagccaccacttcctcatcatgggccgcaaggtgaagagccagtacttgctgacggccatccacaagtgggacaagaaaaacaaggagttcaaaaacttcatgaagaaaatgaaaaaccatgagtgccccacctttcagtccgtgtttaagtgattctcccgggggcagggtggggagggagcctcgggtggggtgggagcgggggggacagtgccccgggaacccggtgggtcacacacacgcactgcgcctgtcagtagtggacattgtaatccagtcggcttgttcttgcagcattcccgctcccttccctccatagccacgctccaaaccccagggtagccatggccgggtaaagcaagggccatttagattaggaaggtttttaagatccgcaatgtggagcagcagccactgcacaggaggaggtgacaaaccatttccaacagcaacacagccactaaaacacaaaaagggggattgggcggaaagtgagagccagcagcaaaaactacattttgcaacttgttggtgtggatctattggctgatctatgcctttcaactagaaaattctaatgattggcaagtcacgttgttttcaggtccagagtagtttctttctgtctgctttaaatggaaacagactcataccacacttacaattaaggtcaagcccagaaagtgataagtgcagggaggaaaagtgcaagtccattatgtaatagtgacagcaaagggaccaggggagaggcattgccttctctgcccacagtctttccgtgtgattgtctttgaatctgaatcagccagtctcagatgccccaaagtttcggttcctatgagcccggggcatgatctgatccccaagacatgtggaggggcagcctgtgcctgcctttgtgtcagaaaaaggaaaccacagtgagcctgagagagacggcgattttcgggctgagaaggcagtagttttcaaaacacatagttaaaaaagaaacaaatgaaaaaaattttagaacagtccagcaaattgctagtcagggtgaattgtgaaattgggtgaagagcttaggattctaatctcatgttttttccttttcacatttttaaaagaacaatgacaaacacccacttatttttcaaggttttaaaacagtctacattgagcatttgaaaggtgtgctagaacaaggtctcctgatccgtccgaggctgcttcccagaggagcagctctccccaggcatttgccaagggaggcggatttccctggtagtgtagctgtgtggctttccttcctgaagagtccgtggttgccctagaacctaacaccccctagcaaaactcacagagctttccgtttttttctttcctgtaaagaaacatttcctttgaacttgattgcctatggatcaaagaaattcagaacagcctgcctgtccccccgcactttttacatatatttgtttcatttctgcagatggaaagttgacatgggtggggtgtccccatccagcgagagagtttcaaaagcaaaacatctctgcagtttttcccaagtaccctgagatacttcccaaagcccttatgtttaatcagcgatgtatataagccagttcacttagacaactttacccttcttgtccaatgtacaggaagtagttctaaaaaaaatgcatattaatttcttcccccaaagccggattcttaattctctgcaacactttgaggacatttatgattgtccctctgggccaatgcttatacccagtgaggatgctgcagtgaggctgtaaagtggccccctgcggccctagcctgacccggaggaaaggatggtagattctgttaactcttgaagactccagtatgaaaatcagcatgcccgcctagttacctaccggagagttatcctgataaattaacctctcacagttagtgatcctgtccttttaacaccttttttgtggggttctctctgacctttcatcgtaaagtgctggggaccttaagtgatttgcctgtaattttggatgattaaaaaatgtgtatatatattagctaattagaaatattctacttctctgttgtcaaactgaaattcagagcaagttcctgagtgcgtggatctgggtcttagttctggttgattcactcaagagttcagtgctcatacgtatctgctcattttgacaaagtgcctcatgcaaccgggccctctctctgcggcagagtccttagtggaggggtttacctggaacattagtagttaccacagaatacggaagagcaggtgactgtgctgtgcagctctctaaatgggaattctcaggtaggaagcaacagcttcagaaagagctcaaaataaattggaaatgtgaatcgcagctgtgggttttaccaccgtctgtctcagagtcccaggaccttgagtgtcattagttactttattgaaggttttagacccatagcagctttgtctctgtcacatcagcaatttcagaaccaaaagggaggctctctgtaggcacagagctgcactatcacgagcctttgtttttctccacaaagtatctaacaaaaccaatgtgcagactgattggcctggtcattggtctccgagagaggaggtttgcctgtgatttcctaattatcgctagggccaaggtgggatttgtaaagctttacaataatcattctggatagagtcctgggaggtccttggcagaactc

SEQ ID NO: 11994 - DNA, 6000 bp, Homo sapiens; identical to SEQ ID NO: 3102

SEQ ID NO: 11995 - DNA, 6000 bp, Homo sapiens
agcaagcttctcctatatctcataccaaaccagttgcccagtcacaatcttaccaccctgttacaatttggtgcactgtaagtgaacttacctaccttaatggtgcttttgtgtgtgtgtgcgtgtgtgtgtgtgtgtgtattcgacgtgtacttatctttgcctcccctggcctgtcttgttcactgctactgtccctggaacagtgcctagaacacatagtagatgctcaacaaatagttgtcgaatggagtggataaacgaacaaaggcatgtgcaacatagtgtttcctgaatgaggatgtggctcggagacatgaaaatgcaccatatgtttgaggaacagcaagcggtttgctgtggctgtgggcaagggtaagtctgggtggaagacgaggtggggagggttgggagagtcctatagttggaggctgactggatagctcagaactgaatggcctttcatatcctggcaacaggagccatggatcatttttaaggagagaatgttatgattggatcatgacttttaaaaagccattccagtcacagtatggagcttgggcaatggaaaataagctggagtgtgggtggaggttgggtggggggattgcagattgtttaatcagagcaagacttgatgacagattgatctagtgcaacatttggagggtagaaatggaaagtgagaacagagacatttctgaggcaaaactgctgggtcctggggaacaatcagatccagggctttgagagagaaggtgaaggctggaaggagacaaggcacgcatccgggaaggagtagaatcagcaattctagttttggatatgttgtctgaggagcccggcaaacatgtttctctgaatctctaggaattgtgccaccaccacactgttcctcctaccccttttctcttttctttcctgttttgaatcactctcacaagtcaagaccgctccctgcttcttagcccgctggggagccaggccagcaggccccacattcctgaggaagggacagggttctggcctggagggtctagcagaagccaccccaggggagggcccgacaggaaggaaggtaggcctgccggaggggcatacaggagcttcctctcccgccacagtgtccagggccaactgctccagccctcaggctgggtcaacaggatgggacagcccaggcggaaggaaacctgtggggagggacaccccgcagacagaagcagggacatggggtggggagaggcaggaagagctgccgggctgctgagctggcgcctctccagcagactcaggaggggcggtgacaggaggccattccctcctcatccccgcagccctgggcctctctggtcctggccaacagtattactatcattattattgctgttgttcgctagcctgggccttagatacattagaaaaaaaccatcggaagatacgcatagcattggcagtttctaaaagaattaattcccttcctgtgttcattctgtgattactgggatagaaatgctatttgcattaccagcctttcattcagttacagagacgtgagtgctcgaaggagagacagtgatttttgccttaaattcagcctgtccaaatcggataagatctccgatttgctttaagccccgttatcactgccttcctctccaacaacagctgctgtgatcacgcacaaacggccaaacgggggcaaatccgtgccaaagcagggccatgggctttcctgatcagaaggcctagccccagcccccaggcgcagcacacgggcggcttcctttcagaaacccagcctgcctcccaccagctggagtgggtgggtggggcggtagtggtgccagtttcagggaacggccggcaaacccacctccaggcgtgctccagcgggagcctggagaccctaggagagccctccccacaagcggcttccaggcaggacgcttccagaggtcttggtccaggggtgggggtgaggtggggtctacctttgaaacagctacaatttaaacttcagctacaccgagctcaaactcgattccgcagccgagtgtcggcgccagagaaggataaaaactcgggtctacggctccccaccacgcccctggtccggtcctctgggcttccaggagtcctcacgccatcctctgggttgcccaggaggaaggatgggcggggcgggcaggcgctgcgggcgctgcagatggggagggcgagcccgcggcacggcgtgagcgggggagaggcgcgcgagcaggtgtcggctccgtgacagggtcccccatcccgcgccccagtgctccccgaggcttagtgaggcaaaacccagcaaatgcttcagaaatgcagctcagtcggtcaccgggttctgcttcctcatcagacgcgcaagaggatggcgcttccaatgcaaatctcttggctccggccccttggctggcagccgccgcgtcccccgcctgcctggcgtcccgcccactccgtggcgggctgagacgaggcccggcgcggaggggacggggcggagcgggcatccctccccaccccccacgtggggctggccctccgcagtgcctgggcgcgctgcagtcgccgcgcctccccggccgcggcaccgcctctctaggcaggggcgggggacgaggggcaaggagtgggcgaggggtgggcgaggggcggggggcgtcactcaatcaggtggcctctggagttccccggggcagggcagagggaacacgctgccggggattgtgtacacgctccactgacaccagcttcacgctgccgggcagtcgccgatcacgcgtggccccgcgagcccattggccggcgcctcacacacctttgccgttgattggccggcctcaggctccgcccccacccccgcccgcggcgcggggcaggctgagcggctacctgaatggggagggggcagacggcgctgagcgcggcggcggcgggagcggcgtcgagtgtctccgtgcgcccgtctgtggccaagcagccagcagcctagcagccagtcagcttgccgccggcggccaagcagccaaccatgctcaacttcggtgcctctctccagcagactgcggtaagtcatttggggatgcccctgtgcttcctcgcctggtcttgtctggggggccaaagggggcgcgaaccccgagccccggacatcagccatgcctgagaattggggctgcagcggagtcgtggggaaggaaagggcttcctgcctgcagactatgggcattagtgagggcgtgtgtgttcgggagggggtcgaaccagggggctgggatcttcagacagggacaggggtcttgctctagatgtactgaggggaagggacaactccgcatggagacccgagagggctggtgaggaggaggatgacgagcgggggaggagtggggagggggccgttgccctgcagcgaggttggggtacagtgtggaacgagagtcgcgggagggacaagggggctaccctcacctggtaccgaggagagatgcccggtctggctcaggaacgcgagccaggggaggaaggggctgctcgcaagcactcgggaggcggggtgtccacaggagaggcgagtgggctacccatcctgggggtctgaacccacgcttggaagacgggggctgctcagcagatagctcggggctgggggaaggggcgcctgtcgtcggagcggggggatgacacgagggcccgccgacagccctgggggacgagttgctcccccagacgtctggagggggactcttaccccaggggcaggtggccgccttctgacgactccttggaagaggcggggagccgcctctggggcaggagggtgggaagcgggacccagcagctggggcgggaaggtgggcggggggagctgggccgcgagacgcgggggccgcgcgtctggagccggggcctgtgggggctgcacgtctgggaacccgtggagacgcgcggcgggaggggcctggagctgccggaagccacggggagggggcgccgcgtctacagggagagacggggtggtctgaggtcccgtgggccgcgtgggcgggaagtgccgagggctcggccgggttcccgggggctgccggcgggaggagggcggcggccgggtttccgcggggacctggctcctcctcccgcatctgaggcggaggccgggggtgggccgggagcgggtgcgcccggggagcttctcgtccccgagtgacccagccccggcctccgccaggggcgggagcgaggcccggccccgctgtcggttcctaagggaacggcggctcgcggggagctggaaggggcgggcgcctcccggagcctggcgcccgcagccccgcccctccccgcgggcccggcgcgcacggccgggcggttggcggcggcgcccgcggcccctcccccgggtcgggcgcgggcgggggcccgcaagctcaggaagtaggggaaaggtgacggcgcggcaattcccagttcacgtttcctgcgcctcccggagcagccgctgatcacgctttgttcacatgcctcgccccctcctcgcccacgcccccgccccgggccgcacagccaatccgggctcgggccgccgagccggccggccaatggcgggggcaggggcgcggggacgtgcgagcggcgaggaatgttcccagtgactcacccgtgagcctcattgaggttagggcggccccatccgtcggtctccgccagctaggatctcccccgccgtccgcccccgcccctcgtctgcctcccccgcccgcgcctccgcccgcgcttccctttcctgcctcgcgccccactccctttcctcccctccctgtttcccttcctgtccttcccagctcacgctctctttccctgccgcctgcctttcttttttcctttttttgcattggcgtcttggggctgttacacacacgcgcgctgtccattgcagcttacataaaggcgggcgcgattatgcaattatattgttagcgatatttcaagagcaatggctcgttttcttaggatttcaacacgaaggcatcatgcatttttgaaaaactagtattgagaataataccttgcaacgtaaagaatgttttttggtatttttacacaatctctactttgaccaaacgagtctggacagttttcttttaatggaaaataggagaaatggtgagtagtaccatttttttttagcgtagttcaaagaactttactataaaacattaggtagttctacaaataagtgcaaaacctgtgctgttattttgtcatcaagcagttctttaaggaattaaaatagattctactttgattatgctgactttttaaagtcggtttttgcaaattccaagtagaatattaaattttttgattatccagtttttagtaatattgcattagctatgttgtagttatgtatggcaaaccattgtgtcaaatagattcagtaaaagggagcacaaatatgaagaggttgaaagttaattaaaataaacattagaatttttttctatgtatatcacttgatttttctttaccataatcaagtgatcaaattttagatcttaaataatgcaattttaacttgaaagataccctgaggatcccttatcttttgatttttatcccaaagtgcaaagtgactttccaaaggtcagacccataacaacaggccagagctctactacattttgtctttattagaaggttttggctattttttttttctatcagcaatttgtacctcaaaagacctcataccatacctgtaatatttaagaagataaattttttgccgcactcttagtttttttgcccgactccagttgcaggtagctactctggaaagtctatataaaatactccttttcttcttagccaaatacttctccttttggatcacaaatgcattgataattttcgtcttagtccccttaatggtagtaggtgtgcctctctcccatgaacggatat

SEQ ID NO: 11996 - DNA, 6000 bp, Homo sapiens
attagaatttttacatgttataataacttcggtttaaatgtgttaatgagttaatgcgattgcatagatctaaactgaacaacaaaggaaagagataagaaaaaataatttttgtttatctaaaaattacacataatctgggctttaggaaaaaaatgtataaagctctttggaaatagaatcccatcataagaggcaatttcaaacttctttgtatatacatggtagtgacttgccttaaatattaaaatacccatctttgtttgttgtaatttgtgaatttacttgttttcccccatcaaaattaggaagaagaaaatacaagatttctatttcaaaagaggaagaatggttagattaggacagtggcagcaaggaaatatgatttttttttaattgagatcctttttgagaaacaaaaggtggctttgctttgaattaaaaagtcatttatgttgggtagagttcttcacttaatggtttcctgcttacactgaaaaatacactgggttgatttagattgttattcttcttcatttagcttttagtgatctcatttgtgtaatcttcatacttgaaaagtagaatatgaaaacaacaagaactatagatgtgctttggagattgatatgtagtgcttttgctagtgaaaaataatctcaaagaaataagtttaaaaaacaaattttcttaactctattttacagtaaaatgtttttatattgttattagcattccaaattattttcatgaaaattattttatggaaataacccttattttattagcttgctttctattttaaatcacgctgtgtaagaatgattaaatcaaatataaagtatggaacaatttaaatgacttaatggtcttccagataagatagaaatgtttctgctattatcttgaagaatcaatagtggattgggttgtcttctttaaacatcatgctgttttcactgcttgttatgttgctctaaagaaatttaaatatttcacatgccagttgcttgggagaaacatttttcaagacaattagttgtgctatttaaaattaaccttttatctacaaataatgttgtcattctctctggagtgtttgacctaactagagctaagatggaacatcttagcctacaaaacatgagatttcactaagtaaaagtaatgttttgctcagtttagagaacagatactggaaagcaatgttaagagagattttcagtagttcatagttcatcatatatttatattttttgatacagattaaatttatatatctttagaaaatgtgtgctacttattataaattactgttttatgtattgctatgtataaatgatgtgcttcccaatttaacctttagaagtaaacttaaaagcactcataaatttctgttgaatgtagggtttaataacataggtcttatttatttaaggataattttcttctactatcacttaggcataaaattaatatagttttatttttaactacttaagttcttaatctaatgtagccttaatgaatttacccatgtaaagtacttgatgaagccatcatgaaaggctgcttggctaatatccatcagtccccttgctgaaaataactgaattttaatgtgaatatatataaaaaaaaccggtaactgtttcatgtatctaaggtttatgcaacttaatttaataatttcattttttaattgtgccatagacatgtttattgagttataaaaacaccacaatcacgaatgaatgggaaacacaaagaattagtattaagagtatgctgtttgttttgattatgatgcataactaaaaacctaaaattaactgtaacttaaattgtttctctgtggctttttttttctttctcatccaccctcttcattctcccttctcctctttaaataaataaaaatattctgaatgtagcttaactagttttagaagtagagaggaagattggttataaagaggaatgtaaattaatttataaacacaagttatctcaagttaaaatcaatataagagagcctgtaatctccatgtagccaaaacctgggattaactaaagtactcaatttcctttgtagatcatactaattagttttcagggtaggcacatcttaccaattttatgcacttatcaagagtcatttggatttgttacctagtgtatgactgccatttgttcttgttatttcatttcacaatttcgttaaaaattgtgctatctaatgcaacatgagcattaaaaggcttttattttattttattttattttatttttttgaaacaaactctcactctgtcctcctggctggactgcagtggcatgatcttggctcactgcaacctccaccttccaggttcaaatgattctcctgcctcagcctcctgagtagttgggattataagcgcatgccaccacgcctgtctagtttttttgtatttttagtagagatagcgttttgccatgttgctgtggctggtctcaaactcctgggctcaagcaatctacttgccttggcctaccaaagtgctgggattacaggcgtgagctaccgtgcctggctaaaagactttttttttcctccactataaaaaccaagggaaatactgtggaagtagataaaagcaaatcgactaaagtttagacaatattttgaaaaactaaaattctagaagggttctagaatttttgctttggattgccttatgggttgctttaacttttttctccattaaaaaataaaaaactagaaatcaaaggcaatgtatgagacttatgaaaaaaaatttagtaaagaaccccaatcagtgcattcttactcaatgaaaaggtcttggttttacaaacagtagcatccatatccccctatgtaaaataagatgaagtaaagatatatctttttatgactttctgttttaattattttatttgcttaatcagttgggtaaattatgagtcctagaatttaagaaaagagggcttccactgtactttgtactctccttcagagaaaagctaaagaaaccgcttcttttgctaggctgaggctgactgaattccgtgggtgtttctacatctgaatatcattacaaagactacccacttgaggagatatgcttgctattcaaatctaccatatcttctggaaattcttgagttcttactctatgaaatgaagaaaataacataaactaacatgcatggggcacaggtttcttcttgaatgccaactctgattagttgctaattgctacttgaagatctgtgcttagatccatctgtagcccctttcaccttagagtcaaatgcctggatccggtactgtcacccgcgggaacagactagggtagaaggataaaactatgacagcattgttctcctgagctacagccacatttcttttagtgttttccagatgtataaatgagcttttcctatctttttcttttttactttttcttctgttgggacactcccgtcagtgacatccctctgtattggttagttatttcatagattagaaagtttgtgggctctgcacaattcatccctttggttcctatagaaaagaaatgtttgttaactcatttaaaataaggactacttcacgcaaataaaaaccacttctgtctacttctctaaaaactgaataacctatgtctagtcttcattaaagaaagccaaaaaagaaagtttattccaacatattatcttcacaattaagagtatacagaatatgagggcaagaggactattccaatgatcactgtttgatttagtgaatctggctgctaaattgactctaagctattttctttacagtttgtcacatggtttagagtactttaagaggccagccttcccgggtgaaaagtacaatagtttctaagacagagtattcataaggtttgtggtgttaagaaatattacttttctgcaatctttaacaaatgtggaaaaggacattctgaatttataatgtaaatggggctggaattctttcttggaaaatagaatcaataaacatattttcagaagtaaaatatattgattgagaactattgtctaaatattccccaaaccctagatgttccttgtcaaatatacacacagaagatgtactgtgctatatagatgaggattgatgataggaatatgtagatctacacgttagggataattttatttcagtttaatgacatcagaattcaaaagaaatgaaacattatacatgtaacaattattgaaatgcctcccatgtactagcagctgtactggttctgcccttgggaagtttattagcatagctgggacacaggcctataaatagataattaaagagaatattgttaaaggccatataagggttacgcctagggggctgtcaggatatgtcataactccccacatttcaaattacaaaatttgctttactccaaaataaaggtagctttattgtacatttaagaaaacttgaaattgtaaagtgtttatgtgaaatgttaacttacagacttgatttaccaaatttatagcagtaaagtaagtcccatttttcagaatatgaggtatgtgatttcagctccttaaatgggatacctcacattattattacagtttaaaacctatgagattttcttttctatttttaatccttctcttaatgatctcatttattgtctactggaaatcaatttaggaaatcatgttagtccactaagcacttcagataaggctattccatgaagcattccaagattatcacaaggaattgctttcatatgccataaaagaagaaataagcagaatatggcctgctgaagaaggttacagttttacagcccctcccattgcagctcttaagtcactcagttacagttaactttggattagcactcacagattgaaagcaaaacacatcaaaacactcatcacgcactctgggcttgtggtgccacttgtatgtgtgtttctaaatcaatgatgagggtatcagaaccaatactggacatggacatggcaaattacagtgaagttttggacccaacttacacaactttggagtttgaaactatgcagattctatataattcaagtggtgagttatcatctgtttatagatgtaaagaaaagtaagtataattggagaaggtggaagactgagcttccaaaggtggtggctcaatgttttttttgctggagagtttagggcttgcttttaaggccacagatctgagcttttgcacttcattacaaaatttaagttaataatgctgtggctattttgtgttagaggtagaaaaagcctggttttgtgtaataaagtaatgtcagaattctgtcatgggccagttagacaggtaaaaagagtagtctcagctgttattttatttgctgtaaatcatagtaatatgtcatattggcagattggctgtgaaagtatattttctaagcaatatttaaaatgacttatggaacaaagtttccatagaacattagggagtttcactgattgtctacccttttccttataattccagttctcaattgctagtgatgagaaactacatttaaaattactatcaggtttttgcattgaacgcaaatatgaaagggaataaggcttgtattataacctcacctgacaggctaatgtttagccgcacaaagctgttggtatttaattactgtaacattttaactttaaataagacatgagttttttaggggtagtgtctttatgtaatacagcttactattgactttgaatttagacttaatacccggtaaaaaaaatcttgtttaaaatatgttataactgttagaactcctaagatcgagtaattatgtatactttggaaaatgtgtatgtgtgtgtgtgtgtgtgtgtgtgtgtgtgtttaatgcaagattgagaatatatcttgtactgaggatatcttactattctactgtattgtataatttgtatgactggtgttctgg

SEQ ID NO: 11997 - DNA, 6000 bp, Homo sapiens
agatgcttcctctcctgctgcagcctcaacccccagctgaccaggaggtattggccaggctggacccctcaggaccctccagccaacccagcccagcccaccggccctacctggcccactccagcccctggttggcagggtagacaggagtgtcccctggtggccctccactcccctggcctccatggcctgaaaatggccaatcacccgccccactaaacccaccaaggggcctgagtcactgcccctcactcaggatctccaagcctctgtgtccatgacaccctctgcacacaaagtgctgggtctccaggcccgcccccggccaaggctggccttcaacgcccccagcaaccttctcaaccctgctcctggtccctcacacctgccaggtgctgagcatgggcggttccccacccttggtctccaagaatgtgcattgcagcacagccttcctcccgcctcaggtcttgcctgcccattcctgcagctttctgtcctgcctgcacctccccatctcacaccatcattggcatcgtcacaagtaacctcagaaggtgacaaggtaatggctccactgcattccttgctgccgctaatcctcaccacagaaagggaaacggaggtgcagacaggcccatagcagcaccaggcctcaaacctgggcggtgccttcagagtccacactcccactcgccacagatctcccacatcacccaagctccgtttgcttccagcctttcaaagagctgtggccactaccactctccatctcctacttcccactcacccctcagcccaccaaaacccagccccacccctgctgttcctccctccagggagctgaggaccctggccagcctgcactcctagccctgcacatgccacacctctgctgccccgaccctggtcccagcctccagcatctctcgctaggtagctaggctaacctcttaactagtctctgtctgccactcccatggtgggtcctcaacagaggtgtcagggtgagccttgtaaaatgacaccagcagctgctacagctcccagcatcagcaacagtagaaaccaaagtcctgggggccgggcgcagtggctcatgcctgtaatcccagcactttgggagactgaggcaggtggatcacgaggtcaggagtttgagatcagcctggccaacatggtaaaaccctgtctctactaaaaatataaaaattagccgggcatggtggcaggtgcctataatctcagctactcaggaggctgagtcaggagaatagcttgaacctgggaggtggaggttgcagtgagctgagatcgtgccactgcactccaaccaaggtgatagagtgagactctgtctaaaaaaaaaacaaaaacccaaagtccttttgaggacctgccccctgcccagctgcacctgaccagacctcagtcccttctctggccccatgccccctgcacaccctgatgctcagagggctccaggctctcagctcttcctgcagagctacaggccactcctgcctcagtagcctgggactggcccttccctctgcttggccctaccttccccacaaacccccatggccacccctctggcatgatctcccttactctgccttttttttttttttttctgagacggagtttcgccctttcacccaggctggagtgaagtgccgtgatctcggctcactgcaacgtccacccactgggttcaagggattctcctgcctaagcctcccaagtagctgggattacaggcacgcaccaccatgcccagctaatttttgtatttttagcagagacagggtttcaccctattgggcagactggtctcaaactcctgacctcagatgatccacctgcctcagcctcccaaagtgctgggattactggtgccagccaccatacccagctattttatttttatttacttatttatttattttttgagacagagtcacactctgttacgcaggctggagtgcggtggcacgatctcagctcactgtaacctctgcctcccaggttcaagccattctcctgcctcagcccccccaatagctgggattacaggtgcacaccaccacgcccagctaatttttttttgtatttttagtagagacggggtttcaccgtgttagccaggatggtctccatctcctgaccttgtgatccacccgcctcggcctcccaaagtgctgggattacaggcgtaagccaccgcgcccagcaagcattttatttttcttaaaggtctctcaaattttgtgagcttctgcttctacaaaggtagaagttaccttctacaagggtaaatccatccctgctttttccacgttttctctaatggaactcatcacaggttatccattacgccgaccctggctgcagagggcctgccacaggcaccactcacaccacaagcagactggtacagtttcgggaatttctgtggactggttgtccagctgggggtaacttgaaaccagccccggtggagtattcacaccacgcgcatgtgcaaaacacgcaccccaggcttcccctcactaggtccggctgctaaacactgcgccagcgcaccataggtgcaggactcagagcggcctgggagaggccggccctccaagggcgggagggcaggtggggtctgggccccgggtgggaaggctggcagcaggatgtaccctgcctgtgtcagtcactgctcccccaagaggacttgggagctaagcagggaggtggcctggcctccagtcctgctgcatccccaagcctcagcccctcgcagcttgtgaggacgttaggcagacaagcgagcgttcagggtctctagtgtgaaaacaagacatcgtatttgttagtacaaagggtgactgtggtcaagaataattgtacattttaaaacaactccaagagtataactggattgtttgtaacacgaaggacaaaatgcctgagctgatggataccccatttaccttgatgtgattattatccatggcatgcctgtatcaaaacatcccatgtagcccgtaaatatacacctactatgtatccacaagaattaaaaaaataaaaaagggtctctagtagcaggcctggcagagtttgggctgacagagcaaatggggcaattaaaccacgaggcctcgatttgggaactaaaggattaggcttcttgatttgggagagatctggatgaaaagaagtgaacgtcgggttttaaggccgagaacggacggtcagtcccgggcagcttcagcaaatcccgcatttaggaataaatttcttaactaccgaacggccagtcaaattggccagaccagacttctgcctccaggggtcttcagcgcccaccgcccgaccccacccctcggcagacagtgagaggcgggcctctggccggagcgaagaggaacacgcaaggcggcgcagcgggaggggtccgcggaagccccgcccacctgcccctcccaccccgaagctcgcccggccccgccccctgccccgccccgtcacaaggccccgctgcgtcttccgagccgcaggcgcaggcccagctgagcggccgccgagcgggtgcgggtgcgggcgcatcggccatcaccgcgcggccgcgcagcggacaccgtgcgtaccggcctgcggcgcccggccaccggtgagtccccggcccgagcccaggagcgcctctgacccgctgcgccgcgcggcctgccgcccccgcccccgcccccacgcggatcttgcgcatccgagcgtggccgcctcgggtcagtaagttggtccggccggggcgcgcggcagctcgcggccagaggtggcggcggtggtgggggcggggagccgcggcggcctggagccggagggagggggcggcgcgctgcggcgactgctggacccgtgaccctgtgcgcccccggcccgcggagggcccatccgctctcggtgccagtgccacggccgcagcccctacccgcctcgccccacgcccgctttgttccccgcacgccccgtggtcgcttccatcccccacacacccccgcaccccgctgttcccggcgtaccccactggcaggcaccggcagccgatccaggcccgatccccccaccccggagccaggggccgttgggccctgttgttgggctcgcgggggtgggggggctcgggcctttgttggtcacagatggcccggggatttcctgggatagaaatagccgccggctccggccccttaaagctgcttaaggggcgggatgcggaggggagggtccgggcacaccccacacgtccccggccgagaccccagcctccgcgctgagctcccacccgggagacgccggcagcggcgcaggcctccggttgcttgtgagaaacgacccaagccccaaatcccgaggctggcggtcgtcccctcgcccggcccctcccccaccctaaaggcggcctagagccctgggaaggccccacggcgccgcccgtccggtcctcacgcgcttctccgggcccaggctccggggctccccacagcccggggcaaaggtcacggtcttcccttgcttccccctgggttcccagaagcaggtggagttgcgcagggctgggtcccgacgctgtcgtcaagccaactgttccactgttccttgtctgtcttctctaggggcggaccgcggaacccgaggccatgtcccatgaaaagagttttttggtgtctggggacaactatcctccccccaaccctggatatccgggggggccccagccacccatgcccccctatgctcagcctccctaccctggggccccttacccacagccccctttccagccctccccctacggtcagccagggtacccccatggccccagcccctacccccaagggggctacccacagggtccctacccccaagggggctacccacagggcccctacccacaagagggctacccacagggcccctacccccaagggggctacccccaggggccatatccccagagccccttcccccccaacccctatggacagccacaggtcttcccaggacaagaccctgactgtgagtctcaggaagggaggggtggggtggccgggagggcagggggaggtgcttgtgagtggcgctgacccagcctgtctgcttctcagcaccccagcatggaaactaccaggaggagggtcccccatcctactatgacaaccaggacttccctgccaccaactgggatgacaagagcatccgacaggccttcatccgcaaggtgggtaggggcatctccaaggcggtgggggctgtggctcccagcggatgactctgagcggctccttccccaggtgttcctagtgctgaccttgcagctgtcggtgaccctgtccacggtgtctgtgttcacttttgttgcggaggtgaagggctttgtccgggagaatgtctggacctactatgtctcctatgctgtcttcttcatctctctcatcgtcctcagctgttgtggggacttccggcgaaagcacccctggaaccttgttgcactggtaacccccaaacctgagcctctgtgcctgggtccggccatgcagtcccacacgcccactcttccgggcctggtcaccgtggttctccttgtgctcatgaggcaggggccggcaggggtggcatgggggcacacacccaaggtcagcctgtgtctcccaactgcagtcggtcctgaccgccagcctgtcgtacatggtggggatgatcgccagcttctacaacaccgaggcagtcatcatggccgtgggcatcaccacagccgtctgcttcaccgtcgtcatcttctccatgcaggtgaggggcctcccgtggctgggctgtggccgcaggggctgagcagctttcccaggcccagccccatggcccgttcctctcccacctgcagacccgctacgacttcacctcatgcatgggcgtgctcctggtgagcatggtggtgctcttcatctt

SEQ ID NO: 11998 - DNA, 6000 bp, Homo sapiens; identical to SEQ ID NO: 3825

SEQ ID NO: 11999 - DNA, 6000 bp, Homo sapiens
cagcatgtgaatttcccgagaggacggggggcgggtggtccctctcccacatcccaggaatggattaaagtctctcggtgggactgaggtcttagggtccttcctttccagctgggtctgggaggagtcaggagtgcactggatttaggatttggggtcttctcccatcactccctgttccacggagagacaactgtgttcccagcaggggtcagtaaagcagtaggaccactaggggtgagtgggggaggtggtgactggaggtgatcaaagtctactcggagtgaccagacataggcgaggtcttcccctgaatggatttgtgagatttactcctgacttgggacttccagggcagtcacctggacgaatttccagcatttaaccgtggacagacacaagtcctcctgccattcgggaaaactgaaaacgtgagtgagcggtcagctaagcctgggttcagaggtgagaggatgttatctgcaaacatccatctttgcagtgagcaaacagacgcatttggcttgaggtggagggcctggccctaggagacaaaaagaccccctaccaaacagcatttttctctaaatgccccttgaattgagacacagttgccgggtctcctgcggtcttattctctgtgaggaatgtcttcctcagctccacaggccggcctcaccaattgtcttgggattaacccttggccatcccgatcttgctctctcttctctgtgttttccttccagcctccatgtcaccttttgagtgtcaaggcatcttccattggccacgaaatgacagagaagtcatccatctgcagaagcctcctgtgtgcaccgtggaatcaccgtgtctgtacgggcacgaatgctttaagaaaacagccctgcttcttcacaaactctagtcatttcacttggaatctgtccatcaagaaattaggtttgcagagtccaaagcaagctccctagagctttacaaacaagctggcgggcaaggcagcgcgccctatagtgtctctgtggagcgctaagatctgtgacccctttgccacatggggtgtgcgctcagactgggctatgaatatatcagcctctctccacccgcacttagggacagaagatatggagactccaggaacttcatgaactatttgctgtggtcttctgtcccgggatagtccgggtctcactcccagctctccagagcttaaccctccctctcaggggaatgtttgaaacctacgaagaattctcaggaattcgaggtagaaggtggcagagagacttctgttcctgggggccgagctgttgtgctgataccgtcctcttggcgtctgccctagtggggacccttgattttaacttgaagttcctggactgggtctaaccttagcatgtgtgcctgagtgatggacttggtatttacaccagccacgctgataagtgcacatgtgtttttaatgttttggctttccacaccacaaacacacagatgtgctgtcgcccgggctaggacttgagtagggtttttctatttaaatatatattatatatttaaaaaagtgtcctcccagagctaataccgttgctagcagctcttcctgccgccacaccgggcaaagtccacccactgccccagtgttgagggccaccatgggcggccccacctggagaggtgctgctcacagcaaacagctccaactgcgccttcgcctcgccttccagggagcccagccaggcccactgggtatttacaagcagacctccctcgcttcagccttcctgaacccctgttagttgggaaaccacctgtctgcaccgcagctagagaaccgaggagaggagccgctagtctaaagggctgttggttgaaattaggaagcagtgtaaagaaaaagaaaaaaaaagtttgggaggccaaggcaggagcatcacctgaggtcaggagttcgagaccagcctggctaacatggtgaaaccccgtctctactaaaaatacaaaaaattagcgggggcatggtggcacgcggctgtaatcccagctactcgggaggctgaggcaggagaatcgcttgaacccgggaggcggaggttgcagtcagcggagatagcgccattgcactccagcttaggcaacaagagcgaaactgtctcaaaaaaaaaaagtcttcataatttcatgggtttgcaagtatgatccaggctccccgcttctctgcaagccaatgcgagttaattacagcgtccgccctggtctctctccaccccacgccgtgatccattccccttctttttctccccttgtctctttcctcctcccccttttatttatgtatttttggttttgttttttaaggggtgttgagccgcgtctggttctagtaaaccgaacccgctcgcgagggaggcgattggctcccgcgccggtgacggacgtggtaacgagtgcggctcgccccgccgggagctgattggctgcgcggggcggctccgagggctcggccgtaggagccccgcgcactccagccctgcagcctccggagtcagtgccgcgcgcccgccgccccgcgccttcctgctcgccgcacctccgggagccggggcgcacccagcccgcagcgccgcctccccgcccgcgccgcctccgaccgcaggccgagggccgccactggccggggggaccgggcagcagcttgcggccgcggagccgggcaacgctggggactgcgccttttgtccccggaggtccctggaagtttgcggcaggacgcgcgcggggaggcggcggaggcagccccgacgtcgcggagaacagggcgcagagccggcatgggcatcgggcgcagcgaggggggccgccgcggggcagccctgggcgtgctgctggcgctgggcgcggcgcttctggccgtgggctcggccagcgagtacgactacgtgagcttccagtcggacatcggcccgtaccagagcgggcgcttctacaccaagccacctcagtgcgtggacatccccgcggacctgcggctgtgccacaacgtgggctacaagaagatggtgctgcccaacctgctggagcacgagaccatggcggaggtgaagcagcaggccagcagctgggtgcccctgctcaacaagaactgccacgccggcacccaggtcttcctctgctcgctcttcgcgcccgtctgcctggaccggcccatctacccgtgtcgctggctctgcgaggccgtgcgcgactcgtgcgagccggtcatgcagttcttcggcttctactggcccgagatgcttaagtgtgacaagttccccgagggggacgtctgcatcgccatgacgccgcccaatgccaccgaagcctccaagccccaaggtaaggctgcctcctcccacgtgcgcgagccgccccctccatcccccggccggagctgcaggagaacccgcgccaccctacgcccgcccgccgctgggtcccggtgctggggactgagggcccgaggttgctcgcatgctgtgcacgtgattcctaagcgcgtctggtctgtcccaggtatcgctcagcgcccctcgcgacccaggtgcacggcggggctggcccgggagcggcagctctgcgccttggcctcgcagggactcgctgtggtccccggagccgctcttcctgggatccaacttcgcctttcccatacctgaaacaaagccttgcgctttaaataacaggggagcttccctctcctctaggaggactccgagtccctatcgaagtttttaacctctgagacgggaggaaaaaacaaaaacccaaagcgtagaaagttcagaaaggccgagagaatgcttggagcagcttttgtttattttcataggttcgacaaagatttaaaaaataaaaccaagccctttccttcactggtcattcagtcaagtagccttgggattgctgcaaaactggctgagaaagtttaggaaccgtggggacttctgtttctccaccccttccaggtaccagctctgccctcggagggctgggggtggaaagtcttttctccctccctctagcgtaccccctgcttttctcatttacacaaatcctcagctcattagaaagataaaaatgtaattagctcattgttcatctcctcccggggagagcagctctgcaaaatgcagactttcctaacagcctgagggaccggcccgaggttcctctcaaaacccccttatgtttaaagagcaattcttgagggggaagaaaaaaaaatcctgggaagtcaaataaaatgaaatagatataaagataaaatatacacatcacagacctgacttctatagaagtaaattcaacccagaattctttagaagcgaagtttaggctctgaggtgtggagagggtcagggattggggagctgtaccccagctgcgcttagcacagacgcaggcttcctgagggctttttgaggagggcctttagggtgggggagaaagactgcctacacttagctcaccttaaagtgtctttaacctctgttattgatgctaaaagaggggagtgcagtcacctggctcctcagagtgaggatttgggcaggtgggggaaagggataccccaaattttagatgcttttgcttattctagggagggtggagatgggtccacagtgactgtcgttggatggctggatgggaacggcactgattgcccgcagtggccaggtctgggcaccgctgctctcagagtcaactctggtgttgggagtggagtgagggtagcggatgcatctgcactttgtgagcgagaactgagcagttacctggagcaaacaaagcgccttgtgttctgttggcttgcacccatcccctgcagcctgcgggaatttccttctccccttcctcagccagcggggattagcccagccctgccctgtgaggctgtgcccagccctgacctggagtccattcccaatggcttccgatggtctctttctgggaccgtctgcagacatgagtggacaccttagggggctcggctgcggaaaaggtgctgcagtccacagggaacatggggggattggacgggttgcctgaagaagagaggaaagaatccctcaccccagcccccaaaaggctgtgatgggatggggaaaccccataatcgctgtcttccggacaccttttgccccttggctgcagttccactggtcggcgcccttctcagcctggcttggaaccgtcctcactcacctccactcctcccagcagcgctcaggtagtcaccctcccaagacaggtctttgaggagcaaagagaaaagtggggagagggccggtcgggagtggggcttgggactggttttcccctcagtggttttggtggggggctctgccctgagatggcacaccaccctccccaggactgcaatccctggtgtaagggagccccacgtgatttcctgcgaggtccctgtggaggggagggtggggcgtgtgtgtgtgtgtgtgtgtgtgtgtaggtgtgtagagggcaggtcaagacaaaccagactactgatcctcataaccttatggcttgtggctgtggggtcgtaactggcactttccaatgagaataagtatgcatgcactactcttttattcgtttattctttatgcttttattctttaaaattaaaatgcattttcaaagcagtgtcatatctttgcatactggtttctgttcacacacttgggcaaattcagttttggattattggccagctgtctgtggtcatgtgttattaaggagaaacctgataatgagaaatgacttgacatttttcccctgcaaaggctgatacccaagccatagaagctcctgttagggaagaggcaattgctctttttctagggaagtcatttttgaatttggcacttccattagaactgtgaactcccaggctgatgcattgttgtttccctctctgcctggttttactgggtgaagttgtatgagccagcacat

SEQ ID NO: 12000 - DNA, 6000 bp, Homo sapiens; identical to SEQ ID NO: 3105

SEQ ID NO: 12001 - DNA, 6000 bp, Homo sapiens; identical to SEQ ID NO: 3830

SEQ ID NO: 12002 - DNA, 6000 bp, Homo sapiens; identical to SEQ ID NO: 3104

SEQ ID NO: 12003 - DNA, 6000 bp, Homo sapiens; identical to SEQ ID NO: 3828

SEQ ID NO: 12004 - DNA, 6000 bp, Homo sapiens; identical to SEQ ID NO: 3831

SEQ ID NO: 12005 - DNA, 6000 bp, Homo sapiens; identical to SEQ ID NO: 3827

SEQ ID NO: 12006 - DNA, 6000 bp, Homo sapiens; identical to SEQ ID NO: 3826

SEQ ID NO: 12007 - DNA, 6000 bp, Homo sapiens
aagcatatttttttagcaataaagcattttaaaaataaggaatgtatattttaaggacataattctattacacacttaaaggactacaatatagaataaacataacttttatatgcattgggaaatcaaaatatttctgtgatttgtcttattacaatattcactttgttgtggtggtctggagctgaacctgcaaaatttttgaggtatacctataaagatcacgagctttggataacccaggactagatgtaaatcctggctcttctacttccaagagagatgaaatagacaagttccctaaaacccttaaacatttttttgcatagctgtacaattgagttagtaatgtgtactctctaagattgacactttcgggcctgtcatcatgacagttcttctcttagtactgtaattatagaaagaggaaaaataaagataaaaagaaatataattgtaaaccttcaggtggcacacttaatgcccttcaatatgtctcctctcttttgtttgcagtctcctgtttcacaagtcatttacaagatgatacgaacatgacagtttttcagttagctttctaaagttcccttccaaaagctgaacatacctacatgctgtgtgaaagatattcatctgggcactgaaggagctatgcagctgagtctaatattggataacttacacatcttcctctttgatgtatagtagtagccccacacagaatgtccaagaatatcctccttagactatagggcactgcttcaaggaatatatctcctgagtttggagaatctccgatattcttgaaagtgaacagaaatggggattgatctcccagcctatctctttacttacattcttcattttcagagtcatggacttacctgaatacagtagtgcaccagggatgcagaacatgccatagccttttgctccatatattagtcaggaatcaaggagatttagaagcagagcctctaaatctatatctatgtctttctatgtctatgtctatacctatatctgaatcatctctatctttatcgtctttttaggtatttataaaagttaacaggatttactctgttacagagatttgaccataagcaactatgggaggtagttgggcagtctctacaaggctgttgtcctcaagtctgatgctgggaacttgaagttcaagtaattcagaaagggcaatgtatgcaaaagtgaggaagagcaaaaacaaattggaactcataggcatgagttgaagaccaggaagatggactaaaatctgtgccagttctcattatctctggcctcagtgatgtggatatcttgcagaagttgaggtccattatcatggaactaaatatacacgcttgacccaggagctggaaaagctgaaggagaatctcacagaaggtggaggaattgtatgctcagtcacaaccccacattaatgagggaagctagcagatacacgacaatgatagcaattatgtgggccatgttttgtgatttgttttattacaatattcactttgttgtggtggtctggagctgaacctgcaaaatttttgaggtatacctataaagatcatgagctttggataacccaggactagatgtaaatcctggctcttctacttctaagagagatgaaatagacaagttccctaaaacccttaaacatttttttgcatagctgtgggccatcacatattaaacaatgaatgttgtaaaagaaaacctgcactatttgtttaaaatggtaagatagatttcatttgagctgctgaaataagggagagagacttcagtatagaactgagctcaactccaaatacagcaaagacagctggggatttgtagccaatgaacagaatgagggggttaatggatagacagttaccaagaggagcttgattacatatgaagagtgcggagatagttgctaagctgagctcagctggccaaggatgaggcctggtcaggaagagagctcaaaggagcctgactgaagtttggtcatggggaaatttcttatcagcgtgaactaccaatacaactgctgtttcacttttgtactccaaatctcacacaaacatcttcctgatggtacattctaattgagaatttgggaaaatgtggttcagtctagccaaggtaacaactacaaaatgaccacactcccatttggtggccctggttcttccagacttatttattttcctgtcatgagatccaaggcttgggtagtggattgcctcactatcttccttaaaagtagattgttaggtggggaatttattggtgggacaatgaccacctttgtcccatgcttctattttgtctctattgcagccaagggcagaactgactaggtttgtcaaactttaacccactttgcttgcttttagctagtttcactgttttaaaagattactaactctaaatggatgtcacatagctaagcaatacatcacaagactcccttgagcttccctgtagataccatctttgatgtacgtatgggtcacaatggtagcagttgcctacattgtttttcaggaaactagagtcaactcttgtccaatttaaaccaggtgagaccaccacccctccacctgggtgagcctccacgaatgtccgacgtgtgatcttttgacatcagagtgccatttataagctccaccctcatatcatgataacattatcattttctgaacatccatcctatgaggagccatgaagcttgactgtgcttgtgcagaacatcaattatctcacttttccttatccccagccacctttctccatgcctcagaccaccctgctcctctgtcccataaatattcttaaaccccatctttaggagggcagatttgagacctgaactcccatctcttcacttggcttaaaaagaaaggaataaatcctttctttttcggaaaactcatcatcttggtcattggcatactgtgctgtgaacaaaataggcctggttcagtaacactatcttatggagaactttctggtattcttttcacactcccaggtccttgctctccgagagaagaaacaaggcatggttttatttgggacatggatctagttgtgtttaccgaaatccatgtagttttctgtttgtttgtttgtttgagacagagtctggttctgtctcccaggctggagtgcagtggcccactctcagctcactgcaacctccacctcccaggttcaagcagttctcctgcctcagcctccctagtagctgtgattacaggtgggcaccaccatgcccggctaatttttgtatttttagtagagatggggttttgccatgttggccaggctggtctcaaactcctgacctcaggtgatccgcccaccttggcctcctaaagtgctggaattacaggcatgagccacccactgcactcagccctatatcactatgtagtattatcagtgaattttcttggatgcaatctgccagaaaatagccagttttcccaaaccaaagcaaaaccaagcaatttcactttcacttactctgaggggacaattgagaaatactttactaggccgggcgcagtggctcatgcctgtaatcccagcactttgggaagcagaggcaggtggatcacctgaggtcagaagtttgagaccagcctggccaacatggggaagccctatctctactgaaaaaaaaaaacccacaaaagttagctgggtgtcatggcacacccctctagtcccagcttaaaaaagagacagacagacagagagagagagagacagagagacagaaatacttatttcctaggcttatatgtgctccaggtttatgagactttggaaattctcaggacagggctttgcattataaagtcgacaaatgtgggagctactaaagccctagacttgtaggttaggacaagatggttaggaccctccttccctctgcccctggggccaggtcttctttctcttgtactttctgttcacaattttctgtatgtgactaaggctaccagaatgataggtgactggttaaaagacaggcttatgtttcagagcatttccctcccttgccttgctaattagcttctggtaatataagcctgataaaattgtttcctgaaagcttagtgatttaaaaaaatgtgaagaagagagagtcaaggcagtaaaaggacagtgaactaattcctcagtgttcatgggaagaggtcagtatttgctttctaaagttgagatatttagaaataaaagtctttttatattatttagagctatgaagacaagcaccaaaaagatctaaaaccatacatactttaaaatggttggcttctaatcccaggactttgggagacaaggtgggaggatcacttgagcacaggagttcaaaaccagcctgggcaacaaagtgagaccccccatctctaccaaaaacaaaacaacagccaccaagaacaaaccaataaccaccaaaaaccttagccatgtgtgatggctcatgcccgtagtcccagctacttgggaggctaaggtggaagaattacttgagcccaggaggtcaaggctgcactccagcccaggtgacagagtgagactctgtctcaaaaaataaaataaagtaaaataaaatgattgtttccagagcagggaactgggaaggcatttgggaagcagtgaagtagagtaggaagccccaactttgcactgtaatccatgtcttcttggaaattccttttttttaaaaaaaaaaaaaatctgaatgcattcttttgatgataattgaaagacaagtcagaccaaacccttctacatcttggtctattttattgaatgtgtcacatatattttgttacttattattttttgtccccaccttccacctctattttgttaattattaaaaccaggctatacttaacgaaaatggaacaggaaggacagaattattttatttcaggaatccatcaacatcctttgcagctacataggcaggaaaatctagaaattgtaatttatatagaattttaaaactcttcaattacaatggatagaggggagaaaatacagctcaagagagtgtttggatattggtggggcacaagttttttgcttattaatatcattggtgcaggaatttttgtgtcccccaaaggtgtgttggcatactcttgcatgaacgtgggagtctccctgtgcgtttgggctggctgtgccatactggccatgacatcaactctttgctctgcagagataagtataagcttcccatgcagtggagctcaatactattttctcaagagatactttggctccacggttgcttttttgaatctctggacatccttgtttctggggtcaggggtagttgctggccaagctctgctccttgctgagtacagcatccagcctttttttcccagctgctctgtcccaaagctgcctaagaaatgtctggcattggccatgttgtggattgtaggaattctgacttctcgtggtgtgaaagaagtgacttggcttcagatagctagctcagtgctgaaagtgtccatacttagcttcatttccctaactggagtagtgttcctgataagagggaaaaaggagaatgtagaacgatttcagaatgcttttgatgctgaacttccagatatctctcaccttatacaagccatcttccaaggatattttgcatattcaggcggggcatgctttacacttatagcaggtaacaatccattgaggaaaaaaatctaaaatcatgacttattgcatacaatatgaaatgcatatcatttgttgtattttgagtcttaaatgatttaatgtttctttcttctttgtgactttctgaatcagatcatgccagcctggcacttgttacctactcttaattattttcctatttaggctaaggtacttatttgattgaacaacttctctttttcaactttcctttctgggaccacaggtatgggacttctgtgt

SEQ ID NO: 12008 - DNA, 6000 bp, Homo sapiens
cattttgtttggcttgccaaatgacttctgctgtaacaggtgcttctgcaactcccagcctggggacagatcagagtcctctgtgggtaaccccatgatggctgagtctaaacgagtgtaattataagaatctcatctcccctgctcccttcctggcagggcctagggtcccggcacaaccatcagctctatttaccgctgtaatcactgccagaatccctctgtgcctggaacctggcacgatgccctccagtgccagctgccttctctcttggttgctttcactgttgctgctgctgccattgccgcagcctctgtttcctttttgaccatgtcagtaacgaaggttatggtagggtgagaaatacagttagggtgacagttgagtctgtgccaccttgcctacctctcgtctggcagcctcttgttccatctgagctgagtgctgggcagtaggattcagatgggtggacacctattacagtagcctgtgtcaagcactgcttctcagggggctgtgtacctctcatctgcttcctgattctgacattgatgcatattgggggtgagagggcttcacctcttcctgaggagcaataatgtcatagtctttctcttctgggaccagtacaagagggatctgttgaaaagtaataatgatgaaactaacaaaggaatcagccaccactcccgtaccagccattgtgccaagaactgtgcatgtatcagcttatttaatcctcacagtgacttgtaggtgtataggacctgtttttggagctatttgaacttggtgtttagtcctggctctgccacttaccaactatatgacctaaagcaaattgctttaaattctttaggtctctctaaggaagccagtgaaaatgggacctgtcttatttaaatcttaagtaactcaaatcaggtttgggagaatgagttaatggcgaatgaacttctacgtcatgtgtttattccatatctttagtttcatatgatcttactacctttttggactgatactttccctgcgcccttctcttcctcacatctttatgtcttggtgaccctctgccacctgctcgctgttaggatgttgtctcagagttccctctgttgattcaaaaattgacttagcaaacatgggaataggcagcaggaagataaaaagtgaatagtcgctgctacttgccaacccctgaatctgcctggcatgcagcgctatgtatgtttacaacgtaattgtcccaacaaaactgtgaggttggaactatcgcacttcccattttacagaagaagagagtgagtactggagagatgatgtaatttatgacgatccactcagctagcacgtagagatgtcaagattcacatctgatgtttggagtggtctggctattgggcccctcccaaactaatgagagagacctggaactagtgagtaaattcaatattataatagaagaatgtatgaattgctaggagggatgctttttgcaggagtcagacaatgaaggtctcattgaagacatgcctccaagttattacttggtgtccacctgaaaaaaagccctcacatcctgtctaaactagttgagtgatcttggataaattactccaccctatttagcctcatttttttttcatttgaaaatgagagagatagtggaaatgccccctaaaacattcctctaacttagagcctctattttattctaatcctgccggcttgtaactggacccttcaatcacttgctcctgacttgccaagactttctgattcccgttacagcatgatggacagctgaccatttgtccctggcccctggcaatgaagtagactctcctggtctcaaaccttacctgaccacagcgtgagctgacgcagccttgatgatgacagaaagcaattcttgtcactcttggatgcccctctgctcttttcacccacaccatgactgcagccaggggcaaatgtcacatttgcacttctgagacagacaaacatcacttagaacttttacgtgttatgattttagaggcagcctgctgtggcagacgctgctggctgagaaccgcgccttgtgcagcctctgcggccggatggtggagttggaatcttggctccttcacttcctcactatgttaacacttctgcagttcagtttgcttatctgtaaatgattatgaatcatacttaccccaagagtttgttatgaggatctagtggactaatacacataaagtgtttagaagcatgaaaatagtggcttatttttacaacagccaacccaacaagtgttttgctcatccttcttgcctgttggaagtgcccaattccaagatagggacagagatgatagcttcacttttcccagtccctcttgcagttcaagatggcttttgaatccagttgtgtctgataaaacataaagggaagtttactggggggtttctgagaaacaattttttccccttacatgaagagagaaaataaggtgtcttcctccctatctctttttttctttcttccaggtattttcacatgcaattgtaaagcttgcctatgctgcagccaccctgtgacctaggtgggaaatatagcggcactttgaagatgacaggacagaaagatgaaaagcagtgtcttcaatgacatcaatgagcttctgaccccaccctgcaactgcctacctatggctagtcttgttctgtgagacaataacaataataaaatccaattgtttgaggcacttttattggggtattcagtttcttgcacctgaaagcaccctaactgataacttaatcccccaaaacctcctgccacaaaggtttgtgatagtgcatctctgatggcaactgtacatatcattggaaactatcggcacaggacttcagagacatcattacgttgcttaaatgtttcacatatgcctttggcgaggatgaattctatgcaatagtgtgtccagaatttggtgggttcttggtctcactgactaagaatgaagccacggaccctcacagtgagtgttacatttcttgaagacggtgcgtccagagtttgttccttctgatgttcggacacgttcagagtttcttccttctgatgggttcgtagtcttgctggcctcaggagtgaagctgcagacctttgcagtgagtgttacagctcataaaggcaatgcaaacccaaagagtgagcagcagcaagatttattgtaaaggacaaaagaacaaaacttccacacaattgaaagagagcagagccggtagccactgctggctctggcagcctgcttttattcccttatctggccccaccctcatcctgctgattggtccattttgcagagagctgattggtccgttttgacagggtgctgattggtgcgtttacaatccctgggctacacacaaaagttctctaagtccctactagattagctagacacagagcactgattggtgcgtttacaaaccttgatctagactcacggtgctgattggtgtgtttacaatcctttagctagacataaaggttctccaagtccccaccagattaccaagatacagagtgctgactggtgtgttttacaaaccttgagttagacacaaagtgctgattggtgtatttacaatcccttagctagacataaaggttcgccaagtccccactagactaaggagcccagctggcttcacctagtggatcctgcactggcagcaggcggagctgcccgccagtctcgcgcgccctgcgccggcaatcctcagcccttgggcggtggacggaaccgggcgccgcggagcagggggcggcgctcgtcggggaggctctggcgtcgcaggagcccaccgcgggggttgggaggaggctcgggcatggcgggctgcagttccccagccctgcgccgcggggaggcagctgaggcctggcgagaattcgagcgcagtgccggcactgctggggaacccggcgcaccctccgcagctgctagcccgggtgctaagcccctcactgcccgggccggccggcggctccgagtgcggggcccgcggggcccacgcccacccggaactcgcgctggcccgcgagcgccgcgcgcagcccaggttcccgcccgcgccactccctccacacctccccacaagcagagggagctggctcccgcattggccagcccagagaggggcccccagagcgcagtgtcgggctgaagggcttctcgagcatgcccagagcggacgccgaggccgaggaggcgctgagagcgagcaagggctgcgagggctgccagcatgctgtcacctctcaataggagatcagttaatgcatactgaaggaaggcttgttggagaagaatcctctcctgaaccctgtggagactctagaatcctgcggtaaatgttctaattattgaaaacatttcccaatgctcaccctcattaaggatgttctaatgcctaggagacctactacctatctgattctgtcagagaagccattttgttttttggcaactggaagcagtggggatgaaatattttcctaaggcgtctcaggactgaactggcagcaaaatagtaaactgtttatcagctcttaaatttttataccagggaggtttagcaaactgtcagaaaacagcctgaattgaatttctataattactgcttccaaattggtactgagggtactagttgctctaaacttctgcaggattcagtctgggacttttcatgctaagaaatatctcaagattttaaggtgggattgtcagggtcagaggacaatgtcctctgaaatccaccagtattttactggactttacggtttacagtttaccaggtaccttacagtttaccaactgctttccagtttataatttaccaggtgctgccatagctgatagctcgttaatcttacagtaaccagctgaagtaggtgtgccgtgaggctattgaattttaagaagcatcaagaaagcctgcctgtctaactttggaaatatcaccctcatgctgtcttcccaggatgtctctctccctaagtaagagatgttacttcctggagggaatgcagtgttgggaatctgaagacccagctttgagctgaatttgctttgtgatacctggtgagtcattgatgtctctgggcttcaattttctcatttgtagaaacttgtagagtaaggcatcgaactcataatcatctttaagattctttgggttaagcatgggcatctcctgctaatggttttaatttgaaacaatgttgttaccaactcattagtgtgaattaacctaggtggtgataccaaaaggttgagctttatttaaagtgtgcttagtgagcaattaaacaagggaagcttgtttaaaaagaagagtagaaaaatactgaaattaacaccatttgtccctggcccctggcaaggattgctatctgctcctcctcccaaccttctcttggctatgctccaaaacgccttctctcttgtagcacatccgatgtaagtttgcttcctatttactcccttagcactcaagtttcccctatgacagcatctaccacatgtatcgtaataccttattgaattatctgttccccaccccgccgtctagactacaagcaacatgagagcccaaatcccatcttccaattttttggtgattccttgtatttttataattttgccttgggttaactttattgaacagcatgaatctaacagtgcaaatttgctctctcttcctgtcattcattcaacatttttgttgtgtctacggggtgccagccactgttctaggtatgtgttgagcatcagttttaaaataagcatctttctggatgctgagcgtaggacaataaacctgaaaagatgggattgggctctcatgttgcttgtagtctagatggcagggtggggaacagataattcaataagatattatgatacatgtggtagatgctgtcttaggggaaagttgagt

SEQ ID NO: 12009 - DNA, 6000 bp, Homo sapiens
agcctttcttcctatatgtataggagaggttcaggccagccctggatgtcctaattcagaatctggagtccatccaatggccagtggttactttcaaagcaatgagacccagtagcccagggaaggccaagctgacttagggcagtggtggccaccagcctcctggtcagagaggcctcccaactcacatgaggccaaccccttcaggttgacactcctcaccaggtctggaatgtgttagaaataaaagagcaccactggctggggaagcctaactttatagcaggccctgctgctagacaccctcgactgaaccttaaaggtgtgttagaccttgaatcctgctgccctggttccctcgcccacttcagagacacaaacacacttgtgtggagactttagagcagacctattctagacaaatggacctgcaggactcccccttagaaaatacagataaagaattatttacatctgggaacagctttgtagaaaatggcatccaaaagacaagctatgctgctgttggcttgaaccacattgtagaagcaaaagcccttgccccaagcacttccactcatgaagcagagctcaaagccctagtcatggctctttaactaagggaaggaaaatacttaatgtatatcctgcctctaagtatggattcctagtgctccatgttcatgcagctgtctggaaagagaggagattgtggactcctaggagctcccccataaaacataaaaaagtgattctgtcccttcttgaggcagttcagctccctgcccagatagctgtcatgcaccatgaagggccccagcaggcagttctttaaccagccgaggagacagctgagctggtgaagctgccaaacaggtggcccagacagagcggcttggccccttggctcctgtaacccatgttcctaccataggaaggaggggcactgggaaagggactgctcattccatcctaggaagctgggacagaatgaatctgcccaacccactcctcctgttgctagccgcttcctagccactttcttctagacgaagatttaaatcaggtggtaaaatacatcattaacttgggacaagttcagcaggccatcttgcaatatgataataagatgtgacctcagccgggtcatggagtttcagatcatttccctgctagcccaggtgcacaggtcctactcaagacatggcgaaaaggaagcccagaggcttagttcactgagaaatgaaagggtccataccaggtttccttggctactccatcagctgtacagttggaaggacttgtctctagaataaaaccttttgcttctcctgatggacgacaggcctgcttggagaaaacagtctactcccgtaaacctatagaggacctcaagtatttgttcaagaagctgcctctggaagacagcaatagttaagtaacatccttatataaatgatatataccaggggatatgcagactatcttcaggaccctggcttgatacccccaactgcacaattcataacctgaacctctccattctcaatgacaccaggggatatgcagactatcttcaggaccctggcttgctacccaccaactgcacaattcataacctaaatctctccattctcaatgacaccaggggacattcgaatttgggctcctcttggaattgttttccctcgaggccacgctaatgacctcctcaaccaccctgcttgcctagctctttccccctgcatggctctgtgggcttggacaccccaagcccaggccaaggaagggccaggtctggcacccagaagtcccccacttgaccttgactccttcaagtcccccaataaactgccagtgaaccaccacaagctgcccaaatccattgcgttagactgatgcaactgagtgatggggaaggtgtgggtccctccagctttcgtgggtgctaagactgctgggtgtctggcactgctctggccctgggacacagcagttaggaggccaaccaggccctggccttctggcttcagagtccaagagggacagaagtattccttgcttatgtattccctgtgtaagattgcagcaaggctatgcaccctgggagaggttcgctgtgcaaggagagccctggggatcttgcccagtctctgggcccaggaagcggaagatggaagaggagggaacagcatgtgggtgggaggggagctgggagagcagaagttgggaatgaatgggcaggggcaggagcagaggaggtctggagggtgggtagagaccttggaagctccaactggtttctcattcatccatcttcaccggtatctccagggctaagcctccagctctgggtccctcccctggcaggagaggacacagtggtgtaaaccaaaaatgaaattctaagcacccccaccatctgaatgcacccctgctcttgaccaagggcagtccagggttaacctgaaacactagttcagaccacgacaggaaatgggtgttggatatgcctcactgtaccctcctccctttggatttcaggcccagctgaccagcagtaacatcaacacaccccttaaagactgagagaacagactctttaagtctgatgagaaacatttacaatctattctctctgaagcctgctacctggaggcttcatctgatcatgaaacactggtctccacgaccccttatcttaaccagacattcctttctattaatgctaagtctttaaaaaataactttttttttttttttttttttggagaagtgaggtctctctatgttgcccaagctggtatctaactcctgggctcaaatggtcctcagcctccccatggcaaggattatagaaatggcccaccatgcccggtcaacttaactctttcaatcaattgccaatcagaaaatctttgaatctgcctatgacctagaagtccctctgtcacttccagttgtccccacctttctggaccaaaccaatgtccatcctgcaagtattcattgatgtcttatgtctccctaaaatttgtaaaacccagttgcaggctgaccactctgggtacaagttctcaggatcttctgaggccgtgtgacaggccacagtcacttagatttggctcagaataaatctcttcaaacattgcacagtgtttcactctttttgttggcaaggggacaacatgggtgaccaggaggctgcattctttgagcaatggccaacaggctcaacggctatgtcctcagtcccttcagcccaaaaggccacccctccctggggcagagggctcagagcccagctacgacaaggtgacacttcagggacaagtgtgagcaatgctagggtgttgggaataggcccccaaaatctggccataaacaaaatctctgcagcactgtaacatgttcatgatggccatgatgcccacgctgggaggttgtgggtttaccggaataagggcaaggaacacctggcccacccagggcagaaaaccgcttaaaggcgttcttaaaccacaaacaatagcatgagccatctgtgacttaaggacatgcccctgctgcagataactagccaaacccacccctttattttggcccatccctttgtttccctaaggggtacttttaatctataatctgtagaaactgtgcttatcactggcttgctgtgaataaacacgtgggtaaatctctgttggaggctctcagctctgaaggctgtgagacgcctgatttcccactccacacctctatatttctgtgtgtatctttaattcctctagcaccgctgggttagggtctccaggaccgagctggtctcggcactgggggagctgccctgataggtagtgagctccctgtccctggggctatcaagcagagccaggtgccgccccagggagctccttctttgagggcggtccagaaccctggaaccccagcccaggcccaggcctgaatccggagcttgtttaacccagcaattccgggaccccatccccggtcgctggcatccgctgtcattcgagagcctggggctgacggggagagctggtccggccttctctgggccgcctttcctccccagcctcgtcaggaaggggcacaggacagccgagctgtgcgacagcccgctgggcctgcgccccagggcctccggcgacacttggagtccgcagctgagtcactgactctcacccgggctcccccgcttccgcccggccgtgatttgctccggtttcaaaagggaggaagggcgggaatgctcgggaagagcctggggttggcaggacctttagggggtggaatgaatgtcgtgagggcgagtaaggaggtaccggctggggctgaaaatgcgcacggggaccatgagcgtgattcgccctgagccgctgcgaacgccctgcgagctggggtggccctggaggtcctggagcagaagctaggttcccgcagagtccgctgcagcgccgctggcgatcgggctgggtcccattttccacgaaaagtcccgcggcttcggccgcggaggtgctggagcctttgcgctcagacgaagggccgaacggccagggccaggccgcgtcttcagagcctggcgagggtctcgcgctgctgggaaggcggagacgccggggcgcgcgtgcaccctcgcgcctgcagcgccgcgcacggccgccaggtgccgctgtggcgctcagcgcgccgcccgccccgccccagggaacgcgaaagtggcgcgggcctggacggcgggacggaccacgtagggcgctgagaaggtcgcgccacggtgggcggggctccgggcccctccccctcggccgccctcgcgctgtggttcgctccgggcgcgctgcgctcgtgagttcccaggaggcctggcgggcaccgtaaccagcgccgcggacaccggcaccggcgccacggactccgcaggaccccgcgcccgccgccgccgctatgctggggctgctggtggcgttgctggccctggggctcgctgtctttgcgctgctggacgtctggtacctggtgcgccttccgtgcgccgtgctgcgcgcgcgcctgctgcagccgcgcgtccgtgacctgctagctgagcagcgcttcccgggccgcgtgctgccctcggacttggacctgctgctgcacatgaacaacgcgcgctacctgcgcgaggccgactttgcgcgcgtcgcgcacctgacccgctgcggggtgctcggggcgctgagggagttgcgggcgcacacggtgctggcggcctcgtgcgcgcgccaccgccgctcgctgcgcctgctggagcccttcgaggtgcgcacccgcctgctgggctgggacgaccgcgcgttctacctggaggcgcgctttgtcagcctgcgggacggcttcgtgtgcgcgctgctgcgcttccggcagcacctgctgggcacctcacccgagcgcgtcgtgcagcacctgtgccagcgcagggtgagcggcccccgcccctggccccggagcacggcctttgtgggacctccgggggctcctcctagtccctggccccctcccctagggaaggcccgctgcctgcacctctttcggatactgctggagtcctgcctcttaccgctcccgcccctccctctctaccgggggcattcctcactgatgcctttgttcgtgggggttcctagggtccccgaatcaactcttcatagtcgggcttagcgtgcttccctcctgccatttcttaacctggcccctcacggtttcgtgttcacccctctcctctctcctggtactctgttctgtggctggagtgttgacctctctggtccttggtcctgaatataggttggagaggtgatcagttagaagaggttcctaggagttcccgaggacctgagcccccctttcacacagcttagagctgaagggctgggttctggtcacctgggtttggggttgaggtattgagccgagtagctgaaagccttctggcct

SEQ ID NO: 12010 - DNA, 6000 bp, Homo sapiens
gtgagccgagatggtgccactgtactccagccggggcgacagagtgaagctctgtctcaaaagaagaaagaaaagaaaaggggaggggatgggagggaaggtcatgtgaagacaaaggcagggattggagtcatactgcccacaaaccaaggaacacctggggccaccagtagccaggaaaggctcatggaacagactgtttcctagagacttcagagagagcattgctctcctgacactttgattcctaactttcagcctccagaactgtgagaataagtttctggttttaaggcactcagtttatggtaggctttgttaaggtagccctaggaggccaccacacaggcactcaggattaacgcctcagagtcagaagaggctggcgtcccaggaaccgtgggctgccacacactctggtctgacgatctccaggtttgctttccatgacagagaaataagccctcggctgtgtaagcagttataggtaagcaagtttgattcctgtttggggacaggtcccacctgctgcccacacacccgggtgaatttccctgaccccactcctcaggcaggcagggtctccatatcaaagagggggcacctgaggctggctgcctgggggtcctgagtgcagctctcctggcttcgaggcaccccgatggggagaaggcagtgccgcaattgtcctttctcagctgagggcccttcccacccagcaaggagagcacagccatgctccaaggacaagagtgtctttactggagttgggactggggcctctataggggcttctggtttctgggctgtaggtttgtgaggtgtgggatcttaagtcaaaggtgggggactagggcagggtatcagaaggtgatgtcatcctcgtacagggacagcagcagcaggacggtccagccgcccagcaggcccacgttgtgcagcaggaagaggagccagggccgcgggtcccgtactttcaacatcgccgggagctgaggagcaagtgggcaccgggtcagcgcccctgctcagctcctctgctcagctcccggcccagagcagcccctcccctcgccatcctgaccatgtcgcagagtgctacgtagaggaacaggccggtggccactgccaggatccaggcctcgctctcctcgctgactccaaccgcgagtgccacgtagagaccagcgaaggccgtgagcgcggaggccaggttcagcagcagtgcttggcgcacggacagccccgcgtgcagcaaggcggcgaagtcccctgcgggcgagtccacattaacagctccgccctcctagctacatgccccgcccacctcctttcggtcccgccctcttaccaccaggccccgcccacctgttcccggtctccccgcccagccgtcagatcccgcccatcaccttccaggccccgccccacctgtttccggtctccccacccagccaggtgcggccccgcccatcttccaggccccgcccacctgttccaggtctccccgcccagccccgtgcggccccgcccatctccttccaggccccgcctgcgctcacccagctcgtgtggcaactcgtggcagaacacggccagcgaggtggccagcccggtcttccaggaggacgcgaaggcggcgcccacggccagcccgtcggcgaagttgtgcacggcgtcgcccagagtgatcatatagggcagtagcctcaactctgcgggcgcagaggcccgtgggttcgcgtggcctgtcgcctaccgccaagccttgggccccacccgcgctccacacaaaccccagatcccccagcccttccggggtcgccccctgggctcacctgggctcagtctcctgggctcagggttcagcagctccgggctctcctccgccacctgggaggagccttgagtaagtcccgcccggaagtggaggaggaacgcggtggggcggggcggggccccagatcaccgcgggaggcggagccgcaggcctggggtggggctgggagtgtgggcgtgggaaggggtcggtgggaggggctccgcgcgggatggggcatctggcgcccactcaccaggtctgcgcgggagccctcgtgggggggcttgggctgccggagctcgctgggtgccagctgcagggacacaccgtggctgtggcccccgtggctatggctgctgtggccgcagggcccgtcctccaggtcctgtgagggtaggtgctcagtgtccaccaggcccccagcacacccacccgccgggtaccttcccaagaagcctgacctccgggtccctgggcagcaggagattgaagaggttctcaaacaggaagaaggcgtagagcccggccagcatagccaggaggcgccaggtgggctgtgggctgaggccctcttcgctgtgtgtatgcagccccagcacctggggagtaggggcgctgggctgggggggaggtcccagggtgcctcccaccaagacccagggagaggggtcaggaggtggggtgggtaaggtccctgggagggcatggcctgggagtccatggtggggaacggagggccagggtcgcgggtttgtgggggcagaccttgggcgtcagatgcaggacagcgtccccagtgagtgcacccactgccaggctcaggaaggtctgcaggatgtagtgggtgacccccctgcagccagtgcaggtcagcagcaggaggccaaagaccgcgcagaggcagatgagcagcgtggccagggagccgtacagataccctgggggcgggtgaggcggctgtgagagcttttcttccagactcagcccctgcttcccgggcgctgctcaccagagctgcaggccgtcagtgtgggccaggccctcactcaggctgaccctcctgcctcaaagccccactctcctggcgacgccaccttcccctgtgtctgttgtttctacttccagcccctgctcactctctccatccctcatcctgggcagccactccttccttcctacacgggctccacctctgtgctgccagcacaatgtcggcgtgggcactcactctctgactggctgagctggtcctggacggggggcctggactgggaggtgcaggctccactcagctgctgttggagcagggcagggctcagttgggcccaggcctccggggtcaccccagcctgttccgacagtccatatgcagccatcacgtccctggcactcaggcatacctggggggtggcaggacaggctcaggggcccaagcagaccccggtgaggccccatcttaccccagggcgcagctcaccgtgtcccacacactggagctgttgctggagctgatgaggggcacagggtcccagctgctggctcccctgtgccgatgactgtggtcactgtgggcctccctgcccacccccaggcgctgcatcaaggctgacagctctggcagggagaagagttggcaccgcgagtctgtgtgggctccggccctgccccccagggacgtggaggctggggactcgggggtgcccccctccacagcccagcccaggcctcaccggccagcgtcatagggacctcgctgctgtgctgctggaacacaaagtccacgaagtactgagggctcggcaaggcgtggaagcaagacccgctcctgacatggtccagcagggcagccaggacgccgccagcactgcccggagcccccgcccccaccgcctcctccagcagctgagggatatctacgcaggcctggggaagagggggcctccgcctcagcctttggtgtgaccttctgccatccaccccgctgcccctggatgcatctcccaccccaactacaggatctgcccccaccagccccgcccctccctggagccacagccctccctgccgggcccagctgcttcaggctcccactcaggcctctgggttcctccctcatgaggtccctcccggggctcctacaggctcccaactgcccagtagtgagccccacgttgtgaatccccagccgcaggccgactcctgggcgtctccccaggcccccaggctccccgaaggctttgcagccaggccgggtcccatgggccgtgggaccctcctcacccactcccctggtctgcctggactctccctcaccgtcttgggggtctggccggcagcccgggcctgcatcctctgcagcagccagctcaggcccggggtcagggccttggggctctcgagcagggccaggaggtggtctgcatgagaggcccagaggccagcccgagcgtcctcacaggtgccctcggggttgctgaggtacaggacggcggcggcactgaggcgggcgacgtacctggcctccaggaccgggcccgggggcagccctgacccctcaggctcgcccaggcccagggcgtcctccacagacaggcactgtgggcagagacaagtgagcaggggcgctgggcccaccagggaggggagaggcaggcctggccaggggcttccccgagggcctgtttccctttcaagtccaacaacgtccaccatcctctctcaacccctggcgcccttccgtctccccaggcccctgtcctgcttccccaactacaggggtgcacgcagaggggtccccaacagtggtcccccatccccaggggactcccctggagccactgccaatttgatggcagagggccggcagggggagttggccctggggtcctggggagaagagggactgtgtccctggaaaggcctgtctgccctcatgagcaggagggtgggctctggcctgtggggagggtcagggtgcccaggtactgccactagcctcctccgcctcctggagtttgcccagggccctttgctgccggctggcagggcggagctggcgggaagaggccagggctgggggacccgtcgggtggggctgttacctttccacacggcccgttggcgcagtgcacacggtccgccagcgtatttaacaggccgcccagagcctcttgatccagagcgccctggccagaggtgagcaggctcagcagaccagcaggcggggacgccgtcgccgtcaccaccagcacagccagaagcagccccagctccagcgagaccagggacgccatactcagctcccagcgtgctcagtgggtgttgctgtggccaaggcccagtgcttctgggctggctgagggcggctttgctggggttgtccagggccagactggggctgggctaggacccgcccgggctgcatgaggacctctcccaggtattcctgcagagctctgtgattggctgctggagatgcctgggttaaccattccagtggcagatcctccccaacagcctggagccactgcctgtgggggtcgagggctgggccccttcccctggacaggcagcctcggtggtcttttttttttcgagttggagttttgctcttgctgcccaggctggagtgcaatggcgtgatcttggctcacggcaacctccgcctcccgggttcaagtgcttctcctgcctcagcctcccgagtagctgggattacaggcagcgccaccacgcccggttacttttgtatttttagtagagacagtgtttctccatgttggtcaggctggtcttgaactcccaacctcaggtgattcgcccgccttggcctcccaaagtgctgggattaccggcgtggctcaccacgccaggccagcctgggtgggcttctgtcctctgcctgctgccccccaagctgtggggcagggctggggtgtccccttctggctgtccatctgggggctgcctccaagctgggggacacagggcagaggtgcacagatgcccccagagcctgagagctcccaggtccctgcctctgcccctcccaacagaggctgcccagacaccctcggtggcccctgttgggggtggggacatggacctccctcctcctgggtcctgggctgtggtccctgttggggactgcgatggagtcaaagaaactgaaaaggtgc

SEQ ID NO: 12011 - DNA, 6000 bp, Homo sapiens
agagaacccatcatgagagcacaaaatgcacaaggactatttactgaaggctgccctcatccttgtgcaaaaggactgtgcagcaccttcccaacaaacaaaaagcatttctggcaagacataaaatgcacaagggcttcttactgaaggtagtcctccagataagagaatcgtgttaactcaagaatcaatgtaagtgttaattttgagtgaggcacggggcctcgatagcaataccttataactgggtggtccacaatgtaagcctgagagtcacacatttcatcttactataaaaatcatggaattacagagctagagagatggagggatctctgagattatctggcaaatttgctaactttaaagaatgggaaactataagaggtatcatggcaagccccacaatcattgaggcctcaagaaaaccagccctggggagacagcaaaagagaaaacaagtaaaaacaacaaccttgttatccaatctttgtgaaatcaatcactcagggatcgatgcttatgtaaagtaatatataacagcaagacagatgattgttaaacataattcaaacactttctgctatagggtcattacagctaagtatgtaagaacacagtggccctcaaaaatcacattcacaccacagcaattgtgtcccatcaccctaccccaagatctaaagaacacttcaacttccccatctaaacatacttctactacatacttctactggtctctgtaaatcaaagagaagtcccctaacttttttaagggacttctgcctccttttgagttcctctctattaaaagatgtgacaagtagaaatccatacatactatgctcatgccacgtggactaaaagaacatgcttcacacagcaaaaaaaagagagagaagacctctttagcaaaatatactaataaactagaacagtatctttctcataatttcttaatcttcatcaatttatctcagtcttcaagaagacttcaatgagaatgtttcttttcaatgccacttaaatttttggcttcatatgagaacccttctttggctatacagagctatgcaacttcaggtttataaatattattatcatcgtcataatcatcattatcatttaaaactaacatcagcagaaccctatttttgttccatgtattgcaccctgagatctcagcataagttgtctcattcattccccatgagaattgtcattattattgccacacttccatctttcagacgaagaaattgaagatttgagaggataggcactgccaaagtcacacagctagtaagggtcagaaatggatttaaacccaattttatctttcaccacagtgtgcatctgtaagccccaacactggcagggaagctttgtgtaactgtccctagttttactcctctagcacaggtcttctgggtggcttatttcgctttcttcttcctggagaaagctctaatgcagtttttctcgcactctgctttcagtgttcctgagtgtgagtcggaaagagctgggttcaatttcatatccacaattcacaagtgctgtgaatttcagattttatatttgtaaacagttatcaaaatgtcagtatcacacagtcgttgtgggggattaggcgggtgaatgtatggccagtgtccagcattgtgcctgggacataacacgcgctaagatattggtatctttccgcacttaacagaagcatgaatgaatagcagtaacacaatcacaaacgtgaggagtgcaaaaggctaccatgacatttttcctttcaaaaaggataaaatagcttttaaatttactcctacagagaatggtgggaaaagaactagatggagatctagtttcaggcctgccatttagtagctatgtgaccttgggccaaatcttttcgtctatggctattaaatacccctcctgactacacgaaggagagtaagactaatcaacaaagcgcagtatgtcatagcatatgtgctagcataggtttagaagaggactatattcaaggaaattgtgattactgcgtctaattgttatttttatcattaaagctcccttcagctttgtagacaagaaatttaaatcaggtgtaacttgaaacttacatgtaataacccacaatatgtacaaactatctctttaagtccaaaatcatttcaaataaaataatgtgtcacttatatggcttttcaaaatatctttatttattattaaagtaatacatactcattgtagaaattttttaaaatacacaaagacaaaaaaattaaactcatgcatagtgctaacacccagcgatatccacttttaatgcttttagtatattttgttctggtcttttctcaatgtacgtatagattaacattaataacatattgctaccaagattgtatgtaaagttttaaattctgttttgtctcctcctaacattacattatattgttatgttaatatgttaatataacatattttaacatatatataattttaacatatacataatcataatataacataacatatgttaatataagggtatagaaaggtaaacttggtcctaagtttaatgatactcataggcatttttgaaataaaaacttatcatgttttaagggtatatatcttaaaacatgataccttacagacttcatgttgatttgtttagatcttggttacaaaatttcaaacttggcagaaagaaaatttgcttatagtttttatccccctgatactcctaaaacgaagtaaaacaaacattgtgtctccaaatagagccaaaaaaaagacgaactcatatatttacatctagaaatgaactctaagactataaatagaaggagctaggataatccaaaaacatgtatgtctatgctcttttaagcaaacttctttcccctctaattctcagaaacttccgttaaaattagtaatatctacaataaatgattttgaatggtgctaaaattttttttttattattattatactttaagttttagggtacatgtgcacaatgtgcaggttagttacatatgtatacatgtgccatgctggtgtgctgcacccattaactcgtcatttagcattaggtatatctcccaatgctatccctccccgctccccccaccccacaacaggccccagagtgtgatgttccccttcctgtgtccatgtgttctcattgttcaattcccatctatgagtgagaacatgcggtgtttggtttttttgtccttgcgatagtttactgagaatgatgatttccaatttcatccatgtccctacaaaggacatgaactcatcattttttatggctgtacagtattccatggtgtatatgtgccacattttcttaatccagtctatcattgttggacatttgggttggttccaagtctttgctattgtgaatagtcccgcaataaacatacgtgtgcatgtgtctttataacagcatgatttatagtcctttgggtatatacccagtaatgggatggctgggtctaatggtatttctagttctaggtccctgaggaattgccacactgacttccaccatggttgaactagtttacagtcccaccaacagtgtaaaagtgttcctatttctccacatcctctccagcacctgttgtttcctgactttttaatgattgccattctaactggtgtgagatggtatctcattgtggttttgatttgcatttctctgatggccagtgatgatgagcattttttcatgtgtcttttggctgcataaatgtcttcttttgagaagtgtctgttcatatcctttgcccactttttgatggggttgtttgtttttttcttgtaaatttgttggagttcattgtagattctggatattagccctttgtcagatgagtagcttgcgaaaattttctcccattttgtaggttgcctgttcactctgatggtagtttcttttgctgtgcagaagctctttagtttaattagatcccatttgtcaattttggcttttgttgccattgcttttggtgttttagacatgaagtccttgcccatggctatgtcctgaatggtaatgcctaggttttcttctagggtttttatggttttaggtctaacatataagtctttaatccatcttgaattaatttttgtataaggtgtaaggaagggatccagtttcagctttctacatatggctagccagttttcccagcaccatttattaaatagggaatcctttccccattgcttgtttttgtcaggtttgtcaaagatcagatagttgtagatatgcggcgttatttctgagggctctgttctgttccattgatctatatctctgttttggtaccagtaccatgctgttttggttactgtaggcttgtagtatagtttgaagtcaggtagtgtgatgcctccagctttgttcttttggcttaggattgacttggtgatgcgggctcttttttggttctatatgaactttaaagtagttttttccaattctgtgaagaaagtcattggtagcttgatggggatggcattgaatctataaattaccttgggcagtatggccattttcacgatattgattcttcctactcatgagcatggaatgttcttccatttgtttgtatcctcttttatttcagcaaggccggtggaccccgccccgcccctttgcgggtacgggggggcgccaggggcctcccacttattctacacctctcatgtctcttcaccatgccagactagagtcaagctcaacagggtcttctttccccgctgattccgccaagcccgttcccttggctgtggtttcgctggatagtaggtagggacagtgggaatctcgttcatccattcatgcgcgtcactaattagatgacgaggcatttggctaccttaagagagtcatagttactcccaccatttacctgtgcttcattgaatttcttcaatttgacattcagagcactgggcagaaatcacatcgcgtcaacacccgccgcgggcctttgtggaatggtgctaaaatatttaaacaatggagaaaaaactcttaagtagattaagctacccatgagacacaggcaaggagatgaatggtttgaatgatataattgaaggatttaggaatgacatggccagaaatgccagtcaactgggagggctggtcaactatctaaagacaccatgttgtcctacggtaaaatcaagtgtggtgaagaggaagctgagttgtgcatgtggcaaaggtctgaattaacagactgtatttatttaatttctatagtctgaatacgatggggcaataaagctatattcagagaagatactttagggaaatatttcggagctgggtggaactgagtgaatcatcctgtccaacagtctcggccaagagcagaaaactgagaaaactcttcctggtcatttggtagctcaagaatcacccctggagaagtttcagctcagtagctcaagtcacaaacccagataatataatagattttgctttaagttcaaaaagatgacaattgataaatgaaagatagtcatagacagtaagtaagtactaagtgattcatcagcacatagcactggttaaaaagtctttatacagacatcagacttaaccccatttaaaaaattatttgaagaaaaggcagagtgaggggcaataactcacattacacaatggatttatgtaaagcatcacttaaccaaagttttcatggtcaatgccagctctttcgggtccaaggtgattaggacacacctgtatgaagtacagtctggcagccacagagaggaagcaaaacacatttcttaattaaaactggaggaaaattgtgagtgctgggaatgtaattatgtgagttggaaatgggccaggattttgctagagctctcacgatctttcaaaatgaaaactcatcagatttttaagtctgaagtttctgttttattttacggtggtta

SEQ ID NO: 12012 - DNA, 6000 bp, Homo sapiens
agaccagcctgggcaacatggcgaaaccccgtctctactaaacatacacaaaattagctgggcatggtggcacacgcctgtaatccgagctactcaggaggctgaggcatgagaatcgcttgaacctgggaggcagaggttgcagtaggccgaggtcgtgccactgcactccagcctgggctacagagcaagactctgtcacaaaaaaacaaacaaaaaacccacgatggactctggggactcagggggaaagggtgggaaaggggcgagggataaaagactacaaattgggtgcagtgtataccgctcgggtgatgggtgcaccaatatctcacaaatcatcactgaagaacttattcatgtaaccaaacaccacctgttctccaataacctatggaaaaaaaaaaaaaaaagaaggctgggcgcggtggctcacccctgtaatcccagcactctgggaggccaaggcaggtggatcacctgaggtcaggagtttgagaccagcctggccagcatggtgaaaacccatctctactaaaattaaaaaaaaaaaaaaattagagcagctcagactggagctctttgtccctaaaacaaagccttaggaagagcctctcagtgcctcctccccacaacacacacataaataaataaaaaatgaaaaaattaaagcatgagcaaattatttcacattgagagtcattgactatatggctttttttttttttttttttttgagtcagagtttctctcttgtcacccaggctggagtgcaatggtgcaatgtcaactcactgcaacctccacctcctgagttcaagcgattctcctgcctcagcctcccaaatagctggaactacaggtgcccaccaccacgcccggctaattttttacatttttcgtagagatggggttttcaccatgctggccaggctggtctcaaactcctacctcaggtgatctgtctgctttggcctcccaaagtgctgggattacaggcatgagccaccgcacccagccatatggccttctccttgaatctggccttcatgccttgcatgtttaaagcagcttacccgtgttactcgggaggctgaggcaggaagatcacttgaggtcaagagtttgagaccagcctgggaaacatagcaagaccccatctaaaaaaaaaaaatgaatacataggggctgggcgtggtggctcacgtctgtaatcccagcattttgggaggtcaaggtgggcagatcacgaggtcaggagatccagaccatcttggctaacacggtgaaaccctgtctctactaaaaatacaaaaaattagccgggcgtggtggcgggcacctgtaggcccagctatttgggaggctgaggcaggagaatggcgtgaacccaggaggcagagcttgcagtgaaccaagattgtaccactgcactccagcctgggcgacagagcgagactcctcaaaaaaaaaaaaaaaaaaagaatacataaaactcagtttaccgtgaaatcatcttcaactcttcatttaagctgataggagaggcttttttcaaaggtcttcccctaaatgggctaacctggcctcagaatttaataaaacctcatggtctttgatatttctggactataacacatgtagtgtgtacactgacttttattagagttttaaaaataacatgtaaaaagttaagtcgaataaaaggttatgaactcctgatgtactttcattatcccctagagtcctctgagacatgctgaagggaagcaagctgatttgacctatccagcctgggtcctttacctgtgaggaggtgggcctagaaatctgcagagactgaattggaactcccacctgtcagagaactgaggtcccaatcaattctcactcagcctgggcttggctgaaccctggccctcctcagggcctgaggcccagacactggccaccctggctcagagtctggactgcaggctccacaccacagcacagagcccactctgggcaggtcagcatttcctgtgcctcagccccactggggaatgggtcctaaaaggtgaggcaggtcctgtgaagcccgagaccccaaaactctaggttctataattctgacaggggctattcttccttcccgagggaaactgattcctttccctctcgtcatattgagaggtgacagcgtgctggcagtcctcacagcgctctcggcgcctcctctgcctgggttcccactttggcggcacttgaggagcccttcagcccaccgctgcactttgggagcccctttctgggctggccaaggccggagccggctccctcagcttgtagggaggtgtggagggaaaggcacgaacgggaaccggggctgcgcgcggcgattgcgggccagctggagttccgggtgggcttgggcttggcgggccccgcactcggagcagccggccggccctgcaggccccgggcaatgaggggcttagcacccgggccagcagctgcggagggtgtactgggtcccccagcagtgccagcccaccggcgctgcgctcgatttctcaccgggccttagctgccttcccgcggggcagcgctcgggacctgaagcccgcccataccggagcctcccacccgctccgtgggctcctgtgcggccggagcctccccgacgagcgccgccccctgctccagggcgcccagtcccatcgaccacccaagggctgaggagtgcgggcgcacggcgcgggagcacggcgcgggactggcaggcagctccacctgcagccccggtgcgggatccactcggtgaagccagctgggctcctgagtctggtggggacgtggagaacctttatgtctagcccagggattgtaaatacaccaatgggcactctgtatctagctcaaggtttgtaaacacaccaatcagcaccgtgtgtctagctcagggtttgtgagtgcaccaatcgacactctgtgtctagctgctctggtggggccttggagaacctttgtgtcaacactctgcatctagttaatctgatggggacgtggagaacctttgtgtctagctcagggattgtaaacgcaccaatcagcgccctgtcaaaacagaccactgggctctaccaatcagcaggatgagggtggggccagataagagaataaaagcaggctgcccaaggtagcagtggcaactcgcttgggttcctttccacactgtggaagtttttttctttcactttttgcaataagttgctgctgttcgttctttgggtttcccactgcttttgtgagctgtaacactgacggcaaaggtgtgcagcttcactcctgaagtcagcgagaccacgaacccaacaggcggaactaaaaactccagacgcgccgccttaagagctgtagcactcaccgcgagggtctgcagcttcacccctaagccagcgagaccatcgaacccactagaaggaagaaagtccaaacacatccgaacatcagagcaaactccagacgtgccaccttaagagctgtaacactccctgcaagggtctacagcttcattcttgaagtcagtgagaccaatgaacctaccaattccggacacaatatgatgtcagtgataagcagagacactggtttttgtttcttagagagacactattttgctgtcacccagtctggactgcaggggcacgatcatagctcattgcagcctcgaactcctgggttcaagtgatcctcctcccacctcagtctcccgagcagcttggactacaggcacataccaccacacctggttattttgtatttttattttttgtcaagacaggatcttcatatgttgcccaggctggtcaacagccttggcctcctaaagtgctaggatttcaggcttgagccaccacactcagctgcagacttttttttttttttttttttttttgagacggtctcactctgttgcccgggctggagtgcactggcacgatcttggctcactgcaacctctgcctctcgggttcaagtgattctcccaccttagcctccacataccaccacgcttggctaatttttttgtatttttagtagagacgggttttcaccatgttggccaggctggtctcaaactcctggcctcaagtgatcaaaccgccttggcctcccaaagtgctgggattacaggtgtgagccaccgcccacagcccataaacattttctgatagccctgtcaaaaaagtaaaaagcaacacgtgaagttaattttaacaatatacgttatttaacccaacacacctaatagtcatttcaatatgtaatcaatataagccatggttgttgcagtttcacactttcctttcttactgtatcttccaaatcggggtgtgcttggcacggcacatcttggttgggaccagcacatttcaggagctcatcagcccatgtgcctggggctgactgagacttcaattcaggaggaattgtaatttctcttcgaaaacacctcccttagctcccgccttaatcccagctactcaggaggccctggcgggagggtcgcttgaggccaggagctggagatcatcctaggcagcacagtgagacctcccctcccagtaaaaaaacaaaaaaaaaaaacaattggccaggcgtggtggcgcgcgcctgtggacccagctactctggaggccggggttggaggatcgcatgagtccaggagttggaggctgcaatgagcagagatcgcgccactacactccagcctgggcgaccaagcgagaccctgtctcggaagaaaggaaagaaaaaaaaaaaaaaaaaaaacacctcccagccaactctcagggcccaccgctggcggttcccagcccgactgggcgcccccagccggggttagccagcgccacgcagccgggccgggaaggggcggagcggccgggccccgcccccctcgtcgcgccggggccgccggggccacggggctgcctcctccgcctagagcgctgccgccgccgctttcgcccgggagccgggggccgggcgccatcatgctgagccggctcggggcgctgctgcaggaagccgtgggggcggtgaggccggcagggccgggccgggccgccgggagtcgcgggcctaggccgggctgggcgggcgcggagccgggcgcggcccgcaggagggcgggcgggcgcgggccccctcgggcagggacccccgggccgcggcgccccttcctctgcctccccggccgcgccccgcttcccctcgctcttcccagtcccgctcccagactcctcccgaccgccccacctccccggcctgctcccgcgtcgcttcctgtctgtgcgtcctggccccggagtctctcccaattcccgaactcgcctccgccgggacgctccctgtcaccgcttggggtgtttcctgccccccggggccctaggccgcctccccccagtcccggtgggcctgcctccttcctccgctccaccccaccgcctcgcctgggcttgaaaaaatcgccgtcccttcccctcggtctgatctcccagacaactccaggaccttgttggggtgcaggacgcccttcccgtcaccccgggacgtgggaagtgcaggccctgccggtccaagtccccacgaagggtaaagacccggggcaggctggtgggcccccagccggggaaatcgccttctattgggtgcagatgtttccagcgtggctgtgacccctcacaagccaaattgagttagggacatgccgcccgtggtggggcctgggtggccctgtgcggggaggagagtccattgatgtttcacgtgccgtcagtttgtgtttttgccattttttgttggggctgcaggctggcaggcagcctactactagggttcgttcagcaagatgtagcgctgtgtaggaagggtgggggtattcccggtagggtggggggggtgcccgctgttgaaagtaactctgccaagaagctgtctgtaaagtcagca

SEQ ID NO: 12013 - DNA, 6000 bp, Homo sapiens
ttaaaaaaaaaaaaaaaatgataattgatcactggattttacaacacaaaggaaactggcaaaccctggtaagagctgtttttgtatagtaggaaacaaaacactttggacaggagaggacagaagcagctcccctttacccttgaagttcaagaatgaatgggagaaaatgaattggaaacagcaaatataaaaactcacaaaggaggaaagaaacaggtgggtatctagaagggaacacaggtgagttgttccttgctgctgctgctgcagctgttgctttaagacagaggccaggcatggtaactcacacctgtaatctcagcactttgggagactgaggcaagaggatcgcttgaaaccagaagttcaagaccagccaggcaatatagtaaaaactcatctctaaaaaaaaaatttaggccaggtgcggtggctcacacctgtaatcccaacactttgggaggccaagtaggggcagatcacttgaggccaggagttcaagaccagcctgggcaacacagtgaaaccccatctctactaaaaatgcaaaaattagccaggtgtggtgatgcattcctgtaatctcagctactcgggaggctgatgcacaagaatggcttgaacccaggaggtggagagtgcagtgagccgagatcatgccactgcactccagcctggacaacagagtgagactctgctcaaaaagaaaaaaaaattaaaaattagccgggcatggtgacatgtaccaatgatcccagccacttgggaggctgaagggggaggatcacttgagcctgggaggtagaagctgcagtgagtaatgatcaagccactgcactccagcctcagtgaaagagcaagagactctgtctttaaaaaaaaaaaaaaaaaaaaaaagggccaggcacagtggttcatgcctgtaatcccagcactttgggaggccaaggcgggtggatcacttcaggtcaggagtttgagaccagcctggccaacatggtaatgccgtctctactaaaaacacaaaaattagccaggcatcatggtgcatacctgtagtctcagctacttgggaggctgaggcactagaattgcttgaacccgggaggcagaggttatataagccgagattctgacagtgcactccagcctcagggacagaatgagaatcccatctcaaaaaaaaaaaaaaaaaaagataggagaaaatacacccatgttcaatgtcaacgataattcatcaatgggagtgagaaacagatgatgtaggagaggagataattgttagagctctgtccttgactaggccaaaggggacaggatacaatgtacaagtggatggccctgagaagtttgtgccagatactattctaaatatatcagtaaataaaatagttatctaagaaaacatacgaaaaacacttactttctggcacatagtaggcacctaacaaatgctggctaaatatacaactgaactgtgttcgtctaaaactttttttttttgagacagagtctcactctgtcacccaggctggactgcagtggctcgatttcagctcactgcaacctccacctcccaggctcaagcagttctcatacctcagcctcccgtgtagctgggactacaggcaagcaccactgcacccagctaatttttgtatttttagtagagatggggttttgccatgttggccaggcttgtctggaactcctggcctcaagtgatccgcccgcctccaccttccaaagtgctcggattgcaggcgtgagccaccctgcttggcctcatctaaatctttaacagaaatctggatcaaaacagtatcctaaaacctgctactagagaactatcagaggaatttgaataaaatgcctttcagtagataaaatgtagcacttacttttgataatatgacaaagtgtctttaaatctcaatgcaaccccttaattgtgcagataacaaaaaaagtaaacacagaaagccaagtttgcttgcttaaaattactaaattaattcagtaaaagccaagaactaaaattaaaatctagtcatcttacctcctggtctggcttccaacacactttctttgatatatctctctttttctctcttgacagaaagaaaatattaagattgcaatttctgtcttccctatacttctgcctggcccttccccttccccctgaatttacctgggggtgtaactgacttcttatcactttattttaatccaagaaaaatgacatgggccagggtggctcacgcctgtgattccaacagttttcgaggccaaggtggaaggactgcttgagttcaggagtttgagaccagcctgggggcaacatactgagaccttgtctctaccaaaaaaaggttcgccaggcatggtggcacgttcctgtaagttgcagctacttggaaggccaaggcaggaggactgcttgagcccgtggagtgaagactgcagtaagctataatgatcacaccactatactccagcctgggcaactgagcaagaccctgtctcgggggcaggggggaactctatgtactagaagatgttttgggggaaatacaatattttagttctcaaaattccaggttattttctacagccccctgctcctaaaaatctaaaataaacacagtctaatgcatcacatataaagtatcttaatttccctatctggaaatcacgtaacttttgtaaaaacaagtagacaaggccacgcgcggtggctcatgcctgtaatcccagcactttgcgaagcagcggcaggaggatcacctgaggtcgggagttcgagaccagcctgaccaatgtggagaaaccctgtttctacaaaaaatacaaaattatccaggtgtggtggcgcatgcctgtaaacccagctactcaggaggctgaggcagaaaatcgcttgaacccaggaggcggaagttgcggtgagccaagatcgcaccattgcactccagcctaggcaacaaaaatgaatctccgtctccaaaaaaaaaaaaaagttgacaagctcaaatatcaccatattgacattgatggtgaggatatggaccttacagatgtttaaaatcagagtatttcaaaaactaataaatcagaacagagaactttttggctttcaataaaaccttaagaaagtgtatctattttaggctgggctcagtggctcatgcctataatcctaacactttgggaggctgaggcaggcaaatcacttgaacccaagaattcaagaccagtctgggcaatatggcaaaaccttgtctctacaaaacacacacacacacacacacacacaaaattaggcaggcatggtggcatgcctgtagccccagctactcggggggctgaggtaggaggattgcttgagcctgggaggtagaggttgctgtgagccgcgatcgcgccactacactacagcctgggtgacagagcaagatcctgtctcaaaaaaaataaataaataaataaataaagtatatctattttgaacacccattaccagtacttttccattttacttttagtatataagtcacattgagaacattctgaaaatgccaattaaaagatatagtcactgaaaaacaagttttcctgtttcctttctgcatatttaataatggtttaacagagatacagcactgttttactgaataggacttctacttcaaaccatgaataaagctgcaatttagtatttgtcaagatagctggtaaatctaatccttttagctttaatactttttttatttcaagctttaaactcgaggttctgatacaaattacccttcaagacttttctttaatcctagaatgcccaacttctagctaaaatcttccactctgtttcataattactgttctacccttattatcgtaacccagctactcatcccaataatgctgcacatctatactggtatatctgtaaccgtgcagcactcttaccttcttgaaccaacaaaatcagcctatctccgacctcaaagtagggcagcagtaaggaggtgggaataaacatttgaaaatgaatatttccactaactagtaaatgtggccaaaatactattgaaaataccattcaaaatgcatgaattttagctcagtttttatatagttctgaagaagtaccaatactattttggcatttcgtagcaccaaccacgtccgaagcgctccaactttcaagtctgagcttgtctctgaagaagttgcccgtgcagcctccatgaataccacacaccaaatactaactgctttttaacagatccagcaacgctgctgtttccattttctccatcctatttatgcccacatgaacttttttcttattagataattagtaacttgaaggcagagacctgttttacaggctgcaaaccccagggaccgagacagcacttaacgcctacaaggtccaaaccgacgccaacgattaagcgcacaaaggaaaggtgtaatatacatcatttcgtttagtcctccctgcagcctcatgtagtagttactattaatcaaccccatttcacaggtgatcaaaggtaagctcagaaaggtgaagttgcctgcccaggtcacaaggtaggaccaggattccaagcctgatcggtctggatacgaacgctctacccacgcggctttccccctacactctcgggatcaccacacacttccccttggcttttacaccggaggctcgacctgggtcccggaaccagcgaagccactgggcaagcctagaggcctctacagaggctagagacgcctcgccccaccagatgcattaggatgaaacgcgccgaaccgaaggtttagagcgccaggggagaagaggggcggggagagcaggctctttgacccagaggagggaggatctccacacccggccactctggcgctggggcgcaacactgaggccggcgggaagccgagcctgcccgcgaagagactggggattccgaggcggctcctgggagaccggacgcgcgcggcctccgccgctcccagtcccgccagacccgatgccgggctggagaagcgcgggggccgacgcacctcggataggcgggggcaggggcaggggcagctctcctttaccctagagcggcgacagaagctcttcgggggatcagtggccaagggggcggacagatttgcacggcggattcctccgaagcaacccgtgtgaaagaagccaagcggcggctgcagcccgggccgcgatgggggtgacaccgcccgtggtcccgccccttcccgtggcccctcggagccacttccggcggcagcgtccgggctagttcccggcgcgagcggccgcgggccagtttctatctcctcatccagggcttgcgggcgaggcctgttttaagtctccagtaaccgagcggaggcccggcaggcgcgacccgggctgcgtacgtcagagctgcctccgaagtggtaaaatgtgctgcgagaagtggagccgcgtggcggaaatgtttctcttcattgaggagcgggaggattgtaagatactgtgcctttgctccagggcatttgtggagtaagtagaaaagagaatctcttcatgttctagcacagtcattacccagaaatgtaggtattgcaaacgtggttgtaattgatccctgaaagcagccagaacatctgacccttgggcacggtgatgtttaagaaaaacaaaaccctcagacatgacggagtggtcgcccactgccattatttttatgtgaaggactacatctacttggtaggctgctatgaaaaaatgtcgtaggtgctatatgtcatctcatatttgtaaatcgaggggacatttaaaaattgggggaaagcgacatgtaaaatgaaatctctagtagatatgatgtcataaagtgaaagtttaaagttgagtgacttgctttggttaacgtctttttttaaacctaaaaatctacttaagcccaaatgcacataattaaa

SEQ ID NO: 12014 - DNA, 6000 bp, Homo sapiens
aaatcatgtacctcaccgggttttttgaggtttatataagacaacaagtttaaaggcaggcagcagaatgacaggctcttgagaaaggttttcctgcatagtttataaactttctgatgcttcccctggattctgtgtgtctcattcttctgtatagatccctttttctaagaactttccattttcctctcaataataaactcacaataccatttctctcttgaggtaaaaagcaaaaccaaccataaaaacactacctgttcttttcataggtataaaccaatgctgaactataatctccctaacataaaattaaaattgttatatcgataaaatacagtaaatttttttggtctaaatcaggggtccccaactccgggtaccaatccatggcctgttaggaattgggtcacacagcagcaggtgacctaggtgggcggagtacgagcgaagcttcatctgtacttacagctgctccccattgcttgcattactgcctgaactctgcctcctgtccgatcagtggtggcattgggttcttacagaatctcgaaccctattgtgaactgcacatgcaagggatctaggctgcacactccttatgagaatttattgcctgatgatctgaggtgaaacagtttcatcctgaaatcatccatacctcctccacccccgttcatggaaaaattgtcttccatgaaatcagtccctggtgccaaaaaggttagggaccactggcttaaatgacctcatgatcattttaaaaacatttgccactaatgaattagtatgtagatctaagtacctatcaaataacttacaatggcctatcacagcactaaaaaaatgccaatggacacaagctgaagataaaaagtttggtgtacagaaaggagccaagacaggacactaattttaaattcattttcaaagaaagacaatataatgactttaaaaaaattatcatctagcactatcacccttacacaacctgtttcatttgctggatgttagttttacccctcctttcctctgtgacaagtttgtctctcttaataaaattaatctcccccctacctgtgctctatattggtgtttttaaaattgcagatgaatcaagaaaccaattgaacagattgccagtatcttttctttaaaaccagactggaattgaaaacaaatataaatgacattacaagtagttaaggataagtaatgtttcatgaaacttgtgtttcagtaatgtttgtgtgtggatagcaaaggtaaaatttatttcctactaagcgttctggtcaaaaatgcttgttctagatcctgcttcttcagataacccaccttagttagatacgttactctttatcctcctgcctccatttcccaatttcttccttgatttcagttctttcccattagtatttaaatagacttaagtctctcctaagtatttcctctttgatctcagtgcccccttatcaggtaagtgtctgcaatgagaaaaccagcccctccctggcccccgagacaatctcagcagggactctctcacccctgctgcaatctggtttgagctttaccaattactgcaagcgctctaattaagaaccttcaaaggcactttggagttctctctttcttaggaaccccttaatacacctgatattgtgtaaatccctctcttctggctcatttaacaccacattttcttgaatgtcctcttgcttctttgccaataaatttccttggcccccttttctctgcccatccttaaatgctgatttataggcacaatttccaccaaataggggtggtgtctcaaccattaagtggcttcaactgccatccctgtgcttctagtcctggtctcttattcctaacatcctgccctactaagggttgtggttctactgccagtttccattttcacatggcataaaagataatgtcaatctggcagcttaactttctggaatcattctttatttccatctctagcattttaatttaccctttagctataccaaactacccactcatggtttcaaactaacagcatatgttacggaaacagactttctgagcttgaatcccagttctagcaattactttgcaaccctgagtaagtcacttgattgctctgtgcctgagtttttctgtaagataggaaaaaataatagaacctaactctaaaaattataaaggattaaatcagttagtacatataaagctcttagaattatgcctgacatattgcaagcactctgtaagtactagtttatttatgctactgggtcttgcgataccacatacttacacaactttactcggcactactgttactgaattttacgttttggttccttaatattttggatgtagtcatagtctctacattcttcacaaaagctcacacacaactttaacttgcagattaggcttttgggtatttgagaaaattactatttttacatctcattctttgttggggctctctcatcattcttgagggtttaaaattacagagtaaagttagaaggggcctgaataatcatccaatccaatctttccacctaatacaagaatatcttctaacttctgtcatccaactactatctgaaccacttctgatcatcatcaatttcatttctgagcactgccacattgccaaaccaaaatctgcttccttgtaatttccactcaacctgtgtctgaccttaggatcaacccacaataaggcagccccctttcccacatgtaagttctctaaatatcttgaggtttttttctctcccgagctaaactagttcctccagtcatttttcatatgaagtaatttctaatctttctaccactctggacacctctgagttccaatttatacttgaactcacagaaaaattccaggtttggtttaatagcacatgcattcagaattaacccccacaccctgtcatcattagattttaactttattaaatgagtttaattacatggaagcataaaaattatagtatgttactcagcactgatgttgataatcaataaatttttatttcgttattcatcttcttaagttttcctcctatcaccatttcacagctacactgtgagctttattattacaaagtcctgcttccactcctggatctttaatttaggcctccaatccaaactcaatccttttatctgtcacctcagccccactagtctcctaatactcttcccaattcatcaagactattaatcttctcaggtaccaagaattccctttcctcaggaatgatatgcttcaaagcactgtctaaactcatcaggccaaccacactattcttcaatgatcacctcgactatcacctcttctgctcctagataaaatgctactgaagacagacagcaagtcatacaggcctgcacctgcaggcaagtctaaaattcttccaatgttcaaaccattgtataacaggtacttatagaggtaatacggtgaggggttaagtgccagagggttccagagttagattacctgggtttaaatcccagatccatctttacaaacttgtgacttgggcaagttagtcaacttctgttatcctcatctgtatagcagatatcataaactcacaggattgttcctgtgaatagatttacaggataataaatgagataatgcatctaaagcatagttcactgccttgctcctagtaaatactcgataaagattacttgtcaataacataattatttgtgcatgcatcataaaacttcatgacattatatgtctttgtggtgttttttctagagataatactccataattttcgatgattttccttcatagaacgggttcttgcttcctctccagctgtcaaaatattagcccttctatgggaaaccccaagccccaatcttccactgaaccttaaagatacacatggccatcagtaatgtagaattttcttaacggtttacctgtatttatattttgtttttgtatttcttgattttatgttgtctagaattaccttttatatgactaagtctaacgcctacaattaaattctaagttccctgaaggcaagaactttattagatacttctgtagcccatacagcagtctacaaatattaagagaatataaatcaagtgaactgaattgcctaatgctaaaataaacaacttctgtagatttaattctcaaggctgaacttaacttgtaataactttatttggaaactattttctgcaatttcagttatcaaagatcatctttgaaactctttccagactttagtgttgagtttaacttctaaaatgctttgttaatttcaacatactcaattcatctaatacacttaaaatagtatttcgattctagctattttttcacagaaacttgtaccattctacaaatgccaaaaaacaaacattcaagagaattctattctaaatctactcccaaccattcgctgaagattacgccctatcccaatactagtcgagctgccaaaccacgtgggtatgctaagatttcaaagttcctccaagagtgaatgatttgcacgtgtgaggactaaaccttaaaatgtgacaatcccttctttattttacaaatcaggctttgaatcccatcttctctgccaatgaggatgttttttctcagacttctctacatacatgccccctctcttagtcttgaggagcggggaagatcgcaggccgacccctccaccaagcaccatttcctcaaatctagttcaggttagccaacgcggacagcaacgctcccttcaacgctcctcctccccctagaacggaaaagacggaggagatccagttcgggctgacagtgagaggatgcagcccggtgtctgggcgggctcttaccggcgaagcggatcttcacgaggtcgagcggatgcagcgcaaggttggataagacgccgccgctcacgcccgctatcaggttctcataccggacgtggcggaataccgtgctccacgccgacgacccggacgccgactggccctggcccgtcataggctcggggcccgtcgacaccacggcgcccagggccgcggaggtgggacgcgatgcagtggccgccaccgtggcgacggtcgccccttgtgagcgcaaccccacctccgggaccaacgagaggactcttatgcccaaggcgcgtgagcgaagccggagactctagtactgagggggcaagaacggggcacagacactacgtcacgccggcggaaagcgcgatggaggggaggtcccagcctctcccgagtctccgccctgcctcgcccacaaatgctccagcccacggacgcggaagcgactgcacagctaaagaaccgccccttgctaacgtttgccggcaaaactacggagcggcgcaggatccagttgagccagcaggccgccgctccgcgagtcacgtgactggaagtagtctgggaaaagcggaagtcgcctgtgggaggaggtggcggtgggcggaactcctagcggacacctcgtggagtccggccggaagagcaaccgagatgaaggtgaagatgctgagccggaatccggacaattatgtccgcgaaaccaagttggacttacagagaggtaagataagttggtagggagaaagggacggtttccgcaagtcgttgggtctagcctcggctttcgcggagtaaagccgggggaggctggcactctggtctggttctttctcagttacctttcgctaaggcaaactttgtgcttacggagtcgctgcggaactggatggatagcaagtaaagtctgttcaagtcctttttctaagaatttcctctagtggtgagtgggaaacagttgtctatagtggagaaaaattccagctgctgctctgggattgtcttcaggttcctattactgaaaagtggacttgaatgagccaaactcgtgggttgaagggctgagagttaaacaggcttttaaaaccttcctactgctcttcttgc

SEQ ID NO: 12015 - DNA, 6000 bp, Homo sapiens
tgggcagggggagtgactggccctgtcaaatgccactctgactgtgggtggagatggggaagccagtgcagaagcaggctgctgtagtggcccaggcatggtctggaggctccgctcagtagggaagcaggctggtgcagtggcccaggcatagtctgggggctctgctctgcgaacttggggcatggctgggggaagggagtcctcagagccagcccccaggagacactggaaactgcctttgtaaaagttttaacagtgagaaaatggtgatggtgaaggagatctgatctaacccacagccagttaatctccaaactgcccttagtcatttctgggcataacagcccttttccaaaactcagccatctttgtaaagctaacgaaaggccaccactgcatgaggaagatgaggggatctgcgctctgctgaggttagactgaaatgattcccagccgttattcattaggaagatgggggatctgagctctgctgaggttagactgaaacgattcccagccgttattcattaggaagatgaggggagtctgagctctgctgaggttagactgaaacgattcccagccgttattcattaggaagatgggggatctgagctctgctgaggttagactgaaacgattcccagccgttattcattaggaagatgggggatctgagctctgcagaggttagactgaaacgattcccagccgttattcattaggaagatgggggatctgagctctgctgaggttagactgaaacgattcccagccgttattcattaggaagatgaggggatctgagctctgctgaggttagactgaaacgattcccagccgttattcattaggaagatgggtgatctgcgctctgctgaggttagactgaaacgattcccagccgttattcattaggaagatgaggggatctgagctctgctgaggttagactgaaacgactcccagccgttattccagggaccacaagatttgcaactcccccaattactcctgcaagtaacatcactattgtgatcctaagattggccttgtgagatgtcgtttcaggtttttgcacgtctaatgactgatggatggctctagcgaggcccaccaaccccgcagccggtcctgtggccccacctggacgcaaactcagtgcacaggaggaccattttccacatccccagccaaccagcagcacccattccctggcccaccagactctccttgaaaaaccctagcgtccgaattttctgagaggctgatttgagtgatgataaaactctggtctcccgttcagctggctctgcatgaattaaactctttctctatggcaattcccctgtcttgctaaatcagctctatcttgccaggggtcaaaatgaacccactgggtgattacacgctagtgtattttcttcctctctttctgacccctcccagtgtcagaatggacttggtcctcgagaagaggcccaaggttccgtgagtaatggtaggagcacctggaggagccccatgcatcttgggatgaggccccagtttcatgccaatccccactgcccaccagcactgtccaagtcctgggagaccacgtgatcccatgtccctgaggtggcagttaaaaataggagttaaaaataaattatttaggcagatagtgagggtaaggaagtcctcagtaaggttttccttttaatgaaaagcaggctccaaatcattttcttttctaacaaagagcagcctgtaaaatcgagccgcaaacataagacaagcaagctggaagcttgcacgcgtgaatgccagcagttgtgccaatgggaaaaagctacctgagactaggcatgatcaaaatggcagctccatcttcccttctctttgccagccatgtgtacagcaaggagcagacaagatggtgctggccaagtagaagcccatttgcataataagattagggtggggcgaccagccttccccacgccatatgtaaacatcacccttggtcataccaatctgtgggccctttgtaaatcagacactgcctcctcaagcctgcctataaaatctgctggggtctgctgcaggctggcttttctcttttggacgcctctttcgaaagagagggctgctctcttctctcctttcttctgtctattaaactttctgctccttaacccatctacatgagtccatgtccttaatcttcttggtgtgagacaatgaaccccaggtatttaccccaatgatgctgcttcagcagcagagtcgcaccagggatggagccagccttccgggggagggaggactttgttgtcccaggagaccctgccatgggagccccagtccagggaccttgggttccagtcctgccatgtgcctggtatgctccgtgactcagcctcctctgtgaaacacatctgactctagcatggccaaattcctgccccacagaatcatctgcaataaaaacagttggtttcaagctgctaagttttgggcggtttttgatgcagcagttgatagctgtatgggggtaagggcagaaacagagactggggaggaggcaagaccacagaggtgtggattggggagggcagttggagggagtgagaagaggccaaacactggctggattttgagggtagaggatctggatatgagggatggagactgttgaggctgagcctgagtgaatagcaaggtgagctgccgttcatgaaggtgggggcaatgcagatggagcaaggctgggctggaggatcaaagctaagcagagacattggctagcacataggagtctggatttctggggaggggccctggcaggagacatgaatttggtcgttgccagtgttggatggtatttaacggcatgacactggaggagatcacccagggagtggggactggttgaacaaaaagagccaaagaatggcctggtcagtaaggaaccagcaagggagggtgaggaagagaagaaccagagggtgggagggtgctgggagcccaggtaacaacggacctaaggatgagtgagctggcacatgggctcgtgcctggaatcccagcattttgggatcgcttgagtccacgagctcgagaccagcctaggcaacacagctagacctcgtttccacaaaaaattaaaaagataggtgagacagtgcatgcttgtagtcccagctactctgggggttgaggcaggaggatcccttgagcccaggaggttgaagctgcggtgaggagaatgtaccactgcactccagcctgggcaacagagtgagaccctacctcaaaaaaggaaaaaggaggagtgagctacccaaatctgtatttgtttattattgctgtcctaacaaattaccataaacgtggtgatccaaaacaatacaaatttatatcttacagctctgggttcagaagtctaatggcacaatgagtgtcatgggctaagatcaaggggtcagcaggctgcattccttctgctggctccaggagaggccctgtttccttgtctctcccagccactagaagccgctcatagtccttggcttgtggccccttcctccatcttcaaagcacatcactccaacccctgtgtctgttgtcacatttccttttctctcctctttcatcccattgtcctctcacttggcttcctaactcccacaagaacccctgatatggcacctgccctcctatctgaacccgtgggctctgcatccagatggaaccaaccgaggatacaaacaattcggaaaaaaacctgtgtctgtactgaacatgtacaaatttttctcttgtcactattccctaaacaatactgtataacaactatctacatagcgcttacattgtattaggtattataagtaatctagaagtgacttaacgtatacgggaagatgtgtgtaggttatatgcaaatacgaagccattttatgtaagggatttgagcatcaaggattttagcatccttgagaagtgctggaaccaatcctctatggatacccagggacgactgcacattgggctcaccctgataaacataagaatctctccacctaaagaatcttaacttcattgcatttgcagtcccttttgccatgtaagtaatgtattcacaagacctggaagttaggatgtggacatccttggagggccattattctgcccaccacagtccaccctccagtttccaaaatttgcataggtcccatgggcaaaatccacgcacccatctcaaggtcctccacagcctcaactcattacagcaccaactcaggtccatactcacttaagtcgcacccagttcaaaagtttcaaatcccatcgtctgaatcatctaaattgggtatggattggaccccagctaagtaagggggtcaagcaggcgggctgagcactggtcctggtgaccggaaggcagcactgccctccccgcatcagaaactgcaccgggaagaccgtcctgggctgatcggcacgaaaccctgggcgcctgtggctgccccagaactgcaggagccccaacgccttcagcgcagggttcactgtcatgaaaggaatgtgacgccctgcgcccattctacagatggagagagcagggcggagcccggggcccaggccgcgcgccccgccttcgccccgtttcccctctcccctccctgcccgcgccttctcccctcccacgcctccccccaccctgggacccccccactcctctcctccaggcctcctctcctcccacgccctccgcggccacccagctctttgaaagcctgcgtctggctcccagacaccaccgagtgctgagtcctccagcctgtctagagcgtcccggaagtagctgggggaaggcgacgaggcgcggactggaggagaaccgagtggccggcacttccggccggcggcggctgctccgggtgagcagggtgagtagggtcctggcctgaggcgctgggcggccgggccgggccggatgggtgcgggcgctctccggtccctggtgggcgcgggcggcgcgggcgggagccgcagtctgggcaggcgggcgcgcggggcggggcggggttggtcgcgaggctgcggggccggacccagccgcgggcggcagcgccccctcccgggagccgcgctcggaacccgaagccctgtgcttcccgcgcgacccccgcggcctgagcgcgcggcccccgagccgcacccaccccttgccgccaggcctggccttgacgccccagcccggacccttcctgcgcttccactctcagagaggcttggtcacgaggtccgcttgcccttaaaaaaccagaccgagacttttttttctccatttctgtttttgttcttgttcttgtcccagactgaatttctacccacaaacggggaccctggggtacggacgctttttaagcgagcctcgccagtagcccagcgctgtctctgcgccaggatcccccagcgtggagggctcctagcggaactcggcgccggctctcgggcgctctctgcggggcgcacggccccaggctttctgtcccctccttctctgtcccatactctccttctgacccccagctcacctcttcccccagctccagaatgcgacttgttttttgagtatttctccttcatatcctccataccccccaacacacacacgcacacacacacacacacacacacacacacacacacactatgcccctgcgaaggttgtttcccgctttccccccgcgtttctcagggcctcttagcctcacacaggacggagtcagccccagcgctggcccctcaggcctcccgtttcttgtctgtgccttgggcacaggagaattgcacgtttcatcccgtgttcacgtggccttggggatcagtgcttcctctccagtcgcaaggcaagaaaccaccctaatttcggggagacagggaatcccacagtagcttgtgaggggctgactggggactgggatgccgggaaaagcgtcc

SEQ ID NO: 12016 - DNA, 6000 bp, Homo sapiens
gaagagacctcctgaccccaacagcattctctattgctcaatacaacctgaaaaagtgaatcaagattctacaaaaaggttgggcacagtggttcacacctgtaatcacagcactttaggaggccaaggtgggtggatcacctgaggtcaggagttcgagaccagcctggccaacatggtgaaaccccgtcttctactaaaaatagaaaaattagctgggcgtagtggcaagcacctgtaatcacaactattcgggaggctgaggcagaagaattgcttgaatccgggaggcaggggctgcagtgaggcaagatcgcgctgctgcactccggcctgggcaacagagccggagtctgtttaaaaaaaaaaaaaagattctacaaaaaggccaggcacaatggctcactgacgtacccagcactttgggaggctgaggcaggaggagggttgtttgagcccaggagttcaagaccagcctgggcagtatagtgagacctcatctttacacaaaatttaaaaattagctgagcacagtggtgcgtgcctgtagtcccagctactctggaggctgaggtgggaggattgcttgaggcagaggctgcagtgagatcacactactgtactctaacccgggcgacagagtgagaccctgtctcaaaaaaaaaaaaaaaaaaaaagattccacaaaaagataaagcaaatggacagaagtgtataggaaacctttagtaatacccacattaaggtaaattactaccactagggcttcaaatctggtaagtgtttaaaaaaagaaatgcagtaagatatccagtgtcattcaatattattttatttggcataagttttttgatactaaattagtaacaagcaatcattgtcctatgtcctggtgaatcactgttctagaattcagtatctataaaaaatcataatcctcagctttgagattcaaacttcagtttctctccaccatctttagtcatttcaatatataatgtccccttaaccattccattatcaatgtcctctatatagaaaatccagcattccttctgcagtttagagacactgcaatctcttacgctactttgaaatttttaaaagagcatctcttacagctgcaaaagtagtgcttagatgtcccttcgaagtataaagtaaagctccccagagaaaccacaccgcctctggagccagactgcctacttatgatttccggtacgatcttgagcaacaaacttaattactttgctgtgtctccatttcttcctctgaaaaatgaggaaataattgtacctacttcaaaggattgttgtgaggttcacattttaagcacgacataagtattaactcttatttagctccaaattctagtactgtttcacatgtgtacactaggtttgcctaactaaaatataacctaccattttgagtatctttgatgtttccccacggtatgtaacattcatttaataggtaaatataaacctactctgtatatatacatgtatattatatatattatatattacatatattacattatatattataggtattatataatattatatattatactggataccaaggcaattctcaaaaataggatatcctgtagccttgaagagcttatattttgggtgaggaaacaaaatacatgaaacactcatgtatcaatataaagctataaaagattcactgtcacagagtgtggtatacacagttaatgttcaaagaatcattgtgggctgcagattgcagagaaagtcaggctggagtggccctgcacctaaaagcaggtgggatcttcactagtggaaagtggagagaggattccccagggaaagtgctcattctacaaaggtttacatagcactctcagtttgccaggttctgttctaggccccagaaaaaagacaatgagtgaaacagaagaagtccctgcattcagggagcttaaagggcactccatctgagagccaaattttgaaggaatgagaaacgcttgtcttcctgtcataggaaacacatcatttaaatgccttatgaacaggagccaatgctgttattacactcactatggctttccaacagtgaaaaacatacagaaattccaaaattttttcatgtactgtaatatactgcattctaaatcagttccatctttaaaaagcacataggccagacacggtggctcacacctgtaatcccagcactttgggaggctgaggagggcagataacgaggtcaggagatcgagaccatcctggctaacacagtgaaaccccatctccagtcacaaattcactccaaaggaaaacatgtatacatcttttttattctaagatccttccattaatgacaactctcaactcctcccctccccaaagagaaaatgcctttaagtaaagaaaccctcttgtaaatactgactagcaaagcattcttaatcttttcctcttcccaaagatggaccaccagaatcttctgatagctaagttccagcatgcttttttaatcacaaagaagacacacatccaactctccagtcctttcaactcgcaagaaaatgtgaactgttaagttaaaccctacgctcatctcggaatcactgttaattgtaactgttatgcctacacaaatcattaaattctatcttcaaaataaaattaaggaagccaaaactgttcaattaaatccaatcaaaaaacttactattaatgcacaaagtactggactcaatactaagcatatgttcaagacatttaaaggcaaactaaaaacttagacacacaaatctttcacaactagctacaatgtaaataacatccttaacatttaaatgcccagtaaaactgtgctagactcatcaacaaagtaatagccagtccactgttttttatttttttagtttggtattggaaaattagccttgtttcattatgtttgtttacccttaattaggaatgtcacttagaaattaaatatggaaagagggggccatttaagaaaggaccattagggctttctcaatatttacctttttccaatgtcctagcatagcctgttcactgggtgacaatgttatataatagaaactctgataaataagagacacggggctttggaaactattcagcacctaaataaagggactaattgtacttctatgaatttttaaagccatcttccaacttgaaaaacacattaatttactctatgggtaacattttatattgccaacactcttattttacaaaggcataaacaagcatttaatgcacacgtttgcccggcgcggtggctcacgcctgtaatcccagcactttgggaggccgaggcgggcggaacacctgaggtctggagttcgagaccagcctagccaacatggtgaaactccgtctctactaaaaatacaaaacttagctgggcgtggtggcgggcgcctgtaatcccagctacctgggaggctaaggaaggagaatcgcttgaacccgggaggcggaggttgcagtgagccaagacagtgccattgcactccagcctgaacgagagcaaaaccccgtctcaaaaaaaacaaaacaataacaataatgtacacgtttcacatttggacacactgaaatcaaactcacgtattcaaatttttttagattaagttacataaagcatgcacaccatttggcacaggcccggcaaacaatcagtactcaacatcacctgttattttcctgattttccaactttagagtcaaactaaatgttatagaattatatgtatgattatgtatatacaatatatataaatacatataaataccgtaaattaagctagtatgttattgcgtaaagtaatggtcttaccctagacgaaggtgagtttaattgtaacagatgaaacaaagaatagaaaacttgttaagaagtgttcaatgtaagctctcatctctgcagggtttcatgtgacttataattaccagtcagctggtcctagagaacttaatcaaaatgtatagtaaagacgaactacgtggaccagtggccatttatctgcaaggtggcaccagccactgacatctgatcacttccatactgatgctgaaatcctatgcaaattcattacttaggtcaagctgggaaacacttctgtcaagtcactacacaattaaataaaaatacccaaaagggacttacactgacaatgctatagcatcctggccatatccagttttgaaaacactacggtgtcagccacgcaccatttaggacggggagaatggaaagccagtttggagaacagacgctttcttaagagtacacgtgaatatgaaaagggactctatgctctcaagaccaaaaaagaaatcctctgcgccgcccggctacattgcgcctggtgggacaatgtacacgacccctcccccgccgagtcccaccccaagcgcgcacagcggagcaggaggcgcccggcactcgcaggtaatgcccggtccctgccacttccgtcgagttttcgcaaaggcgccgcacggcaagcgacggccaggtccacgtgggccagcaggcgcgggggacgcaacccgccgccgccgcgagccccgccggcgccgaccagccctggcccccacccgcgggagcccgggagtcgggccgggggctcgcgggaggcggcgcgcgcagcccgggcgggggtcgcggcgcggtaggggaaaggagcccggctccactcacgcgcccgggggcggcactggggccgccgctgcgtctctccggctcaaaaaactgaaaaggggaaaggaaaaaaaaaaaaaaaagacctggctcctcgtttcatccggaaaccgaccggccggcaggaaatgacgaaggcagagggcgtccaggtccgctcggtaaccgtttcccgcgcgcccggccccgactccggggtaaagagccccggagcggagcagcgctggccgcgtgccgcctccggagccggcagcgtgagtggccccgcgtccccgcttctcccggtccccggcggggccgcgtcacccggccccgccccgcgccgcccgccccgccccggacgcgggggtaaggggggtggccgcccgcctgccctcggtcccgtgcggtccccgaaactccgagcacccgcccggtcccggcgcggagcccctcggcgtcgcgtggagctgcgagtcgcccgcttccggaagcgcacacgggccagttgcggcggcccatctgccggggcggcgggggctcggcgggagggttgaggctgaatcacgcgcagcctgcgggcggcggaaacgtccctagagcctcgccgccctgggacccgggctgcttcctgggagaggattacattttctccctgctccacttgactttcttccggaaggagcaggtctcgcaggatcggggccaagactggaagagttcaggtttgggagtcgtgtgtataacagccccgcgcctccacgcccaggcctgtgtggctttggacaagttatataaccaccgccgccaccccagtttcttctcctgtaaaatggagctttagtgccgcccagcagggttgttgggataattcagtgactctgtggactgcccagcacctgtgaattgctttcctggatgttgggtgaaggcctgtgagcttgtatgtaccctttggcttcagaataccaagcctttagtgtttcagagggatgagagaaagaaatcccattttttgatgcagaggattttgttgtaagggactctaggaactaagtggttccaatgtgaatttgtatcaaagtaacaaagttctaagtgagagacaaaaatgataacattcaaggcacgatgacaagcggtggtcaattttagaatcacctagacgtgacatcaggaacccaaaatcacgacacagattttaaagcttatgatacagtgacctagtccctagaaaaagtagttctcggctgggcacggtggctcacgcctgtaatcccagca

SEQ ID NO: 12017 - DNA, 6000 bp, Homo sapiens
ttcacctcctgactcactggactcccaactgaggccagcggggagcatgtgcccagcgtggggcagccaggtggcggagttgtcattgttctgtacttgtggtaggagctgggcatggcagaggcccttcccagcaggactcctgccctctcccacccaaccccaacccaggacaggccttacaggcagaagtttcagcccacccgggggctccattcaggtcactgggacctccttcagagagccccccactgcctggagcctgtgtgacctcatgaagtgacagagcatcagcctctcattgtacaatgggcaggcagcctgtcctgttgtcacagggacccaccaggatgaggttggcacagccctgcacaccctggcagccaccttccccgagccccggcttccctgcgtgtaacacagctctcactccggctccaggagccgctctggccctgaggaggtggctagagccaaattcaacacagatcaacctgtgttcatccccctagccctctggggtcttccagcctggcttcctccctggccgggaaaacagcaagggaggagaggctgtgggctccaggcccccagccagcccggctaccctcccacaggagtacctggctcaagggcaggtcccagagagcacagcccaggctgtttccttccctggatcgttcatccactgtgtctggaaccccagcgggctcagtgcactcaggacccgcacgtcagcttgtcggctccacacatgcagcccctcgggttatgcgtggtcttgtcccacgtgagaagggaacactgagactcagaaggtgacatgaccaagctggcgtggccaagctagcccttcccgaggccaccgtctccccaccctgtagcccccatccccacctcatctcttcctggccaaatcatcagcggtgccctttgtcccccgtgtgcctgtggtgcagctgctccacttggcgccagctcctcggggcagggctcgggactgtcctgttcccagtgggccagagcaggcacacagtaggtgctccagggctgtgggctcggtgagagaggaatgctggacgggctgcccggggccagattccataccacctgatgacctggagctgctcaccccactggcaccatcacccaaatgaccagcaccctcccctgcccatttactgacctttccccaaaaaggaggcatggccagcgttcaaattcctgctctcctcccagcagtgaccctggcacgtcacttctcccctagggtccttccctggctctagggcaggacggtaatatgaacacttacccgccagaggtctcaatcctctaggatgaagggagttaaaatgcatcaagttttacgtatgagtccatcacggtcctgaccaatggcacccacagcccagataatggggccggttctggctgtaccgcaatcaccaggcactgccaaggagccccaccttcacatggcacggggttacagtcacggcaggggtgggggttacacatcaggttaggcctgcttcctctgagccagtggcagggttggcgggggcaggtggccaggacagggtgggagaggggaggcagccccatctgtccccagccagggtggcccttggcaggcaacagcaatgactgtgctgcatttccactccttctagaagcataagccctgacatgagggcacccctacatctggggaagacaccaggagaggagccggggggcatgggagcacccctacatcccgggaagatgccaggagaggagccaggggacatccccactgggtagatgaacgggggctgcaggagggaggggtggcccacgcacctaccccgggtagatgaacgggggctgcaggagggaggggtggcccacgcaccttccccaggtagatgaacgggggctgcaggagggaggggtggcccatgcacctatcctgggtagatgaacgggggctgcaggagggaggggtggcccacgcacctaaggggaagtgggggtgcactgggcaatggcccccagttcccctccaggaggaaggtaaacctgagggcccactctcaggaccccagctgagccctgagccatgtggtcatccctgaccctcagttccgcttccaaaccaggaggctgccactaaagcagcccaagactgagtggcacgtgcctggcgggaagcgatgccccacctaggggtccttagggccacacccttggctgggaggaacagcctgtccttattttctgaactgtcttttgtacaacagccttggcgcagctcaaaggataagtgaggttctcagggtcctgacctgaggcgccccaaggaggggagacacgcgcacactctctgccaggtgaacgcctactgggccatcggaacccacagctcgtgccccacccacactggcacgggctgtgtccacgtagccctgatcccgctcggctaaagagcgcagctctcagctgccgtaggtagctgccaggaccctccaccctctgctcaggctcctgggtggaaggaagcacccgtccctgtccccgtcccaccttggggaggcccccctctctccagggaggctggcctacccgactggcaggcgtggggcacactctgggccgcccccaaccgcacacacccaactcgcggggcgccgaagtcaggcggcggcgatgccaacccgaccacgtaactgtgcgaagtgcagtacctcctcctgcagcccacagccactcccacccaactctgaactgtgcagagaggacggggctcatcggccctcggaccttgcccaggtccctgcctatgggtcctgcgagccggtccaggtcagaaggagggatgggaagtcttttttacctcacacatgttcacccgtgtgaccaagcttcaccactgtcctgccaggaagacctgtcattgctcccattttacaggtgtggaaacggaggggcaagaaaccaagtatccagcaagacactgggaggccaggccctcctgcctctagcccagcctcgggctgctgcacttgctaggaaacaccactgcaggcagggaggggtgccagggaccagagggagtaggtgacagcaagggcggccagggtggaggtggggagaaacggtgctctcgaggtgagaaagcgccctggggtggtctgggacagtgaccatctggttacagcctttggtcagatttgggaccttcatggaacaaggcaagcccaaggtcttggggggcgaaaaatcaccactatctgccagccccaggcccaggagctcccagctcagcccctctggccaaatgccacctggacaccagcctggtacactttccacttaactcaccctttcgccaggacctgccaaccagggagaggcctccccaagctgtatcaccgccatctggatgtaagtccctaaggaggtcacgtgcataggcattgggcaccagcggacactctgcccaccctggcggtgagagggagggctcacaccagcttatgcccccctctcagtctgactgtgtgcacctctgcccaagtcctcagccagtaaagtcacgtctgtgtagcttgggagtagttacaccacagaaattggccaatgccaattcaggatttggttaagcatctgttaagcatgccctcatgtcatctttgagcccagccacccatggtgcctccaagacctcctcgccatccaaactgcccacttgtctgagaaagctgcccacctcccggccttcctcctgcctcccatgtccagtgcctgactgcatcagccagccaccctcaccatgttctgggctgttacttgggacagagaggggaccagctgaggcccccagccttactccagtggtcagcgcaagcttccgggaggagggcaaaggcagagaggagcaggcagctgaggaaaccacctggaggctgcatctcatccccgcctgcattttctcccatcacgccgactgcctgcgggggcctgtccgcaacctgccccgctcagccagccagccatgccccatctccaggtccagcattgggcctggcacagagtaagtgcttggagaacacgttgggggtgttgaggggtgaccagctccctagcggggctatttggaaacagcccaggaattcctacacagggcagcttctcctccttcgtaaccacagtgaggggggccggcgtggtgatggggagatccccaatgcctaattccactcaggtgacaggttcggggcccatttacagcagctccaacgccccctttgcagatggggacaacaaggctctgcttagccccgcaggctaggggctgcaccaactccacctttgtgggcctcagtctcctcatctgagaaatggggttaacgaacttcttgggaggattgcaggaactcagtgaagcacggctctgcacagggctgccaggcggcttctgtctgtgcaaggccacaggcaccctgtgttcagtgacctcctctggtctgcagccgaggacactgctccaacctgggagcagggcccccagggtccacagactaggtggatgcccaacacccaccatcgtgtgcggggcacaccccagagcccgcaggcagagagagggggtgcagcacgtgcctttctgtcttggctgagggtgcccgggcacacactgtgaccagctagcctggacctcacgctgcccttggagccgctatcacagagggccagggaagcctccctcataaagggcttccctccgggaaccggcagggtgaaactgctctgcccacttggagctaagcatgccaccaccccacccctgggccaccagctgcccaggggcgtgtcaggagtcacccgtttaatccctgaggcacgtggatcaaggctgctgacctgattctaccggggtgtgcttggagggctgaggcgccgcccgagtcccaacactggtatggtctgaggcggactccacccggcctgagacctgacgctctgctttcccctgacctccactgacatctacgacccgccctggaggcacggaaggctgtggggttccagccccccaaactgtgcagctgaggaaaatgagccgtgaatgggggcagagccagatcctgggcgggaccctgcgcaggatgaactcagggtaggaggtctcccgcgcacccagaaacgggagcgggtcacccccttccagccaggggtgttctgtggctcgcctggggaaacagcggcctcctgaggctcggccccggcacgtggcagcctccaggcccacgttcccgccggatcggccgccaggcgcagggtcccgggacgcgcgggcagggggaaggcggcggccctcccggctgcgcggccccgaagccgtgcccggagcgggcggcgggctcgcgcgcggacggccccccacgcgcctccacaaagcgccgcgcgcccccgccccgagcgggcgcggaggagactgacctggcggtccgggcggcgccggcacgacgggtggagggctcgggacgcgcgcgccctcgcgcacaggcgcggccgcggctccaccggcttagggcgcgcgccggacccgctgggtcacgtgggggcacggcccaatgggagcgctccccacgccgcggccgcgcgcccgccgcccccgaggccgcccctgggctgggaggaggcggctccggtcgcgcgggcggcctcggggactgaccttggctcctgtgcctgccgggcgcctaggccaggtcggcctggggcaggcgggcgtcggaggggcagttttgaagcccgagcgaagaggcagagggcgggatgcggacgaagccagggagttcacgaaacttctggagttctcagtttccccctaagtcgactggggctaggtcccgtgccgccaggcgggctggctgaggggatgggctggggcgacaagacggcagccgcctggcccgggtacttggggtcagaccggcttcgaggccc

SEQ ID NO: 12018 - DNA, 6000 bp, Homo sapiens
caccccagtctgggcaacagagtgagactctgtctcaaaaaaaaaaaaaaaaaaaaaaaagaattctacctaattgcaaagcaaacaaatgtgaactccaaaccatgggcttctcctgcctactacataaacaaacagccacttttaagtacttccactgtagaaaataaaaataaacctggcctccacattcaggataaataagataattctgtttccaaagtatttcttgtagagaaattgtttcaattagatctacaaagcactattatttcgagccatataataggttggtgcaaaagtaattgcagtttttgccttttttttttttttttttttaatcattctagtattcgccaggtcaattccagataaatacataccgtatattaataactacctttgggctgggcgtggtggctcatgcctgtaatcccagcactttgggaggccgaggcgggtggatcacaaggtcaggagttcaagaccagccttgccaacatggtgaaaccctgtctctactaaaaatacaaaatttagccaggtgtggtggcgcacgcgcctgtaatcccagctactcaggaggctgaggcagaaggatcgcttgaacctgggaggcagaggttgcagtgagctgagatcgagccattgcactccagtctgggcaacagtgtgagactccatctcaaaaaaaaaaaaaactaccttcaaacatacttaattataatttctactgctaggtctacactcttactttttttagtgttacacttttcttaaatatttacccatctttacatttaaaaagaaatggcttctgttgtttgtttaagtgtccctttgggaaaaacaccacccatttctaagatttaatgccctagacaatttaagttcctccagcaaagaatttaagttctttgagatcaaggacggtatcttattcatcatgtacttcctgcactggtacagtacgtattcaataaaatatgtgttgaataaataacctcttctgatggttacagctaaacaaacatagttctgatagttgtaattatcacatatgacttaaagtgaaccttactttttatgattaacatcttttgtatcaacttttctacaaatctacatagcctacacatttgtcattttgatagcaaaatcgtatttcattgtattgctatccacagactgcttaatcacttctcttaagtggctgggatgggaggttaggcccaagatatcttcacaacaggattctcagcctttcaataagactgattagaatcaggctctcctggggtctactcatatgaagattctacactactagaaggaagacgttaaaatcatcctaaaatgacttaaatcatgaaaaatctcattaaaagaacaattcatcaaagggaacgtcccattccctttgagttctgccctacattataacatgtctgggggtgatatcattttcttttcttccagtaaggtttagtaacacaatacttacattaccataaacataaataaatacaaacagaactgcatattttaaaacggaccaagttaatttctaaggttccctagctcactcttaaaagatgtgatttaaggccaggtgtggtggttcacacctgtaatcccagcactttgggaggctgatgcaggaggaacacttgagcccaggagttcgagaccagcctgggcaacagagcaagattgcctctccacacacaaaaaaagtttttaattagccaagcatggtgacacacccctgcagtcccagctactcaggaggcttaggcaggaggattgcttcagcccaggaattcgaggttacagtgatctatgactgttccactgcactccagcctgggcaacagagcaagaccctgtctctcagaaagaaaaaaaaaagatgtgactcaagcagtgtcccacatatgatcacttagggaaaataatctgattaaaataacaacatgaaatggaaaataaactacaataatctctcaatatacaaacaacattgtgctacccaactttagttgggtccacattagacccattcaaagactgtgagagaggctggggcgcggtggctcatgcctgtagtctcagcgctttgggaggctgaggtgggcggatcacgaggtcaggaggtcgagaccatcctggctaataccgtgaaactccatctctactaaaaatacaaaaaactagccaggcataaggctgaggcaggagaattgcttgaactcgggaggtgaaggttgcagtgggccgagatcgtgccactgcactccagcctgggcgacacagcaagactccatctcaaaaaaaaaaagactgtgagggattagctactgagatacaaaaggactgcattcatttatgaggcagttccatagcgctgactcaaaaggatggcatgactccaagcctccagtatatgttacataccaaaaaggaaaaagaaatatgaggctatgtcatatgtttgagcttgcggatattcccaagaaaaagcttccagttacttagagcttgcatcttttgggggattccataataaattctattataaacccagattttttacaaagagcaaatataaatttggtaagttaaagcttcaagtgctttttgaaaactgtcttggaaaccaggaactaggtttgtacatattttaattatatatgctttcttttttacttaaaaggttgaaaaccaaatcattcttaaatgtaaaaggctacattctcctatcggcacaaacacaaacatatcaaattcaaatattttgctggcatctgaaaacgagattagtatggacctaagttcttactacacaaatgattttacagtgactcaccatgagtaagctttcaaagtcattttctttagaatgccagtctttgtttaaaaaaaaattctaaatctgttcctcataattactaccttagaaaatcagaagaggtttcatacctgattccgcttattttttacaatgacacagttacctttgtcagtttaaaaaaaaaaaaaaagtttactgaaagttagctgtttggaaattatactgcatttcctcattgagacaatgttataaaaggtagtaaaaatcctataaaacctaattaactcctaatgtaactgacgtgtgcctggtacctcaaattcctctttcgatcctggaaaatgtttcagtgcacgttttaaacaccttatactgcaaaaatgtggtcagctgattttgtatgaacgttccccgagagaaacaagagttgactcactgcacactattacaaaagcctcttaaccggtgtcccagcctctagtctctccctcctagattctatcctccaccgtgttgcccgttttcttaacagaaaatgagattaggtcgcacccctacttaaaacctccactgcccaaagaacttcctacggggtgaagtccaaaccccttagttcagcatagaagactcttcccaactggtaacaacctaccttagtttgatcttccatccctcccttttatagtctgcatgaagacatattgacatttttatcatttcctaaaaagtcatgttctttcatacgccccccgccccaccatactcttgcaaaaactttcctctgcttagaatgtatctactattctacttgaaaaatcaccgatgtagcccagttcaaatattattttctctaaaaatcttccccaacatctctcagatgcgcttagcatatttggtcaccttctgcccctctacaatcaactgtgtggtgtttataggagttccataaacggtggctaaactttgaaggggcatacacatgccgaagtgaggagctggccaaaaccacagttaaagaccatcaggatattccactcacctaatgcaggtcggtaatgactgacaatttatattaacatttaaaaatacagtcttatttacatttacaaacacaaaaaaaaatcacagattaataaaactccggatgtataatcgtcttcaccttaaacatcggtgagtgttaaccatctagaataccaccggaaaagtagttttaaccagaagaaatttggcaacttcccattcaaaacattgtcagagtttcaacatttccacactggggcaaatttacttaatttcaaataaagcagccaaagataagaaaaacaagtaattagtttcctgaaggtcaacagtcctgcgttgaaatcttctatcatcacctttgaataactttcaatcaatgatttagtaaaaactcccattctccatcatcctctgtcgctgatagagaaaatacagccatgcaaacaattatatcatacaaaatccaaaataaacaacttgtttccagaaagacgccagcgtgctgacaatctgcttccactatgtttgggcatctccaatacaagtatcttacatagtcaagggcagtttcacaattcaaaaacgatttcacacaaatgatttaattcctacaataatcctgtgagttcaaaagagcagggattatctgtccggatttaacacagtacgaacccaataaaaacacagattttttaagaatggtttggctatagaaaggtagcacatcgtttacaaaatattcttactacaaaaatgacccaagagaaatgagcgtcctcccacccacctttattccaccattaaatttagctgtgttgacccaaggataccatgaacgtcaaaatttcaaattataacctgcagcaaaagtttcatctctcagtctctttccaagcgacattaactccacgagcgagagccagctccctccctgcaggcgtttggaggactgaacgcccgcgggcgcgcccagcctgcagggctccggcccgccgaggtcagcgcccgccccagagcgggtttcggggcgtctgggggacccggggtcgcgcgaggcggcgagggatggggggacgctgggaacggctccatcgaacaggacacggaggaagcggtgccgggcagaggacccgggccaagaagggcttggggcgccaaaccccgcgcctcgggtgcgaccccggtccgcacacacctggagcggccgcgccccccgaccccgggtccgatccccaggccgggcccctccactcccaggcaccacaggttcactccgagcgccccgtccctaggaagcagccgtcccaaccgacccggggcgcggacacccacctggccgcgccgcaccgaggactgggcccaccaggccaagcaacagcaaccaccggacacgaagggtccccgagggaaagcgcgcgccagaccccatctcggccgattccgcaggttcctctcagcactcggtcgcctccacctccgcctcttccatcattttccaaccctgccggggccccaagtctggccgggaagcgcgcgcgcccgacgagcacgcgcgcccgacgagcacgcgcgcggcactgacgcaactgagccctcggtccgagctcgctcccgacatcgcctagctgcgctgacgtagggaaaaatccagtccccggcgcgagaataggatttctaaaccggcggtggcaaccagcactagtcggcccgccagtcatatccgccccgccccgtcggctgccgggcacgcccacctaggggggtcgacggatccgattggagaacgcattcggcgcaaaagaaggaggagcatgagacccagaagaggaatcgagaagcagaagcagagggcggagtagccccgcccgtctgctcgaccttttctagttggttggcggaggtgcgcggagcgtcgagctgcgcgtccattggctgtttggcggggctacgcgggcggggctacgcggaaaggcctgaccacgcagttcttgggtctgtgctgctggcctggggttgtggttgaggccgggtctccgctcctgtgcccgggaagatggtgctaggtggttgcccggttagttacttacttctgtgcggccaggcggctttgctgctgggga

SEQ ID NO: 12019 - DNA, 6000 bp, Homo sapiens
acagaattttctagtagtcagataatttttgcttttcattaaaattttatgcaagtatttcagaggaaaaccactactttctaatacaaaaagtgaacactgggaaacaacattctcctctgaaattaatgcatcaaaaattcctcttgggaagaagacaaggaaacagtagaagatgaaatgaattctatgtgtaaattttattctaatattactaatttagctggaaaactgtaaaaaatgacttttaggtctatgtcagtataacattccaagaagtatacaggcttaaatcggaatacttgggacacagtcatcaaatgaacgtcttaaattttctgctacattcagcatctctttttttagtgtagacaaaactgttgaatattcaggattatcatttgaatttgggtgaacctttttgagctaagagagaatcgacaaccacaatatatattatgaatacagtgaattatgaaaaaaatgagtaatttaacatttttgtgcttctaagtgaaaaggccaaagctttgtgccgtatcatttgccaaatctctgcatcctctatggatttccctagctgccactgcattgtgaatcacaccacagactagaagcaccctgagggcaggaattacttcgtatgagaacacaaaattctcatgtgtcctctggtctgtgtttgtggatggagggtgtttgatgactatgttgacggtaaaaagctatggtggctaaaaagtataccctttactcttggagaaactgatgtaaggccagatgaaatcttctactgttaccattttggacttcatctcagaggaaaggtatatttgacactatctattaaaatgttgataccagatgactctgtcaacaaatattatgctttttcatgatagtctgtcatctagagcatttgtagtgaattttttgctactaaataaataagcaaagacattaaaaaataacctggtacaggttttaaaataatcttaggaggaaatgaatgttaaattagggaatttagaagtttcttttcaaaatcaatttcctttaattaagggtaaattttaatttacagtatccctcaaaagaagctatctggaaaatttaaaatgtaattacttctgtgttattcataacaattcacaatgtcatagaaaacaaataatgattagtctgtcttgacctctttccatttctgattatatagatctaccctgcagtcactttgcattttatatttccatgcacagatttccattgcatggcacatattcattttcaaaacaccgggcaaaaatgctagtggttttatataactgtgttaacaatggctggttatttcattgcacttaaaagttaaaaccataatgactcccaagtcaacggttttgaccaatttcaagactaccttctctttttgttcattctggcatatgtgacacaggcaatagtagatatacaatgaaatactaagtgggtctggtactgtaaatgtcatattctgggtagatgtgaagtcttaacttgacatctatgaacttctgaggaggtgggtggcccacagttttctctgaaagattaactcaagaggataagatagtcatgtaaaacatttcaggctaagaagcttcctattgaatactggccatctccaaataccgccatcttaacaggaatgggaatggaattattaggaaattttgactttgacttttcctttgcctatacaggtaaaatttaaattctaggatgaaagtttcacaatctggcttgaagatactaaaataaaccaccttatttttaatattttgttggttaaaagaatgctataatcacatcctcctaacttttgtctatagtgacaagttaattttgctagaacaatttgcagagatgctgtttgatatcaataagtatctgcacttttaaaacacagccataccatcttggtaaatgtttaacactgatggaaaattaacagctagtttctttaaactgttatctccaaaaataagactagtacagtatttagaatttccaaaaaagtatggcttgaaaatccaagctgtttaaggcaacagcaataattagaaagtttaagtctctgcttaactgtcaaatagggaagggggggacaagagcattggccacattcctctcctattttgttaaatcacagtatatgaaagaattcctccacagaattgctagaaaccaatttgcagtcaaactgttagcagttcatctgaaatttaaaataggtttagtttagtcaatgaacctagaataagaaagggcctatttctttatgaagcaggtgggttccaacttctccctgctgctcaaataaagttctaattagttcctcttgattcctaaaatgtagatgcatatttcacaagtataaaaattacttttaccagttttaaactgtgttcatttgggagctaattttttagatttagtcattttaactacacaatcttgtagtggaaggcatccagtttaggagtttcagtcaaatttgcactgcactatgccaaacttcagtttatatgctccgaatgggtatgtgcaagtatgcatctagttaacaaaacgttgtgttttcccagatattttcaatagttttatgacaagtgaaaaaacaaagtacagatcagaattagcacaaaaaattctgggcacctagacttggatttcatgagtatgatactaacttattgttaatattcagggggtttctatttcagcaacatgtaatacacaaatcactaataaaataagtgatacgtctcacatggaattactgcttccttcctcctccagtttaatgtcaccacaaaaaaactcggaatcagattttccctgaatctgatacagggtgtacagggatggacatgtggcgatggggagagtgcaaacaaaaacaagctaactccttagtgagaacagcagaaaacaagctaattttttagtgatattcctattttggccaaaacctttgtatgaaataagttacagcaataaacttgctttagactccctttttatgattgagaactttctaatgaaatagttacatatgagacagtagaaaatctattagcatagagtagacattcagtagtgatttttaaggtttttcttcctaactgtagcatattagatttttttttttggtagaagaagaaaaccacagtaccacccaggatgatgccaagttttaagtttttttttaagtttattttaaaactgaaggcagattattcataaaatcattctggagacttatttgggtttctacgacatgtacacagacagcctctactgtgctatatatattttgattactaggtataatgaatactctaaaccaagagagtgtgtttaatgaatagtatctttaaaaggagacgatttttaaccttccaaaactgaagagaaccatccctggccttcttaaaagattataaaataatgcacacatttaaaacaataaattttgccttctacttttgagcatggaatttagttatatagtagagctggggcctccaacaaaatccagtcacaaactgacatatttacagcgctgtcaaccaggtactttatgcccattcagaacatttaagggtcccaattaactactgtgaaactcgggactcagccccacataaaactattagagaacgtttttttcttttaatccatgagaaccatatgcttaatttatactgtaggatgaaaagatgtcctttttagcaagttctaccattctgccattttgcatttgaaacacggcccaagtgttctgactaagtgaagtgtacaaattgtgtaagcttttatataagcaatggtataaatggggttgcagtgggctggagaaacttttaattgcatccctttaatatcctccaactctgagctgcttaattccaaaaagtgatgtcgcctcctacaacccttttcaactaaatatgattatgtttatcaggaaatgcactttgctaaagcataagctattcatgaatatctttctcagcgtattacacaaggaaattcatcaggttttgacacctgtttcaataatgtatacttttcctaataaaagaggaacttctgtcctggtatatacacaatctctttggcaaatattgttaaatattaaaataaggtgatctttgttcacagccaggaatactggcttaggtcacacataatgcaaattattgtttcagtattgccattctcaggagtagtagctgctaacttagcagctataggaacacacctgctaattgtattctttaaaatgtagacttcattacccatttctaaaatatcttcctagtaatttgtccaagatctccaggtcagcaaagactgctactcttttaagaccaatactttaagaaacggaatgaaaactaggaactcacacactctgaactccacctgcatcaggtggcctttctgctcccataactaggacgtttccaaatgcacccccaaataaggtacaattccccaacatcctagttacggggttctggcttctatctttaggctactggaggaccagaagcgaaatacgactccacgtgaaaccaatcccgggagcggtcagcacggaccgccaacctcacccgctcagggtgttcgctctaactccacgggagtggcgatttcaaacccggccgggagagggagggatcaggaacgtaatgtgacgggctcaagtgacagcgtcctctctccagcccaaccctcccgggcggcgctccctcccggtggcagcgcagcgctggcgccggccaggtacattcacgcctagctcccctgagtgtggatacacggcccgctccaagaacggggtcagatccagccctcgcgccccagtccggtcccagcgccctctctgggaaaggcgggcgcgggcgcgggggtgggaggcgcccccaggtgttttggcgggtttccggacacgtgcgcccggcgtcctccccgcttccccgcagccggggcagagcccaccgcaccagctcgcggagcagccgagccgcccgttacgccgctcacctccgtccccgtaggtctccacgccgtacccgtcttgcagcccgttactccaggtaccctcgtagcgagcgggggtgcacaggctctgccggaccccgtagcgccccttgaaaccatgtgaccactccccccggtacatccacttgcccttcgtctccacccccagcccgtgccgcttgccctgcgcccagtagccctggtaggtgttgccgctgggccaggtgtagcctccgaccacctcgaagccgtgcgaccaggagcccgagtactcgccctggcccttgggccccgtgcagatgccatgcccgtgcgccttgccctcctcccagccgccgcagtaggtgccgccatcgtcgaagtcgaaccttccgcccgtcattcggggggcagccccggcgcgctccccgcaggggcacggacgcgggcagtgctgggcacggcagggtgtagctcgggggtgggggcccggcgggcgagctcacgacagcgccctgggcagctcgcgctgccgctcggctccagtccgacgccgcccccgtcctccctcctcttttgccgccgccaccgccgccttcctcctcctcctcctcctccttcgccgccgccgcctgggccagcgccgcgcgcgagaggacagcccaggttcccgagcggaccttcagctgctcccgcccgcccacgtgagccgggcaccgccccgcgcccgcccctcgtcccctccccgggcgccgaggcccggccccgcggcgctcccgccccaccgggccctgcccccagccccgggagccgccgcttcctcggcaggcgggcgcgcgcggggaccggctggcgcgcatgtgttcgcgcagtgggatgccggtgggagggcgagtgtacccggggacgcacgagaatccctgcctggag

SEQ ID NO: 12020 - DNA, 6000 bp, Homo sapiens
aaaatgcataccctgtccttgtgcttatattgaagtacaaggaagtagatgataaatataataaactggtatatatttaacttggagtaaaaatactgttgtcagagagagtggtaagtgctgtgggaagaagaaaaagtagggtaaggtaaagaagatcatcataatgaccagggagggtgtggggcaggtaggactattaaataagatggacaattgagcaaaaatttgaggaagagggatttagccaagtgagtatcttagcgaagggtattctaggcacagggaacagctcgaggaaagcctaaaagaaagtactaggagatgaagtcagtgatcatgtgggacttgtaagccatttaaagaacgcttgtgaataaagtggggagccaccttgggattttgaccagcagagtgttttgatctaatgttttaggaggcttctggtttgtgcagtgttgagaagagactatagagctgcaagcacagaagcagggaaacctgttatgagaatcgatagaaatgccaaccatcgaagtatatttacatgcactaaggggcactgcaatgattctgagcatcgtgaaacacccagcttttgtagcagagtactaggtcctcagtaaattctcgtgaggtaactattttagtttgtgactttagatatacctcctaatactgatttactagattacaagtagcccttactcgtatgtaaaaatgaaagttcacagaatcatagacttcaagagcctataggaactgcagaaaggacttgcagttttttgtttgtttgcttgttttttattttttggactctgtcacccaggctggagtgcagtggcctgatctcagcacactgcaacctctgcctcccaggctcaagtgattttcctgcctcagcttccaaactagctgggattacaggtgtctgccaccaggcctggctaatttcttgtatttttagtatagacgtgttttcaccatgttggccaggctggtcttgaactcctgacctcaggtgatccacccgcctcggcttctcaaagtgctgggattccaggcgtgagccaccatgcccatcctgtttgttttttatctgtatttatttattttttttgagagagagtctcgctctgttgcccaggctggagtgcagtggcatgatcttggctcactgcaacctctgccttcagggttcaagtgattttcctgcctcagcctcccgagtagctgagattacaggcacccgccaccatgcccggctaatttttgtattttagtagagacggcatttcaccatgttggtcaggctggtctggaactcctgacctcaggtgattcacccaggtcctcccaaagtgctgggattacaggcgtgagccaccatgcccagccagcctgttttttaagacagggtctcagtctgtcactcaggctgaagtgcggcagagcaatcatagctcactgtagccttgaacttctgggctcaagggatcctcttgccttggccttccaaagtactgggattactggtgtaaaccacagtgcctggccaggacttgcattttgggattagtttatggcctgtcaagacttgaaaattcagtgatgaagacagctgttacttctaaagttaacgaagaatactggttttgactcaactttaaatgtgttcatacactgagggacaggccaaagtaaaagataatgctgtacaggacaaagtcagatgtgatgaagattttaagtaaaacactgtaccaaaacaaacaaaacacctctaagatccatattgtagaaagaccaaaagacagagatcttgtgaatacattttactttctttagttctgagcccagcaattttatgtcaaactggggcaagtattttgaaaagtagttcatttacgctaaagccaatttaaaaattctatatgatatatattctatgtatgcgatatataaatactgtgacaaatttttacttcgtccaggtgtgtgaataacagtggaagatggtttaaaagacttccttccactcctaagtagtccctttaataggaaaaacacatctagttgtagtaaaaactgtaaaaaggaaacaccgtaacagtaaccccactcacttctgcttcattcctgtaaaaagtcatatgttccagtgatactggctcatgcccactgtatttcatgagctggcactgtctccaggtaggcgaagcatgggtgggggtgcagggagacacagcctcaggcacccagcatgctaaccatatgaccgctagaaagcagtgcagggcccagggggtgaccctctactgtaaaggaagccaaaatcgtctaatttggaccatgactttgaagttcacattttatagactcaaaataactaagctattttaacctcaaaaagtttaaacctcagagtagtgtgtatattctggcttctggttctgcttgggttgatagttagctgggggtgggaagtggtgtttgtttttttaaatctggcacagaaatagttgaataaggtagactgttccacccattccttttgattatttttagttctgctctcctttcttctaaaggagcagtttgtggattttagcagcacttaggttttcctaagcgaaagtcaaagataaatgtatttactggtacctgtcattgtgtatgagaggaaagtacggatagtaagcgtcaatttcaatttcaggtaaaaaattatgttctctttaaaactgttggttttagttgtcgcttttttttttagtttgtcactttttttttccttctccgttatttattttgcaatgcatatagtgcagttctcaacatttgctataccttaatcacttggggaactttcaaactatattcacagccagggtcctaacaccagagtctgattcatttgacctatgggcccaggtggtattttaaaaaagtgacccagtgaatctttaactcagatgactggaaaaaaaaaaaaaaagtgagccaggtaattttagtgtgcagctacggttgaaaaccagcatggtttcaaagttgcttaaaaacatctaggttctagttccagccccgccacttaccagctggctgttcttggtggtcttctgtttcccataggatgatgaggttggattagaaattcataaaaattgttgaactctacaacaaaatgaaataaactgggattcatataatttcatctggtttgctcagctccaaagagatgaaaattgaattatctggagtatgagagtgttgtttgaaacaagttagtaataatttaaaaaacagctcttaagtaaacttttccctcttcccaattacaaggcatgggagaaaagaaaaatagacatttaagcttagaaatcacaggagacttccagggctgctttgcctgtccccagctctcttaaatggggagctagtcagacggtacctggggaacagagggaggagggagagcacttactacacatcaagaaggtaaatataaaccccaaaggcttacgttactcatcagaccacaatatggcctggtactaagcagcgcgcgtgtggaaggctgggtggggtgcgcacacacgctcacttgtgtacgtacacacacacacacacacacacacacacaggcacacacacccgagctcagtcacccacattgcttgcccagggcgcctggaagagctggcgagcccgcccagctctgttcacccggccccgccccgccccctccgggagggctctccgggcggcgcccagccccgagcagagcaaaggacggcggcggccacctccgttctccggccgctggtttctcgtctttcctcgtcctttcattgaacccatctccgtgcttcgaaaatctgactctaacccgatctcttcgcgtctccgcctcttctttctagagtgagcgccaaaaagggcctgacagacagaagcctttggccccagcaccggcccagcccgtctctagacgattcttgctcctttcaccctcacagcctccagtggtcgcttcatcttcgcaccctcccggccaaccctaactctcctcgtctctcctcgcgctgtctcgcgtcctcccctcaggatccttccgcacattctcagcgtccagcgcggtttcccacaacttcctcacgccccgctcccctcgccctgtccccgccctcgacaccacctgcgttccccactcgctccaacctccctcccccgctatccccacttgtgggcctccagctctctgcccctttcctggcccccatccctgacaccccagggacccttcctccctcctcacgttctccctccttccaggatcccgccccgacacttcggggccctcccgctacgcgcactctttctcctcaggtcctgacacctgggcgccccctccctgtcacccaccttcagctccagccctgactctcgggcgccttgccacccttacgctccccgccccgccccggtccctcgggcgcccccactcgccgcctctacctccctacctgctacacctggcacccctgcccccacccctgctcatactcttcccccgcccccgacacctcgggcgccccctcacacgctcctattctccacacttccgtccccgaaaactcgggcgccctctcccttcacgctcagtctctcctccctccccgcccggccccggacccagcctggagatcgcgctcgggaggggcggctgccgcccgcggggcgcccgcggtgcccgggcctgggcagcgaggaggtgacgccgcccccgcgggatgagcccgggaggcggaggggcggaggaggtgctggcggcggcactgagcggcggcggcgcagggcgcgcgggccttccgcgccgactccatcgacccaaggggcggcggcggtggcggcggctgagcgaccctgggccgggcgcgtgatgaggaggggccggcgccagaccccgctgcacgtcggagctcgcctggatccgggcgttggcagccgaagggccctggccccgggactctccgccgctagcccccgtcatatcttctccgctttcgcttctccactctagccgggggtggggtgggtggggttggggtctccgcgggggtttccggccccgcggcccgctcccgggtgtgcctggaggagttctccctctgtggcgcgcgggagccctgtgatgcgtcagccggcgggacggatgagttgcttctccgggaaaccgtcctcgcttcctcacgaccctctcggctcccgcctgggtgcccctcgggccggcagtactccgcctccgggcgctcgaagcgagttccccgggggcttgttcgcaggcaccccttcccctccgaggcggcgcgcgcgctcccggccctgaccgcggccggacacactcgcgccccggtccgcctgtcgccctcccgcctgctccctccagtcaccccacccttagctgtccccgccaccttactccaccaccctcccccgcctctccgcgcactccgcgtcccggcctccagttcccctttcccttgaaccgctcacttcacagcccttcgcccccgggaagaagaaacatttcccgaagcgcactcctcagccctccttccccacgcgctcgccctcccctccccctgcttttcttgggggaggggggctgtcgccttggattgaaggccattgatttgtatgtatttgtcccagcgctggaggctgccccagccgccgcgccggtgccgccgctgccagtggagttgcctccccgcttccctagggtggttcggctccaccaaacatgtcggctcctgtcgggccccggggccgcctggctcccatcccggcggcctctcagccgcctctgcagcccgagatgcctgacctcagccacctcacggaggaggagaggaaaatcatcctggccgtcatggataggcagaagaaagaagaggagaaggagcagtccgtgctcaagtaaggacctggctc

SEQ ID NO: 12021 - DNA, 6000 bp, Homo sapiens
cctctatctgtgagtgccaggacagctcctagcaacactgaggcctacaagataggaccagatcagctcccagatgtcagcgactggtcttctttctacctgaagaatcagtgtggtggcctcacaattgctacaggtgcgttcagcctcatgactccatgtgagcaccccgtgccgattcatctgcctggccacatcaccacgtactcggactcatttcactccctggctgggacacagcagatagcagacctctcagttgtcagacacatcccactggccttcggctgtgcccagcctggcttaattggcacctcccgatgcttctggaggcgtctgtgctcccagctcctctctggcatgtctcaatggcttccttgtggcccacttcacctgttcacagccccatgacttcccctgcaccgtctattgccagactcatcttcctaaacacaaacccagctgtggcccctgcctgagtgcccttcacctgcaggataggcccaagccctcctgtgttcagccctggccttctctctggcagtgggggtctttgctgtggaccctccaccccctggccctgtcccacacctctggagcttgccgttcccagggagcctcactaaagcctctccctctcagccaagagtttgtgtccgtctcaaactcctcaagaaaacaatgtcctggcacatttcacttggcagttactcccgagaccacccctgcccccgccctgacgttctcgttagccacataaacactttattctcctctttcgtataaaatcctgaggggtctgggagctagagctaggcaggttctttctcctcctcagcatgctggagcacaggcgggcacccagaggaggaactgcacctgctcaggaaatagccggaaggggaggtgggggaagggggagccgtgtggcccactcgctgctcagcatgtgattagccgctgcagagggcaaggtggactccaggaggtgccctcgtggctgggaaggcagtgtgtgtccccacactggcagagggactgtctgtgaacaatgacagcactgcagcagggagcccactcgtgactcaggttgtgcagggtcagggcccccggctgagaggcaaaaggacaacaggagggcagctggagccaccagtgggcagatggcagggcccgcgtaccaggctaaggagcgtggacttcatcctgagggcaccaccgagggttttaggcaggcgggtagtgcaacggatgtgattgatgtttcagaaacacaccgctagggtcctggtggagggcggggcaggcgaggaggccaggtgaggcaggggaggttgggagggagagggaagcggggcagcccctgctctggcctggagataatgcaggagcaggtttcaggaaggatgagcttggctctgggcaccccacaactgcggtgcccgcggacatcagggtggtgctggcttcgtacacagaggtgctaaggggactgactgggcagtggggaggggccttgagagatcctcaggccacgctgcatgcagagcctcgaggctgcagtgggaatatccaagtccaaagctgcctctgggcctagagccgcggggtgtgagagctcagcagggctcagaccagccaggtcccaggcaatggagggaccccctgcaggagcagcaggcgtcacagggcaggaaacgcactgcaggctggggctgagggctccaaaggaccgggcctgggcaggccaaggggcccaaatggctgagccctcagtctctgtccagctcttggacgggatctccagcctgtgtttctcatggggaggctggagagaggcaggcctgggtggaatatcagggtgcccacacagatggactgcacagagctggggaggcccaaggagcgcccaaggagcatggcaggctgccctggggcaggccaatgacctgtgccgctggcccaggcgacagaagagtgaggcggctataccgtgccatctccacggagcacctggtagacacagccaggccacttaccattggggtaccccagcacaggcttaactcactctgggcaccccagggtctctgtccatcagttgggaacccaacacacaccttatgatgtagctgtgtgtgggcagaggcttggcactgtattaatctccactattcatttctggtcctgtgtctccatcagcagggagggcctggagcccctcccaacttcatgttgaaagtggcagggagaagagtgaccaggggaaggcagagagcaaatcccatttattggaatttcactgacaacaaattgagaggaaggcttccccctcccctgaaacatgccatcctctctgccctcagggctcagcacagggataagacccccactccgcatgtccccagagggcagcactccaggggggtgggggggaggggaggggtgctctacgccaggctggggagctgggacaggagggaagacgtgcaccctcacctcttggctcaatccctctccccgggacctggtgctgcccccagtccctggggtgggctggcagacagggctcatgcaacaatgagtagacaggaggtggcacggaaacgtggccttggtgccccttggcgggggcgggaggactaaaggggccatgctgtggccacagcgggtccaaatggaagtatctgcagtgtacatacaggagggttggagagaggcatccttttccctaggctgtgcctggggacaagagagaggggaagtacagctggcactgccgtgccaggggcagggtccaggccagccgtgccacctgagcgggcacagcgagctggagctcggctactccttggcgcggccaatgatggtgaggatgtacaggaagatgttgatgatgtctgtgtacaggttcagcgcagcaaacacatactcttctgggctcagggacagctgcttgttccccagtagcagctgggtgtccactgcgaggaactggaggtgacagcacagtggtgttgagggacaagcctgcctgcccagcatcccgcccccggccaaggtcacccctcactcacgcaggtgaagagcagagcgcccagtgaggcgtacacgatctccaggatgcggttccggatgaagatgcagagaatggcgaagatgaagagcaccaccatgctcaccaggagcacgcccatgcatgaggtgaagtcgtagcgggtctgcaggtgggagaggaacgggccatggggctgggcctgggaaagctgctcagcccctgcggccacagcccagccacgggaggcccctcacctgcatggagaagatgacgacggtgaagcagacggctgtggtgatgcccacggccatgatgactgcctcggtgttgtagaagctggcgatcatccccaccatgtacgacaggctggcggtcaggaccgactgcagttgggagacacaggctgaccttgggtgtgtgcccccatgccacccctgccggcccctgcctcatgagcacaaggagaaccacggtgaccaggcccggaagagtgggcgtgtgggactgcatggccggacccaggcacagaggctcaggtttgggggttaccagtgcaacaaggttccaggggtgctttcgccggaagtccccacaacagctgaggacgatgagagagatgaagaagacagcataggagacatagtaggtccagacattctcccggacaaagcccttcacctccgcaacaaaagtgaacacagacaccgtggacagggtcaccgacagctgcaaggtcagcactaggaacacctggggaaggagccgctcagagtcatccgctgggagccacagcccccaccgccttggagatgcccctacccaccttgcggatgaaggcctgtcggatgctcttgtcatcccagttggtggcagggaagtcctggttgtcatagtaggatgggggaccctcctcctggtagtttccatgctggggtgctgagaagcagacaggctgggtcagcgccactcacaagcacctccccctgccctcccggccaccccacccctcccttcctgagactcacagtcagggtcttgtcctgggaagacctgtggctgtccataggggttgggggggaaggggctctggggatatggcccctgggggtagcccccttgggggtaggggccctgtgggtagccctcttgtgggtaggggccctgtgggtagcccccttgggggtagggaccctgtgggtagcccccttgggggtaggggctggggccatgggggtaccctggctgaccgtagggggagggctggaaagggggctgtgggtaaggggccccagggtagggaggctgagcataggggggcatgggtggctggggcccccccggatatccagggttggggggaggatagttgtccccagacaccaaaaaactcttttcatgggacatggcctcgggttccgcggtccgcccctagagaagacagacaaggaacagtggaacagttggcttgacgacagcgtcgggacccagccctgcgcaactccacctgcttctgggaacccagggggaagcaagggaagaccgtgacctttgccccgggctgtggggagccccggagcctgggcccggagaagcgcgtgaggaccggacgggcggcgccgtggggccttcccagggctctaggccgcctttagggtgggggaggggccgggcgaggggacgaccgccagcctcgggatttggggcttgggtcgtttctcacaagcaaccggaggcctgcgccgctgccggcgtctcccgggtgggagctcagcgcggaggctggggtctcggccggggacgtgtggggtgtgcccggaccctcccctccgcatcccgccccttaagcagctttaaggggccggagccggcggctatttctatcccaggaaatccccgggccatctgtgaccaacaaaggcccgagcccccccacccccgcgagcccaacaacagggcccaacggcccctggctccggggtggggggatcgggcctggatcggctgccggtgcctgccagtggggtacgccgggaacagcggggtgcgggggtgtgtgggggatggaagcgaccacggggcgtgcggggaacaaagcgggcgtggggcgaggcgggtaggggctgcggccgtggcactggcaccgagagcggatgggccctccgcgggccgggggcgcacagggtcacgggtccagcagtcgccgcagcgcgccgccccctccctccggctccaggccgccgcggctccccgcccccaccaccgccgccacctctggccgcgagctgccgcgcgccccggccggaccaacttactgacccgaggcggccacgctcggatgcgcaagatccgcgtgggggcgggggcgggggcggcaggccgcgcggcgcagcgggtcagaggcgctcctgggctcgggccggggactcaccggtggccgggcgccgcaggccggtacgcacggtgtccgctgcgcggccgcgcggtgatggccgatgcgcccgcacccgcacccgctcggcggccgctcagctgggcctgcgcctgcggctcggaagacgcagcggggccttgtgacggggcggggcagggggcggggccgggcgagcttcggggtgggaggggcaggtgggcggggcttccgcggacccctcccgctgcgccgccttgcgtgttcctcttcgctccggccagaggcccgcctctcactgtctgccgaggggtggggtcgggcggtgggcgctgaagacccctggaggcagaagtctggtctggccaatttgactggccgttcggtagttaagaaatttattcctaaatgcgggatttgctgaagctgcccgggactgaccgtccgttctcggccttaaaacccgacgttcacttcttttcatccagatctctcccaaatcaagaagcctaatcctttagttcccaaatcgagg

SEQ ID NO: 12022 - DNA, 6000 bp, Homo sapiens
ggtcaggagatcgagaccatcctggctaacacagttaaaccccatctctactaaaaatacaaaaaaatagccgggcgtggtggcgggcgcctgtagtcccagctactcgggaggctgatgcaggagaatggcgtgaacccaggaggcagagcttgcagtgagccaagatagcgccactgcactccggcctgggcgaaagagcgagactccttcccaaaaaaaaaaaatcaaggggtgcaactgttccttaaccccgtagtcacctgcacctatctagggactaagctgggcggagaactacagaactgaaggatgggaaggctcttaggtcagctgctcaatcacagccagcgaggcttgtccccacacacagaggatcagcatcacatgggatgaccacatacctgggacaggcggctgcacgtggtggccacggcctggctggcccttcactgctggtttttttctttttttgagatgcagtttcgctcttgttgcccaggctggagtgcaatggcgcgatctcggctcactgcaacctctgcctcccaggttcaagcaattctgcctcagcctcccgagtagctgggattacagacacctgctaccacgcctggcatatttttgtatttttagtagagacggggttttgccatgtttgccaggctggtctcgaactcctgacctcaggtggtccacccgcctcggcctcccaaagtgctgggattacatgcatgagctactgcacttggccccttctctgctggtgaggagcccaggaaacctttccttgtggagggacaaggaacagtgagttgcaggctttgctcctactcaggggaccaccctctggggacagtgggggacgtcaggtccggctccattcctgccttccggtggagggtggagtctcctccaaattcctcttgggcagggtttcgcgcttcagagcctctggccacttgctgtgcagctggtggtggtgggcatcctcgccccagcaggccctgcgtggtgggctatcctgcctcccaggggcccagctttggccctggactcagccccgggaaactgtaagtgagcagtgctcaaggcctcggccctgaggcacctttctgccattatgattctgacccctgccccagttcctactgggatgggcaggaagctcacagagacttcaaaaggcagcggattcctcactcaggcttgtgcaccttgctcctctgcggcctgggggagtgtggctcatgtgtggcacagagcagagcctccatggatgcctttgatcgctggcctatgggagggaagatagaagaagctgggaggtggctccaccaagcctgcagcccagggtggacaggagagggcaggccccaagcaccggtgctgatgggggtggtggcaaagcgatgaggggaagggggcaagcatgagaccaggagccctgttgcccacagccatgccaccaaaccacccaccttgtcccatccttgtcctcatcctccctcagaagctttcttcttttaccaggcgacttctgaagctcacactcaaccttcagcccccaccccctagaaccctcagtacctgcaacccctaaagggaagcagccgggtcagctgggcaggggcccagcctcaggcggcagcatcctggaaggctggagctggcagtggcctctgccctcagagttgggtggtcctgagcccccctgggagctggcctgccccctgatgtttgatggggcccagactagaggctttccgggtcacaggggctccttcctcctctgatggtcctgccaagacaggagggagcagaagtggggaggaagaccaggccttcaaaggcccgtgtgcaggccaactcaaggacaatgagaaagggcctccgcagagcggaaccgtcgcagacagagcttgggcagcaggaacagacccaccatccccagtgcctgcacgctccctgtagctgcaggggcccttctgcagaagtggggcctcttgcctgggagaatgggccttgctgccaggcccgtcatactgatcacagttcggtgtcctgcctccctggggtggcggcccacgaggtgaagaaagccaggctcctaccttggcgtggtctctcccagcactttcttccagatccttgctcccaggctcaggggctcctctcagttagttcctttgcagctccagctctttttgtgggagcccaagaaccacccagcccaggatagaccatggtcagtgctgaggtcctgctccctgcagatgccaacacatacaggcccaggctgctcagggctaggggcagtgtgccagcagcccagggagaagacagctgtagccaagtctgcctgaagaaacagtttggggcctttgggggtctgattgcaggaggagctgtcactgagagggtggaggctcaggggagtggggtaatgctcaggccaaacggtcccgatgggctaaaaccttaaactctgtctcttctgagtccccctcactgagtaccccggtgcctgcacaccaaccccctggtgtaaatccctagcaggatactcctgggaagctagcaggcaaacagtcactccagggctaagggtggacagggggctcggcacatcgcagccccatccgactaaccctcagcccttgagaggtgctcgtggagcagtggccttgccgggaagaggctcctctactcctctgaccaccgaagctggtagctcgtgtgggcccagagagcccagggcagttccaagaagcaatgtggggtagtctgggctcagagggcatgactgtacaatccgtgagaccagcctgtggtgggtaaggacctgcccagggcctggggagaggcagcctgttaaacaggccaggccatggctctagttcagggaagcatccacacagagagatgtgctcaaagaattaatgccaactcattaaatacaaatgttttattacgcaaaccacatgtaggtcccaggctcaggggcttaccctacagcccccactggtccctggctccaagcctgctccttgcccttgcccaccctggaaagccaggatctcctatggagtgtgtaggtgtccacgagtgtaccggtgtgcgggcctcctgggctgcaggcactcaggcatggtggcagcattgagggaaagacaggtgttggggagcggggtccccacctgcccaggctcaggagtcacaggggtctgcacagtcctttctgctgtggaacacgtgatagatgctggtcggggggaacatagcaacagcgccgagcagagagcccacctggatggccacgccggctgccagcaatgccggccggcccccgccatgcagcagggagctggctgccaccttcacgtaggagaacacgccaagacacagcacccacgacagcacctgagggggacacagcaccagctgagcgtgagatgtgcctgctccagggcaacgcccccccaccccacttcatgtccccctgtgctcaccacgaggaccacccccgccgaggtgcccaccaggggcgggcaggggctcaggactgccagcgccatcaggtagcccccacagaacacgcccagcagagagaggccgcccagccctgccaaggacctgcagtgagcgagcagaatgtcagggctgactgcgccaggacctggctcccagccctgagttccacccgcacaggggctgggggtccttgtgtacctgcacagcacacccatggccaggaagcaggccaggggattggcagcactgcccagcaccacagccaggtggtaggccagacgcccgtagggtaagcaggaaaagctctgcacggcaggcagcacgccattggtcagcgcgttggtggcggccaacaggcccagcaggcaggcactgcgggctgatagaagctgataggccttagggtctggaccaggggtggtgcctgctgcctggcttggtggctcttgcagtggtgaggactcttccacctcttcctctgctcctggggctcccacctggaggcctgatcctaactcccctgtgggtacagatggtggtggcggcaacagcagcagaagaccctggaaggcagcagctgaagcgaccagaagggcagtcagtgcccagaagaaggtgctggcgggaaaacgctcaaggaagtcgagcggggggccaggggtgccgttgatgggggctggcgggcactcgaggcggcccacaccctgcactagggccagcacgcagggcagcagggcactcaggccttgacccaggaagaatgaccgtaagaagcgaggtggcaggtggctcaagaagggcaggaaagtgacattcgaggcacagcatgccagtgccagcacaaaggccagtgctaagaaggccacagaatgcaactgtcctgccactggggccacatggtgccacagagaggccagcagggctgtgcccaccatgcccagcacctgcaccacccggatggggacctgctcgtcctttcctggggccagcctcctccagagggtcaccaccagcagacccaggttccccagagccacaagcacagagacgtaagaggggaggctccaacctgcagggaagggaggaggccatgtcagggtcatgatgcccaagggaggaagagtgccaaagcccaccttcctgggcacacctgcacctcctcccactcaccctctggaagctctctgaccaccacaggtagctccacccagatcccactgaccgcagcccaggagtcttgggcacacctgcacctccctcccactcaccctctggaagctctttgaccaccacaggtagctccacccagatcccattgaccgcagcccaggagcccatgccgaagagagccaccagcaggtgggtcagcaccggacgggcgggcgtgggtgctgccattcagcccaaggctgggcccttccaggtcagggcaaaggtcacagccagttcttttcccacctagggccagacacgctttggctctcctgggaagtgaagacttcttctagcttgaaagaaacagagaaacagataggatgcagagccggagtcagaacagggtgagaccaggggaactgggggagccccgggcaggagcgcagatggggaggattggctaaaacgtacccagcgggaccgccggcaggcagggaagcaggaagccggcccgagtcgctgcggccccaggggaggaggccgaaggagcgagtggagccctcctctccagggagaggcggggctggagtcaacgccaccaccaccccaagccggacgccgggaaagggcgcctaccaggaggagccacgcacaccccagggcttcacggtgcccgcgaccgcaagagccaagtcagatcccaggggagtggccgggacggctctgctcggaggggcgccgccctctcggtaccgtcaggtgggcgactcgggagccgtccggtccctgcgcctcccggtcccgcgcccagtgcgctcccgctccagtgccggcttcccgccacgccgggacaccgccgtccggcccagggacgccacctcagtccggagcgcgcaggacccggcagcagccacgacccgactcacccgtggcggttccgggcccgcccccggcatggcccacgaccggaagtcccgccccggaagctggtcggcgggcgggcgggcgttgagaggaaccggggggttgtcggtctataagcctcgcccgttccgctccctggggcttccccgagcgccgtcggtggtcatggctgccccagcctcccggcaggtccgacgcagagcccgggcagcgccgcggccccgctcggccgaggactggtggtgggaccggctggcgccgaggggctcggggtaccacctgctgcagtccgacagcatgctgctggtgctgtccgaacccggccccgcccggccccgcgcacagcggcgcgcttcccgccgcactccccggcagccgccccggggc

SEQ ID NO: 12023 - DNA, 6000 bp, Homo sapiens
gtgacacagttatttaagccagcataacctgaggctgggtgggtgcaggtcacatgaatgatgacttgtggggcgctgtgagtgccgggaaaagctggcttacaaacccacagagatctcttcctggtgtttgtttcccatcctctcccttctcctttcaataccatcctccgattcctgcccccttcccatttccacactcccagctagcctgctgatccctctgaccaggtctccaggagccaagagagaaagaaactcagccagactcacaaactccagctctcggcccctgaacacctcctctccaaaagggccaccgcagcaggaggccagggcaggcgggcggggtggggcactaacaggcgctgccaaatgggaggacagggctggataggaaggggtccttcagaggctctttcctgggcaactgtgaagtgctttgaagaggaggtttgtgggggcagacgtgcataacgttggaaggcagctccactgcctgggaggagatgtctgaggccagggcagaagcctcctccaagccaatatactgctgaagtcagaaaatccagtggaggtaaaggactccagcttcccaggacagagggagagcaggacggcgctttcctccaagagctgaagtggcttatcatcattgtcatcaccttcacctatcaagcagcctggagcttatcgactgtctaggaaaacatcacgagcacattctaggggcaccccacccccgggcacagcacaggaggccaagccaggctggagctgaagagcacaggaaagtcaccgctgaccctgcactcggggagtgcaggtggggcttggtgtgcttggagcccactgctcttcatcctcctccaccatggcttccgtggcagcatctccctccccatcagccccccttatggctcagacattgaaataggcaaaggctccctaagtggaagagaagaggggacctgcagagcacccccagatcaaggctgccctcaggacacaagtggcccatagaccactccctacttccaaacagggtccctgcagggcccagcagagaccccatccttagtttttattgacacattcctctcccacctttactctgcacccaggagcaaacaccttccagattctcagtgcagttaagaaccacgctcccagcagacgatggcatgactgtccttagcccagatgctggaaatttgctttgcacccagaacttgagactgggttctagaggtggtaattctcacaaaggagacaacttaccacaaattttgcattatggtttttgcttccacatggggaaaaggaagtgtgacaatatggaaaggaccaggttacttgcacaaggagagtgaactgtgcttttgggttttccttgtttaggttattttgaaaaaggaaaagtgggagttacacaaacacacatagcaacgttctgtgaatacaatcttgaccaaatagtgaagtcagggtgatccaaacataaagggcacatctctgcccgctccacacactcactgcatctcctctggacacttgaagttcgcctgaaccaatcggccaaggagggctctgcacttctcagggacattttcctcagtcccgtcaattacatttggacttcagtgcctctcagaatggcaggagctcgttggggtgggctctgtgtgtttttaccacggctttcccctatctcagcttttctaacggctgactctggagcagcctgatccagagagagaaagagaaatgtgtgatgcggtattaacctgcgcctcattggtgcgtcttggggctctacaggctgcctctgcaggagaaatccacccagtcatccttctgagaggtggaactaaatcgctgttttcagttgtatttaaaataatgtttaaagcaaatgaacaaaaaaagcaaaggttttgtgtttattaatatttaagggtgtgtggaggagacagcccaacagctgaatcaggattaagtgatttttgtgatacatcaatccacacacacacaagtgctttctcagtctctctctctttcttctctctttccctttctcacacacaacccccacaatcttccctggccagttcctggggggaccaaaagggagccctaaggaaggctttctggggaacagagggctctgtggcctctgccacactgactaaatgcacaacatgcccaagcaacaacaaaatcaaacccaatgtgctggctcatacaacttcacccagtaaaaccaggcagagagggaaacaacaatgcatcagcctgggagttcacagttctaatggaagtgccaaattcaaaaatgacttccctagaaaaagagcaattgcctcttccctaacaggagcttctatggcttgggtatcagcctttgcaggggaaaaatgtcaagtcatttctcattatcaggtttctccttaataacacatgaccacagacagctggccaataatccaaaactgaatttgcccaagtgtgtgaacagaaaccagtatgcaaagatatgacactgctttgaaaatgcattttaattttaaagaataaaagcataaagaataaacgaataaaagagtagtgcatgcatacttattctcattggaaagtgccagttacgaccccacagccacaagccataaggttatgaggatcagtagtctggtttgtcttgacctgccctctacacacctacacacacacacacacacacacacacgccccaccctcccctccacagggacctcgcaggaaatcacgtggggctcccttacaccagggattgcagtcctggggagggtggtgtgccatctcagggcagagccccccaccaaaaccactgaggggaaaaccagtcccaagccccactcccgaccggccctctccccacttttctctttgctcctcaaagacctgtcttgggagggtgactacctgagcgctgctgggaggagtggaggtgagtgaggacggttccaagccaggctgagaagggcgccgaccagtggaactgcagccaaggggcaaaaggtgtccggaagacagcgattatggggtttccccatcccatcacagccttttgggggctggggtgagggattctttcctctcttcttcaggcaacccgtccaatccccccatgttccctgtggactgcagcaccttttccgcagccgagccccctaaggtgtccactcatgtctgcagacggtcccagaaagagaccatcggaagccattgggaatggactccaggtcagggctgggcacagcctcacagggcagggctgggctaatccccgctggctgaggaaggggagaaggaaattcccgcaggctgcaggggatgggtgcaagccaacagaacacaaggcgctttgtttgctccaggtaactgctcagttctcgctcacaaagtgcagatgcatccgctaccctcactccactcccaacaccagagttgactctgagagcagcggtgcccagacctggccactgcgggcaatcagtgccgttcccatccagccatccaacgacagtcactgtggacccatctccaccctccctagaataagcaaaagcatctaaaatttggggtatccctttcccccacctgcccaaatcctcactctgaggagccaggtgactgcactcccctcttttagcatcaataacagaggttaaagacactttaaggtgagctaagtgtaggcagtctttctcccccaccctaaaggccctcctcaaaaagccctcaggaagcctgcgtctgtgctaagcgcagctggggtacagctccccaatccctgaccctctccacacctcagagcctaaacttcgcttctaaagaattctgggttgaatttacttctatagaagtcaggtctgtgatgtgtatattttatctttatatctatttcattttatttgacttcccaggatttttttttcttccccctcaagaattgctctttaaacataagggggttttgagaggaacctcgggccggtccctcaggctgttaggaaagtctgcattttgcagagctgctctccccgggaggagatgaacaatgagctaattacatttttatctttctaatgagctgaggatttgtgtaaatgagaaaagcagggggtacgctagagggagggagaaaagactttccacccccagccctccgagggcagagctggtacctggaaggggtggagaaacagaagtccccacggttcctaaactttctcagccagttttgcagcaatcccaaggctacttgactgaatgaccagtgaaggaaagggcttggttttattttttaaatctttgtcgaacctatgaaaataaacaaaagctgctccaagcattctctcggcctttctgaactttctacgctttgggtttttgttttttcctcccgtctcagaggttaaaaacttcgatagggactcggagtcctcctagaggagagggaagctcccctgttatttaaagcgcaaggctttgtttcaggtatgggaaaggcgaagttggatcccaggaagagcggctccggggaccacagcgagtccctgcgaggccaaggcgcagagctgccgctcccgggccagccccgccgtgcacctgggtcgcgaggggcgctgagcgatacctgggacagaccagacgcgcttaggaatcacgtgcacagcatgcgagcaacctcgggccctcagtccccagcaccgggacccagcggcgggcgggcgtagggtggcgcgggttctcctgcagctccggccgggggatggagggggcggctcgcgcacgtgggaggaggcagccttaccttggggcttggaggcttcggtggcattgggcggcgtcatggcgatgcagacgtccccctcggggaacttgtcacacttaagcatctcgggccagtagaagccgaagaactgcatgaccggctcgcacgagtcgcgcacggcctcgcagagccagcgacacgggtagatgggccggtccaggcagacgggcgcgaagagcgagcagaggaagacctgggtgccggcgtggcagttcttgttgagcaggggcacccagctgctggcctgctgcttcacctccgccatggtctcgtgctccagcaggttgggcagcaccatcttcttgtagcccacgttgtggcacagccgcaggtccgcggggatgtccacgcactgaggtggcttggtgtagaagcgcccgctctggtacgggccgatgtccgactggaagctcacgtagtcgtactcgctggccgagcccacggccagaagcgccgcgcccagcgccagcagcacgcccagggctgccccgcggcggcccccctcgctgcgcccgatgcccatgccggctctgcgccctgttctccgcgacgtcggggctgcctccgccgcctccccgcgcgcgtcctgccgcaaacttccagggacctccggggacaaaaggcgcagtccccagcgttgcccggctccgcggccgcaagctgctgcccggtccccccggccagtggcggccctcggcctgcggtcggaggcggcgcgggcggggaggcggcgctgcgggctgggtgcgccccggctcccggaggtgcggcgagcaggaaggcgcggggcggcgggcgcgcggcactgactccggaggctgcagggctggagtgcgcggggctcctacggccgagccctcggagccgccccgcgcagccaatcagctcccggcggggcgagccgcactcgttaccacgtccgtcaccggcgcgggagccaatcgcctccctcgcgagcgggttcggtttactagaaccagacgcggctcaacaccccttaaaaaacaaaaccaaaaatacataaataaaagggggaggaggaaagagacaaggggagaaaaagaaggggaatggatcacggcgtggggtggagagagaccagggcggacgctgtaattaactcg

SEQ ID NO: 12024 - DNA, 6000 bp, Homo sapiens
ctgtctatcgttgatgggcatttgggttgattccatgtctttgttattgtgactagtgatcctcacttctttttttttttttttttaaagacggagtctcactctgtcgccaggctggagtgcaattgtgtgatcttggctcactgcaatctctgcctcccaggttcaagtcattcccctgcctcagcctcccgagtagctgggactacatgcatgcaccaccacacccagctaatttttgtattttagtagagacggggtttcaccatgttggccaggatggtctcgatatcctgacctcatgatccacctgcctcagcctcccaaagtgctgggattacaggtgtgagccaccgcgcccggccgatcctcacttctaatagagtaagtgcaaactccttatcacatacagcattctagcccctcctgaaccttctatgatttcctctactgcactccatcacctggtcaaatcaatatagggagctacgagacagggaattaaccaagaaagggtgcctcccttttcactgtctcttcctgcaaccagccagacagccttttctctgacttatttgggcttaaaagctttattctgggtaccttacctagtcccacaaggtacattcttcacctcatctgtctggagtgtggtctggaaacagaggaaacataaagtgctagaagatgggcagtgacaaagtaacttacttttcagaatcctaaatgcctttgtcctggaataactgtttgggttgagcatggccttcattaaacatgattaccccacctaatcctccttcctcacagggttgctaagccaagtaaaggcccgtgccccagcctcactataagtgaaccaccacatcaacaagctgagtaataatggtttagtgaagatgacactggattgggcatcttaagacttgtgcttgcttctacctcttctatttatgttaggcaccgctttatgttcgaaggcccccagtggatgcttgaaaccggggagagtaccaaaccctataacacatacctatgataaagtttaatttataaattaggtacagtaagtgatcaacaataataaaatagaacaattataacaatatactgtcataaaagttatttgaaggtggtctctctctctctctctcaaaatatcttattgtactgtagtcacctgttttcagaccatggtttattgtgggtaactgagcctgtggaaagtgaaatagtggataagggggagggctgttgtactagttttgaaacagcagattacctatttaacctgtctcagaccctagcacatgctcagcccattctcaggattactacaagactcaaatgagacaatgtacctgaatgcagtttgaaagccacaaagcctggtaaacagcacatgaaacttacagggaaaatgcctagcaggtatcccaagacattctcctgggtcagtgtaaagtgtaaaatcttgttattcttcttagctggacatacttcagagatggcaagtccaacttagccaggctttagatctgccacaactaacctcactcctattttagatgtcacctcccctcacttagtttaactcctccccactcactgcaaaaattatgttcgtatttctgaattcaaataagaatcagcaaaattactatgttttctttccatttaacatggtagcctgtgatttaaaacatacacacataaaccctgacttttctttccatatactcagaacaggttcttctctggctttatcttgaaggaataatccccagcctcattttatatatatatagtgtatgtgtgtatatatatatatattatatatatataatatgtatatattatccttatatcattctctagaatggcattttactcatccaatggctaaataatttcaaatcatgcactagttaacagcccaagtttgcagtcgtccagccataccacagaggccaagcatacctgcacagacttatatgatgtgatgaaagggagcatgagatggaaaccagggccgctggtcgaagtcagcagggcaccgcctctgcagaggagggggaagagagaggcagcttcagtttggcaagaaggctctgttagatcaatatcatgagggtcaactttcccttcagccctataaacatataatagagagtgacatgtgctgcagccatggctacagatccctttcttcctctcagctagatcctaatattctaggaagcctgatggtaaaacataaaactattgttcatgcttttgcaaggagaaaaataggcacataggctaaatggaataaagacagcagaacccactagtgcagtcccagcgctttgcggggctgaggtgagaggattgcatgaactcaggagtttgagaccaacctgtctcaaatagtgagaccctgtctctacaaaaaaagaaaaggaaaaaaattagctgagtgtggtggttgtatgcctatagtcccagctacttgggaggctgagatgtaagaattgcttgagcctgggaggttgaggatgtagtgagacataattgtgccactgcactccagcttgggcaacaaagtgagactctgtctaaaaaaaaaaaagaaaaagacagcagaatccatgggtatacttagataagagaaagtctggccaggcgcggtggctcacgcctgtgatctttgggaggctgaggtgagtggattattaggtcaggagttcaagaccagcctggccaacatggtgaaacctcgtctctactaaaaatacaaaaattagccaggcgtggtggcaggcacctgtaatcccagctacttaggaggctgaggcagagaattgcttgaacctgggaggcggaggttgcagtgaaccaagatctcaccactgcactccagcctgggcaacacagcgagactgtctcaaaaaaaaaaaagataagaagtctgttttactttgtcatatctgttgggcttgtggcaatccattagggcagttaagtccagtaatatggttatcaactacctgcactaatgctggagtccaatgacatgaccaaccaaaagaataatttgaagtactttataaataattgaaatatatgttttggcaatagagttacctttctaatcaagttatatgtaaatgatgaagttaaaagcctttttggggaacatgtaagcagatgatggggagaaagaattaaaggagagaggaattccaatcagagttttagaacttgctgttagcaatccagaaacaagcatcacaacagcacatataagaagagttcataaagacataaagcaaaacacttggtcatggaggttactaaaaagaaagcaacccaagacttataagtgcttctttgctttatattaggcaaagaattaaaaaaaaaaccaataaaataaacagtgacataatgggttcctttattgtaggaaccactatcctaaggcttgctttgattgacgtaagtcaacctgcaggctctttcatttttcttgaaatgttaatattattttatttttagagacagggtcttgctctgtcacccaggctggagtgcagtggtgtgatcatagctcactgcagcctcaaacttctgggctcaagtgatcctcccacctcagccccccaaataactgggattacaggcacgtgctgccatgctcggctaattttttactttttgtagagatgggctctcactatgttgctcaggctggtctcaatctcctgggctcaggtgatcctcccatctaagcctcctgagtagctaggactacgtgtgtgtgacaccacagccggccaattaaaattttattttttattttatttttttagagatagggtctcactatgtgacccaggctggctgaaatgttaattttaaaagagcatcccaaattagcagagtaggctaccttctcaagttgccatcaagaactggtactcagctggcttttgtaaaggtaacctagcagtgtagagctaagactgccagagggatgtagagctaagactgccagagggatgtagagctaagactgccagaggaatgtaggagaaaacagtattttagggatgatcaatgaggagcaccagtttcctttagattttgtctctaaatctatatacacatttattaatcaccacccatggcatcatcttggactactaagtgaagttctaaatttacatatatatgtgtgtgtgtgtattctctttcccgtggttactgacataaaaagctccatctgaaaaggctcccctattcaaggaaatataaatagagatgttcagcagaatctgctaggaaagcaatgaccaggaaagggagctatttaacaggaagttgccggcttctccctgtctctgccttacctgtaatataccccaatatgtccctcttctatcttgtgcacagctgagaagagagatgcacaaaagaaactggaagccacagccacaactgctcccaactgagccatcagtgagcctttatcctagggaaaagacacgggaaaatgtgtgtggtccaacgtgcaggagaaaaggccacaacagcgagaggacctcaccaagctgagctccctgcgagtgactcatatccagcctggtgtcgtgtgaacacaaggctagatctacaactcgcttcctcctcgttctcagtcaacgttcccctttctttaactgtaaaattagagcccccaccgcactgaggaagcactggctccggatacagccgttgctcaagggagaacccgtgccagctgggtagggttcagaacacagccttgtcttcctgtgaacacgaatgtgctgtcactgaacctttcctaccagtagtagggaagagaggcagctgcagtactttggcccaaattacagaggatgccaaatgacaggcagttgtggctatgtaattctggtcagagtctcccactcctaattgcctgcagtttcaaaggaaaccattatttactcctttcagatgctggagtggcagagccagcaggcgagcagagtttcaaggtaggattcgttggcctcgcatccaccttcccagttattcctttggccctaaacaggacagggctctgaacaagcctgaagccacactcccccccatatactttggcactttgcacctgacagatccccaagcccgtggtcagagagaaaggcaatgtcccaaactgcgagcctctaggctcctaggtccaaccgcgttcaggcaccaggacgcggaggagtgggatcctgaacgctgaatgatctggaactatggtgactgactgcaaagttcagctgtgcgtgcgtgggcccgtgagcgcagggcgtggattctgcctcccaggtctaacgtaaccggggcgcggacatctgcgaggcgcttattttaccgtggcggcctccggctaccgatctgcagttgcgtcctttcctgccagtgcccttccctccccgaggtcactcgcgccccttccccgccccgttccgagagagggtcaagcgccctggtctggggctgcggctccaatagcctccgctcggtccccctgcggctcgcaaggagaggacgcgacagaaaagggtttctgtctctctccaggagcgggccggctgagggagagaagctgctgggactgaggttcccgaaagtgacgggtcagccccgaccctgagcggcagctaggcccagcgcgcgcacgaaggggcgggggccgcgtaccaggctgtccctgcaggcgctccgtactcgtccgagcccacgagcaagaaaaccgtcacacccctcagcacgcgacttccttccgggccgtcgcttcgatgacgccatcaattcacgcgagaagaccacacccccgccccgcgctcgctctgcgccccgcccctcgcgctcccagcggtcaatggccgtagctggccgccagggatcgcccgcgacttggtcggtgcggtcctggacctcggtcttgggtat

SEQ ID NO: 12025 - DNA, 6000 bp, Homo sapiens; identical to SEQ ID NO: 3473

SEQ ID NO: 12026 - DNA, 6000 bp, Homo sapiens; identical to SEQ ID NO: 3773

SEQ ID NO: 12027 - DNA, 6000 bp, Homo sapiens
caaatgattaaacttaacgtcactaatgaacagcaaggtgcatgtaatataaaacacccagcattacctctgacatagtcagaccaaaaatgttttgtctgaatttgatcaagcctctagactgatcttctagtatacaagaaatatagggaatggaggaacaaggtaagtcacaccatgaggaaatgatcagatacatctagaatgtggaacattagccttgccccttcaaaaagtctatgccatggaaaaagaaaaaagttgaggcacagttctggattatagaaggctaaagtggctaacagccaaatgcaatgcatgaatgaatcttgattagttcctcatttaaaaaattattattagcctgggaaacatgatgaaactctatctccacaaaaaattagctgggcacggtggcacaggtctctagtcccagctacttgagaggctgaggtgggaggattgcttgaatctgggaggcagaagttgcagtgagctgagattgtgccactgcactccagcctgggtgaaagaaagaccctgtctcaatcaatcaatcagtataaaagactttcagaggacaattgaggaaatttgaatatggcctgaatatttaatgatattagggaatgattatgaacttccttaggatgttgatgttccttcagttatgtaaaagaataccctcatttttagaagatgctctggcagtgtctgcaattacttttagaaggcttagcctcccatctcccaaaatatatttctatacatatatacactcacacacaggttgataaagcaagcatgacaaaataaacaatcattgggtctgtgtcgtgggtatactggtgcttattatactattgtttcaacttttctgtatgtttaaaattttgtcttaataaatgttagaaaacagagaggcaagatggtaagcaagctattcttctctacccagaaaggaaatttctttctcttgcatgtagtgataaaaataagttataaaactctttttctgacccattgaaccagttagtggggattactgaggactcaaacacccctctataacagcttttggggacagtaaacatactgaggacaaagcatagccctcttatattggatatcatttacaccgtcctttgaaaatcttactattcccaaatcaagaatcctatcagcacattgctaataaattgctaaatatagctagtatttgcttatttatcattttaatttttttaagagatggggtctcactatgtttcccaggctggtctcaagtccctgggttcaagcaatcctcctgcctcagcctcccgagtagctgggactacaggcacacaccaccacacccagcttccatttcagttttttcagtaaagtaaaatcctttagcttgtttaggttgcactccagtacagaaatagaaaaacaaaaatctcatctggtatgacagccattgatccttcttatgggttcaaatccatcccttagaagttcagtttttaagaaccagctactacagggaggtgctaacaacctcaaatttctaggatgtaaattttcataccctctgcaactgctgcctggcctcagatgagccccctgtacttaactcaagcacccctgtccactgatgctgacttatgcaagtcaacacaccaaatcccacagccacggcttttcagaaaaataggaatggattcttctcccaagttcatacaattgagggtttttgacagcaataaaaatagctttggataaaccttataacctgtggtgttgcttcttcataaaggtaagccagtcatttgacattattcaaatttttgttgttgtttttagatagtggtgcaggtgacgtataagaaaaacaggtatgaatcccagcactttgggagaccaaggagggtggatcacctgaggtcaagagttcaagaccagcctgacaaacatggtgaaaccccatctctacaaaaattagccaggcatgatgggtacctgtgatcccagctactcgggggctgaggcagaagaatcacttgaacccaggaggcggaggttgcagtgagctgagatcatgccattgcactccagcctgggtgacagagcaagactccatcttaaaaagaaaaaaaaaaaaaagaaaagaaacacaggtatgaaggcaataaagcatgatgtatgtagtctggccacgccaccatccctgctgctctggacagaaatcagaagcagcagcagatagaagcagaaaatcatcaaaactttacacatgaggtactgctattccttcctcaacaagtgtattagaatataaacttgacaaattggagcttttccataggtaggtagcaacagagagaagcatcaccccacagtttaaagtttatgttacttgggaaaagacaaacatgaagtatgagtctgaaaattagtttcaagaactctcaactaattgattctctcccaaactgaaaacacactacagcaaggctaaaacgtaaaataaagtgaactttaatctataatatacatgaaaatgtgaaagaacatgtttccttttgatttttgtaaggaaagtaagtttcagtgtgagtgaaacatatctgagagaacaggaaagtcttacctaggtacaaggaggagttttctttcttgacattgtcatctaagtaggttggtcccagggtataaataggtgtggagcccattccaatgagaatctgcgcgcaaatgaataaagccacgtagacccagtgattatttcctcccgagtccttcggacaggccggaggctccaaagtggcggtggagttgccaccctgacacaggccgtcgttgggggccgaggcgttcaactcttggatctggtaggggggcgagatgaagtgaggtaaggcgaagagggctgccccgaaggcgatgaggagtccacccacggccagccacaggggccgccgaccccggccgccgaagtagctgacgaacaccaccaccaccaggttcccgatgtcaaagcagctgaccagcagccccgactcggaactcttcagactgtagcgcctttcaatggtggtaattacgctgctcaggtacccagagaccattaacgcctggatgaaggtcagaaagcacatgcacaccaggaagcaacgggaatccgtgaggaccacgtagaggcaccttctctcctggagcatggccaaggcggaggacaccgagaaggttttgctgaggtccaccctgtggttacagtccccgagccccgccgaagtggacggggcagagggactgggggccaacgggttcgggccttgcttcaactcctggtggcccgaagaatccacacagccaaaggccgggttggcgtctccactagtgggactgaggcttggccggcaggaggcgctgctgaggaccggtaaactcttagacctgagggtctccggctcgcacctctcttggacagcttctgcagtggccggcgcctccagctgctctcccgccccgggctgcagtccagtgccttcgtccatggcgcttagaattcagatttgatagctgatggcacccaagcactccggcacgtttcatccaccggcacgaggggccgaagccgggcccagtcagtcttgcccacctgggactggggctgggggcgcagggccgcgcagcagggcatcctcaccagctgcgaggcgcccagtgcatcctgatcacagacacggcttcaaggctccgcagccgcgtgccacagggggcaggggtccgcgcggtactgcgatgagccctactcggcgtccctctccgggcggtagcttgaggcaggcgcctcgcgcgtcccgggctcatcccctccgccgccgccgccgccgccgccgctgggcccgcggccaggagcgagtgcaccctgcgccgggggtgggggggcacttagcgctgctgtccgtacagcatcccacctcgctgcgccaggggtaccgggtgttcgccgcctgggctcgcggcaccctcgggagtgaagctgccgacctgcaaagcagaaagagggcggtcagcgaagagcggctgcggcttggggctagcgtcccagcgccccggggaccagggttaggtgaccccgaaccgtccctagagggacggaggagctagtcaggagcggagccccggaggactaggcagcagccggctgcagtctccagtcccggaacaataagcagcaggcggtcggcggagactctccctcattgtctgccgcggacctgcccccgtcccgccccttctgccttaaacattgcgtttgcttttatatgttaataattatcaacctggcagctctgactcagaggcagtgtcttttaatcgagtgaactaactgcagcctttccgtactcctactccattactcaaaatagaaaatgcccaaaagaacaaaggaaactttttcacagacacacaatgtattccctgtcccaatttttctaaaaggaaaaaagaaggtgggggtaaactacgtgtgtagaaatgtgtgtgcacactggtgtgcgttggcacgtgtgcgcgactagatttgaatctgtctgctccaccagagacacacattcaaagccgaaggcagcagcaaaaaggtcaacatgcttgcctctttattcccaacaccaaaaataaccccctgaccgaaagaactcttcaattacaaataccaggggcattcgaggctgtggcccgcactaagtcccagagcgcggtatcaaacgaaaccgaaaatccgtctgctttgccgagagctagggaagccacaaccaaacaaagagatcccggcacgctgtcagagagcgcgcgaggagcccacggagccggctgggcgcacgcgggccggcggggaggtgtgctattgactgagcgcaccccgctagcgtgggcctggggagcgtgtgcgcgtgcgcggccacacacacacacacacacacacacacacacacacacacacaccggcgtactggaacctctctcgcgatcccgcacccagcttgaattcagcaagaatcgaaaacaggtgtgcccccgtggtaagaccccgcccctaatcttggggacccccactccactcctccagcctggggcaaggacggggggcggaatatgcaccaggtgggagacagccgagcttcactacactgggtttcattttgcagcgcgcctttgtgatgctgctgagaaaagaaaggaggaagggcaagggagaaaggcagagaggctgggcggccaagggtggccgctccggcatctccctcggctgtgctgggccaaacccgctcccagattcccggcctgccagccactcacaatcccgggcttccccgccgctgccttacccaggcgccttcccggggaaccccaccagccgctgcgtgaggagccggggaatcccagcaaactctcgccgctcgcggggggcgtccgaaccccctgcttaggcgagcgccctcacagcatcgcagactcggatggacacgcggatcccggcagggagctcttggagcaggcgtggaatcccagggacaccccctgcgcgcacatcacatacacgcacatcctacacacacacacacacacacacacacacacacacacacacacacagagcccgtgggaagacaagaccgccggcgacagcccgccgcgctgcccgggcgctcaagccgccgctactcactagcgagtctgtcagtctgtctgcctggctgagtagagcggcgggaggggggcactgagctacgggaatagttgggagccgcgtgaggaggcagcctccgtccagccgaagagaaatcagtgaatgagactgtgactcaggctgaactcttccccccacccctcgcctgtcacccaagcctctcctccgctccaaacagacacacgcgcacagagacgcgcccggagaggagcagccgagggcgcaggcgcgagggcagccacccagcccagccc

SEQ ID NO: 12028 - DNA, 6000 bp, Homo sapiens
gagaccacccctgcccccgccctgacgttctcgttagccacataaacactttattctcctctttcgtataaaatcctgaggggtctgggagctagagctaggcaggttctttctcctcctcagcatgctggagcacaggcgggcacccagaggaggaactgcacctgctcaggaaatagccggaaggggaggtgggggaagggggagccgtgtggcccactcgctgctcagcatgtgattagccgctgcagagggcaaggtggactccaggaggtgccctcgtggctgggaaggcagtgtgtgtccccacactggcagagggactgtctgtgaacaatgacagcactgcagcagggagcccactcgtgactcaggttgtgcagggtcagggcccccggctgagaggcaaaaggacaacaggagggcagctggagccaccagtgggcagatggcagggcccgcgtaccaggctaaggagcgtggacttcatcctgagggcaccaccgagggttttaggcaggcgggtagtgcaacggatgtgattgatgtttcagaaacacaccgctagggtcctggtggagggcggggcaggcgaggaggccaggtgaggcaggggaggttgggagggagagggaagcggggcagcccctgctctggcctggagataatgcaggagcaggtttcaggaaggatgagcttggctctgggcaccccacaactgcggtgcccgcggacatcagggtggtgctggcttcgtacacagaggtgctaaggggactgactgggcagtggggaggggccttgagagatcctcaggccacgctgcatgcagagcctcgaggctgcagtgggaatatccaagtccaaagctgcctctgggcctagagccgcggggtgtgagagctcagcagggctcagaccagccaggtcccaggcaatggagggaccccctgcaggagcagcaggcgtcacagggcaggaaacgcactgcaggctggggctgagggctccaaaggaccgggcctgggcaggccaaggggcccaaatggctgagccctcagtctctgtccagctcttggacgggatctccagcctgtgtttctcatggggaggctggagagaggcaggcctgggtggaatatcagggtgcccacacagatggactgcacagagctggggaggcccaaggagcgcccaaggagcatggcaggctgccctggggcaggccaatgacctgtgccgctggcccaggcgacagaagagtgaggcggctataccgtgccatctccacggagcacctggtagacacagccaggccacttaccattggggtaccccagcacaggcttaactcactctgggcaccccagggtctctgtccatcagttgggaacccaacacacaccttatgatgtagctgtgtgtgggcagaggcttggcactgtattaatctccactattcatttctggtcctgtgtctccatcagcagggagggcctggagcccctcccaacttcatgttgaaagtggcagggagaagagtgaccaggggaaggcagagagcaaatcccatttattggaatttcactgacaacaaattgagaggaaggcttccccctcccctgaaacatgccatcctctctgccctcagggctcagcacagggataagacccccactccgcatgtccccagagggcagcactccaggggggtgggggggaggggaggggtgctctacgccaggctggggagctgggacaggagggaagacgtgcaccctcacctcttggctcaatccctctccccgggacctggtgctgcccccagtccctggggtgggctggcagacagggctcatgcaacaatgagtagacaggaggtggcacggaaacgtggccttggtgccccttggcgggggcgggaggactaaaggggccatgctgtggccacagcgggtccaaatggaagtatctgcagtgtacatacaggagggttggagagaggcatccttttccctaggctgtgcctggggacaagagagaggggaagtacagctggcactgccgtgccaggggcagggtccaggccagccgtgccacctgagcgggcacagcgagctggagctcggctactccttggcgcggccaatgatggtgaggatgtacaggaagatgttgatgatgtctgtgtacaggttcagcgcagcaaacacatactcttctgggctcagggacagctgcttgttccccagtagcagctgggtgtccactgcgaggaactggaggtgacagcacagtggtgttgagggacaagcctgcctgcccagcatcccgcccccggccaaggtcacccctcactcacgcaggtgaagagcagagcgcccagtgaggcgtacacgatctccaggatgcggttccggatgaagatgcagagaatggcgaagatgaagagcaccaccatgctcaccaggagcacgcccatgcatgaggtgaagtcgtagcgggtctgcaggtgggagaggaacgggccatggggctgggcctgggaaagctgctcagcccctgcggccacagcccagccacgggaggcccctcacctgcatggagaagatgacgacggtgaagcagacggctgtggtgatgcccacggccatgatgactgcctcggtgttgtagaagctggcgatcatccccaccatgtacgacaggctggcggtcaggaccgactgcagttgggagacacaggctgaccttgggtgtgtgcccccatgccacccctgccggcccctgcctcatgagcacaaggagaaccacggtgaccaggcccggaagagtgggcgtgtgggactgcatggccggacccaggcacagaggctcaggtttgggggttaccagtgcaacaaggttccaggggtgctttcgccggaagtccccacaacagctgaggacgatgagagagatgaagaagacagcataggagacatagtaggtccagacattctcccggacaaagcccttcacctccgcaacaaaagtgaacacagacaccgtggacagggtcaccgacagctgcaaggtcagcactaggaacacctggggaaggagccgctcagagtcatccgctgggagccacagcccccaccgccttggagatgcccctacccaccttgcggatgaaggcctgtcggatgctcttgtcatcccagttggtggcagggaagtcctggttgtcatagtaggatgggggaccctcctcctggtagtttccatgctggggtgctgagaagcagacaggctgggtcagcgccactcacaagcacctccccctgccctcccggccaccccacccctcccttcctgagactcacagtcagggtcttgtcctgggaagacctgtggctgtccataggggttgggggggaaggggctctggggatatggcccctgggggtagcccccttgggggtaggggccctgtgggtagccctcttgtgggtaggggccctgtgggtagcccccttgggggtagggaccctgtgggtagcccccttgggggtaggggctggggccatgggggtaccctggctgaccgtagggggagggctggaaagggggctgtgggtaaggggccccagggtagggaggctgagcataggggggcatgggtggctggggcccccccggatatccagggttggggggaggatagttgtccccagacaccaaaaaactcttttcatgggacatggcctcgggttccgcggtccgcccctagagaagacagacaaggaacagtggaacagttggcttgacgacagcgtcgggacccagccctgcgcaactccacctgcttctgggaacccagggggaagcaagggaagaccgtgacctttgccccgggctgtggggagccccggagcctgggcccggagaagcgcgtgaggaccggacgggcggcgccgtggggccttcccagggctctaggccgcctttagggtgggggaggggccgggcgaggggacgaccgccagcctcgggatttggggcttgggtcgtttctcacaagcaaccggaggcctgcgccgctgccggcgtctcccgggtgggagctcagcgcggaggctggggtctcggccggggacgtgtggggtgtgcccggaccctcccctccgcatcccgccccttaagcagctttaaggggccggagccggcggctatttctatcccaggaaatccccgggccatctgtgaccaacaaaggcccgagcccccccacccccgcgagcccaacaacagggcccaacggcccctggctccggggtggggggatcgggcctggatcggctgccggtgcctgccagtggggtacgccgggaacagcggggtgcgggggtgtgtgggggatggaagcgaccacggggcgtgcggggaacaaagcgggcgtggggcgaggcgggtaggggctgcggccgtggcactggcaccgagagcggatgggccctccgcgggccgggggcgcacagggtcacgggtccagcagtcgccgcagcgcgccgccccctccctccggctccaggccgccgcggctccccgcccccaccaccgccgccacctctggccgcgagctgccgcgcgccccggccggaccaacttactgacccgaggcggccacgctcggatgcgcaagatccgcgtgggggcgggggcgggggcggcaggccgcgcggcgcagcgggtcagaggcgctcctgggctcgggccggggactcaccggtggccgggcgccgcaggccggtacgcacggtgtccgctgcgcggccgcgcggtgatggccgatgcgcccgcacccgcacccgctcggcggccgctcagctgggcctgcgcctgcggctcggaagacgcagcggggccttgtgacggggcggggcagggggcggggccgggcgagcttcggggtgggaggggcaggtgggcggggcttccgcggacccctcccgctgcgccgccttgcgtgttcctcttcgctccggccagaggcccgcctctcactgtctgccgaggggtggggtcgggcggtgggcgctgaagacccctggaggcagaagtctggtctggccaatttgactggccgttcggtagttaagaaatttattcctaaatgcgggatttgctgaagctgcccgggactgaccgtccgttctcggccttaaaacccgacgttcacttcttttcatccagatctctcccaaatcaagaagcctaatcctttagttcccaaatcgaggcctcgtggtttaattgccccatttgctctgtcagcccaaactctgccaggcctgctactagagacccttttttatttttttaattcttgtggatacatagtaggtgtatatttacgggctacatgggatgttttgatacaggcatgccatggataataatcacatcaaggtaaatggggtatccatcagctcaggcattttgtccttcgtgttacaaacaatccagttatactcttggagttgttttaaaatgtacaattattcttgaccacagtcaccctttgtactaacaaatacgatgtcttgttttcacactagagaccctgaacgctcgcttgtctgcctaacgtcctcacaagctgcgaggggctgaggcttggggatgcagcaggactggaggccaggccacctccctgcttagctcccaagtcctcttgggggagcagtgactgacacaggcagggtacatcctgctgccagccttcccacccggggcccagaccccacctgccctcccgcccttggagggccggcctctcccaggccgctctgagtcctgcacctatggtgcgctggcgcagtgtttagcagccggacctagtgaggggaagcctggggtgcgtgttttgcacatgcgcgtggtgtgaatactccaccggggctggtttcaagttacccccagctggacaaccagtccacagaaattcccgaaact

SEQ ID NO: 12029 - DNA, 6000 bp, Homo sapiens
ggagcccaggaaacctttccttgtggagggacaaggaacagtgagttgcaggctttgctcctactcaggggaccaccctctggggacagtgggggacgtcaggtccggctccattcctgccttccggtggagggtggagtctcctccaaattcctcttgggcagggtttcgcgcttcagagcctctggccacttgctgtgcagctggtggtggtgggcatcctcgccccagcaggccctgcgtggtgggctatcctgcctcccaggggcccagctttggccctggactcagccccgggaaactgtaagtgagcagtgctcaaggcctcggccctgaggcacctttctgccattatgattctgacccctgccccagttcctactgggatgggcaggaagctcacagagacttcaaaaggcagcggattcctcactcaggcttgtgcaccttgctcctctgcggcctgggggagtgtggctcatgtgtggcacagagcagagcctccatggatgcctttgatcgctggcctatgggagggaagatagaagaagctgggaggtggctccaccaagcctgcagcccagggtggacaggagagggcaggccccaagcaccggtgctgatgggggtggtggcaaagcgatgaggggaagggggcaagcatgagaccaggagccctgttgcccacagccatgccaccaaaccacccaccttgtcccatccttgtcctcatcctccctcagaagctttcttcttttaccaggcgacttctgaagctcacactcaaccttcagcccccaccccctagaaccctcagtacctgcaacccctaaagggaagcagccgggtcagctgggcaggggcccagcctcaggcggcagcatcctggaaggctggagctggcagtggcctctgccctcagagttgggtggtcctgagcccccctgggagctggcctgccccctgatgtttgatggggcccagactagaggctttccgggtcacaggggctccttcctcctctgatggtcctgccaagacaggagggagcagaagtggggaggaagaccaggccttcaaaggcccgtgtgcaggccaactcaaggacaatgagaaagggcctccgcagagcggaaccgtcgcagacagagcttgggcagcaggaacagacccaccatccccagtgcctgcacgctccctgtagctgcaggggcccttctgcagaagtggggcctcttgcctgggagaatgggccttgctgccaggcccgtcatactgatcacagttcggtgtcctgcctccctggggtggcggcccacgaggtgaagaaagccaggctcctaccttggcgtggtctctcccagcactttcttccagatccttgctcccaggctcaggggctcctctcagttagttcctttgcagctccagctctttttgtgggagcccaagaaccacccagcccaggatagaccatggtcagtgctgaggtcctgctccctgcagatgccaacacatacaggcccaggctgctcagggctaggggcagtgtgccagcagcccagggagaagacagctgtagccaagtctgcctgaagaaacagtttggggcctttgggggtctgattgcaggaggagctgtcactgagagggtggaggctcaggggagtggggtaatgctcaggccaaacggtcccgatgggctaaaaccttaaactctgtctcttctgagtccccctcactgagtaccccggtgcctgcacaccaaccccctggtgtaaatccctagcaggatactcctgggaagctagcaggcaaacagtcactccagggctaagggtggacagggggctcggcacatcgcagccccatccgactaaccctcagcccttgagaggtgctcgtggagcagtggccttgccgggaagaggctcctctactcctctgaccaccgaagctggtagctcgtgtgggcccagagagcccagggcagttccaagaagcaatgtggggtagtctgggctcagagggcatgactgtacaatccgtgagaccagcctgtggtgggtaaggacctgcccagggcctggggagaggcagcctgttaaacaggccaggccatggctctagttcagggaagcatccacacagagagatgtgctcaaagaattaatgccaactcattaaatacaaatgttttattacgcaaaccacatgtaggtcccaggctcaggggcttaccctacagcccccactggtccctggctccaagcctgctccttgcccttgcccaccctggaaagccaggatctcctatggagtgtgtaggtgtccacgagtgtaccggtgtgcgggcctcctgggctgcaggcactcaggcatggtggcagcattgagggaaagacaggtgttggggagcggggtccccacctgcccaggctcaggagtcacaggggtctgcacagtcctttctgctgtggaacacgtgatagatgctggtcggggggaacatagcaacagcgccgagcagagagcccacctggatggccacgccggctgccagcaatgccggccggcccccgccatgcagcagggagctggctgccaccttcacgtaggagaacacgccaagacacagcacccacgacagcacctgagggggacacagcaccagctgagcgtgagatgtgcctgctccagggcaacgcccccccaccccacttcatgtccccctgtgctcaccacgaggaccacccccgccgaggtgcccaccaggggcgggcaggggctcaggactgccagcgccatcaggtagcccccacagaacacgcccagcagagagaggccgcccagccctgccaaggacctgcagtgagcgagcagaatgtcagggctgactgcgccaggacctggctcccagccctgagttccacccgcacaggggctgggggtccttgtgtacctgcacagcacacccatggccaggaagcaggccaggggattggcagcactgcccagcaccacagccaggtggtaggccagacgcccgtagggtaagcaggaaaagctctgcacggcaggcagcacgccattggtcagcgcgttggtggcggccaacaggcccagcaggcaggcactgcgggctgatagaagctgataggccttagggtctggaccaggggtggtgcctgctgcctggcttggtggctcttgcagtggtgaggactcttccacctcttcctctgctcctggggctcccacctggaggcctgatcctaactcccctgtgggtacagatggtggtggcggcaacagcagcagaagaccctggaaggcagcagctgaagcgaccagaagggcagtcagtgcccagaagaaggtgctggcgggaaaacgctcaaggaagtcgagcggggggccaggggtgccgttgatgggggctggcgggcactcgaggcggcccacaccctgcactagggccagcacgcagggcagcagggcactcaggccttgacccaggaagaatgaccgtaagaagcgaggtggcaggtggctcaagaagggcaggaaagtgacattcgaggcacagcatgccagtgccagcacaaaggccagtgctaagaaggccacagaatgcaactgtcctgccactggggccacatggtgccacagagaggccagcagggctgtgcccaccatgcccagcacctgcaccacccggatggggacctgctcgtcctttcctggggccagcctcctccagagggtcaccaccagcagacccaggttccccagagccacaagcacagagacgtaagaggggaggctccaacctgcagggaagggaggaggccatgtcagggtcatgatgcccaagggaggaagagtgccaaagcccaccttcctgggcacacctgcacctcctcccactcaccctctggaagctctctgaccaccacaggtagctccacccagatcccactgaccgcagcccaggagtcttgggcacacctgcacctccctcccactcaccctctggaagctctttgaccaccacaggtagctccacccagatcccattgaccgcagcccaggagcccatgccgaagagagccaccagcaggtgggtcagcaccggacgggcgggcgtgggtgctgccattcagcccaaggctgggcccttccaggtcagggcaaaggtcacagccagttcttttcccacctagggccagacacgctttggctctcctgggaagtgaagacttcttctagcttgaaagaaacagagaaacagataggatgcagagccggagtcagaacagggtgagaccaggggaactgggggagccccgggcaggagcgcagatggggaggattggctaaaacgtacccagcgggaccgccggcaggcagggaagcaggaagccggcccgagtcgctgcggccccaggggaggaggccgaaggagcgagtggagccctcctctccagggagaggcggggctggagtcaacgccaccaccaccccaagccggacgccgggaaagggcgcctaccaggaggagccacgcacaccccagggcttcacggtgcccgcgaccgcaagagccaagtcagatcccaggggagtggccgggacggctctgctcggaggggcgccgccctctcggtaccgtcaggtgggcgactcgggagccgtccggtccctgcgcctcccggtcccgcgcccagtgcgctcccgctccagtgccggcttcccgccacgccgggacaccgccgtccggcccagggacgccacctcagtccggagcgcgcaggacccggcagcagccacgacccgactcacccgtggcggttccgggcccgcccccggcatggcccacgaccggaagtcccgccccggaagctggtcggcgggcgggcgggcgttgagaggaaccggggggttgtcggtctataagcctcgcccgttccgctccctggggcttccccgagcgccgtcggtggtcatggctgccccagcctcccggcaggtccgacgcagagcccgggcagcgccgcggccccgctcggccgaggactggtggtgggaccggctggcgccgaggggctcggggtaccacctgctgcagtccgacagcatgctgctggtgctgtccgaacccggccccgcccggccccgcgcacagcggcgcgcttcccgccgcactccccggcagccgccccggggccccagcgccgcggccaagcccaaggccgggctcaggtccgaggcggcggccgcgcccgcacccgcaccggcacccacgcccacgcccgaggaagggcccgacgcgggctggggagaccgcattcccttggaaatcctggtgcagattttcgggttgttggtggcggcggacggccccatgcccttcctgggcaggtaacgctggtgccgggcccgccgccgagcgtagcggcttgggccagacgtggtccgagcggtggcccgggcgggggcggagggcgaaagcatcggagcgcgcaccgctcagtccgagagcgcagccccttaggcgcccagttggagtcccaggagcccggctttgagccggggtgtctactgcgctgcgagaggggggcatcgcctacggaggggccggcaccctcagcacgctgtcctcccagggctgcgcgcgtgtgccgccgctggcaggaggccgcttcccaacccgcgctctggcacaccgtgaccctgtcgtccccgctggtcggccggcctgccaagggcggggtcaaggcggagaagaagctccttgcttccctggagtggcttatgcccaatcggtgaggggttccctctcttccttacccctggctccaggctccttccgtctccctgcaccaaggtgttgggtgggaaggactcgtgtgggaacattagtgcagctctgcctccgctgtcggcccaggttttcacagctccagaggctgaccctcatccactggaagtctcagg

SEQ ID NO: 12030 - DNA, 6000 bp, Homo sapiens; identical to SEQ ID NO: 1303

SEQ ID NO: 12031 - DNA, 6000 bp, Homo sapiens
gcagaacagggtagcagctgtgagaaaggatctgagcacaagagattcagggtcatgtcctggctcctcaggctgaggaacgttaagcaaatcactcaacttgtctggggcttggctcttccatctgcaaccgggggcggtgagagcacccacgtcgcggacagcggggagggctcccagggcccgacctacctcggcgtcgcggttgaggcggtacacgtagagctgcgaggtcccggccactaccaggttgcgctcgctgttgttgaagaagttgcagtacatggagaactccagaccggtgggcggatgcgcctgtttgtacacggcgtacatggcgccaacccgggctgcgcaaggccgggagaggaagggtgagcggggtcgcccacgcaggagcccggccccgcaccgcgcccctccccggcctcgcgctgccgcctcggccgcccgcccggccgcccacctggcagttggagccgactcgagaggaaccgggacagcagcgaactcagtccggccgggcccagaagctgggcgggaaggttccgggcttctgcgcctgcgcagcgccgccgcgtgagcgtggctgcaggggcgacagcgggccctagtggcccgggatgcgggcggctggcggctcggctccgggctgggcgtccggaacccaaacccctagcgcgcgaagtgcggggcctccgctgcgggcggagcagcgcgggttggaagccgcaggggcgccggctgcagcggctcggggtcggccggggggtgcgtccgcgccagacccaggacggctgcagggagaagcgactccgctcgtagctcccgggttcagggggcgcgccggaatccagaagagggggcgcggcgcctcgccagtgtctggggctccgagaaagcttcctagagaggccgcacgccccctctgcccagtgtccccgcgcagagcgacccccgccgccaacactcccgcggaggacgcaggaccccgcgagcccagcgctgtccgcccgccttgctcactgctgcctacccagggcgggcccagtgccagcttccgggagcttggatcctggatcaggcacgggcctaggacctagaaacggaatcatgagaaataaaacaagaaagtatcgttacgcccaagaaaatggcgtggaaatatgtgtttttgttgcatccaaatctacttgctcattgggcagtgggggaagggccacttggatgctcaggcgtgtgacccctgagccacactcaaccgccttttaaaagtcaataggaggcggtggctcacgcctgtaatcccactttggaaggccgaggtgggcggatcacctgaggtcaggagttcgagaccagcctggccaacatggtgaaacccagtctctactaaaaatacaaaaactgtgggggaaagagagagagatcagattgttactgtgtctatgtagaaaaggaagacataagaaactccattttgatctgtactaagaaaaattgtttttgctttgagatgctgttaacctgtaactttagccccaaccctgtgctcacagaaacatgtgctgtaatgaatcaaagtttaatggatttagggctatgcaggatgtgccttgttaatatgtttgtaggcagtatgcttggtaaaagttatcgccattcttcattctcgattaaccagggacacaatgcactgcgggaagccgcagggacctctgcccaagaaagcctgggaattgtccaaggtttccccccactgagacagcctgagatatggcctcatgggaaaggaaagaccttaccgtcccccagcccaacacctataaagggtctgtgctgaggagtcgtaaagagggaggcctctttgcagttgagataagaggaagccttctgtctcctgctcgtctttgggaatggaatgtctcattgtaaagccaaccattcccttttgttctattctgagataggagaaaactgcctggaagcaagaatgctggcagcaatactgctctgttactctttcctacactgagatgtttgggtaaagagaaacataaatctagcgctgctgctctgttactctttgctacaatgacatgtttgggtaaagagaaacataaatttagcctacgtgcacatccgggcacagtacctttccttgaacttattcatgatacagattcctttgctcacatgtttccgcgctgaccttctccccacttgttgccctgctacactcccctcgctaagatggtaaaaataatgatcaatactgtgggaactcagaggccggtgctgatgcaggtcctccgtatgctgggtcctctgggcccactgttctttccctatacttcgtctgtgtgtcttcttttctcagtctctcgtcccacctgatgagaaatactcacacgtgtggaggggctggctcccttcaaaaattagccagggtggtggcgcatgcctgtaatcccagctactcaggagactgaggcaggagaatcacttgaacccaggaggcagaggttgcagtgagccaagatggcgtcattgcactccagcctgagtgacaagagtcacatacaataaaaataatcagaagagacagaaacacaagaaagaaggtcatgtgggccaggcgcaatggctcacacctgtaatcctagcactttgggagatcgaggtgggtggattacctgaggtcaggagatcgagaccagcctggccaacatggtgaaaccccgtcctactaaaaatataaaaattaactgggcgtggtggcgggtgcctgtaatcccagctactcgggaggctgatgcagaattgcttgaacctgggaggcagaggttgcagtgagccgagatggtgccactgtactccagccggggcgacagagtgaagctctgtctcaaaagaagaaagaaaagaaaaggggaggggatgggagggaaggtcatgtgaagacaaaggcagggattggagtcatactgcccacaaaccaaggaacacctggggccaccagtagccaggaaaggctcatggaacagactgtttcctagagacttcagagagagcattgctctcctgacactttgattcctaactttcagcctccagaactgtgagaataagtttctggttttaaggcactcagtttatggtaggctttgttaaggtagccctaggaggccaccacacaggcactcaggattaacgcctcagagtcagaagaggctggcgtcccaggaaccgtgggctgccacacactctggtctgacgatctccaggtttgctttccatgacagagaaataagccctcggctgtgtaagcagttataggtaagcaagtttgattcctgtttggggacaggtcccacctgctgcccacacacccgggtgaatttccctgaccccactcctcaggcaggcagggtctccatatcaaagagggggcacctgaggctggctgcctgggggtcctgagtgcagctctcctggcttcgaggcaccccgatggggagaaggcagtgccgcaattgtcctttctcagctgagggcccttcccacccagcaaggagagcacagccatgctccaaggacaagagtgtctttactggagttgggactggggcctctataggggcttctggtttctgggctgtaggtttgtgaggtgtgggatcttaagtcaaaggtgggggactagggcagggtatcagaaggtgatgtcatcctcgtacagggacagcagcagcaggacggtccagccgcccagcaggcccacgttgtgcagcaggaagaggagccagggccgcgggtcccgtactttcaacatcgccgggagctgaggagcaagtgggcaccgggtcagcgcccctgctcagctcctctgctcagctcccggcccagagcagcccctcccctcgccatcctgaccatgtcgcagagtgctacgtagaggaacaggccggtggccactgccaggatccaggcctcgctctcctcgctgactccaaccgcgagtgccacgtagagaccagcgaaggccgtgagcgcggaggccaggttcagcagcagtgcttggcgcacggacagccccgcgtgcagcaaggcggcgaagtcccctgcgggcgagtccacattaacagctccgccctcctagctacatgccccgcccacctcctttcggtcccgccctcttaccaccaggccccgcccacctgttcccggtctccccgcccagccgtcagatcccgcccatcaccttccaggccccgccccacctgtttccggtctccccacccagccaggtgcggccccgcccatcttccaggccccgcccacctgttccaggtctccccgcccagccccgtgcggccccgcccatctccttccaggccccgcctgcgctcacccagctcgtgtggcaactcgtggcagaacacggccagcgaggtggccagcccggtcttccaggaggacgcgaaggcggcgcccacggccagcccgtcggcgaagttgtgcacggcgtcgcccagagtgatcatatagggcagtagcctcaactctgcgggcgcagaggcccgtgggttcgcgtggcctgtcgcctaccgccaagccttgggccccacccgcgctccacacaaaccccagatcccccagcccttccggggtcgccccctgggctcacctgggctcagtctcctgggctcagggttcagcagctccgggctctcctccgccacctgggaggagccttgagtaagtcccgcccggaagtggaggaggaacgcggtggggcggggcggggccccagatcaccgcgggaggcggagccgcaggcctggggtggggctgggagtgtgggcgtgggaaggggtcggtgggaggggctccgcgcgggatggggcatctggcgcccactcaccaggtctgcgcgggagccctcgtgggggggcttgggctgccggagctcgctgggtgccagctgcagggacacaccgtggctgtggcccccgtggctatggctgctgtggccgcagggcccgtcctccaggtcctgtgagggtaggtgctcagtgtccaccaggcccccagcacacccacccgccgggtaccttcccaagaagcctgacctccgggtccctgggcagcaggagattgaagaggttctcaaacaggaagaaggcgtagagcccggccagcatagccaggaggcgccaggtgggctgtgggctgaggccctcttcgctgtgtgtatgcagccccagcacctggggagtaggggcgctgggctgggggggaggtcccagggtgcctcccaccaagacccagggagaggggtcaggaggtggggtgggtaaggtccctgggagggcatggcctgggagtccatggtggggaacggagggccagggtcgcgggtttgtgggggcagaccttgggcgtcagatgcaggacagcgtccccagtgagtgcacccactgccaggctcaggaaggtctgcaggatgtagtgggtgacccccctgcagccagtgcaggtcagcagcaggaggccaaagaccgcgcagaggcagatgagcagcgtggccagggagccgtacagataccctgggggcgggtgaggcggctgtgagagcttttcttccagactcagcccctgcttcccgggcgctgctcaccagagctgcaggccgtcagtgtgggccaggccctcactcaggctgaccctcctgcctcaaagccccactctcctggcgacgccaccttcccctgtgtctgttgtttctacttccagcccctgctcactctctccatccctcatcctgggcagccactccttccttcctacacgggctccacctctgtgctgccagcacaatgtcggcgtgggcactcactctctgactggctgagctggtcctggacggggggcctggactgggaggtgcaggctccactcagctgctgttggagcagggcagggctcagttgggcc

SEQ ID NO: 12032 - DNA, 6000 bp, Homo sapiens
gctcagacagaatgaaaaagaatgatatgtaaaccacctaaaaatattagtatgtctttgacttggacactgtagatgatagaagtggaatgtaaagatttggagggaaaattccctttgctaccttattgggacataaaatcctacctttttctttatttagcttttatgtagcctctaccatgctcagaggcattgtacttagtattagggatacagatgaaaaaaaaacaccatccctaccttcaacaaactctcaatctagagacatgtagattcactgtaaaatagcataagaacaactgtacattataagtactgtaagggtgtagagtggggtgattaaatttgctcaggagaaaggtgaaagaagggttcgctaaaaacagttattgctttaactgagaactgaaggaattgagcaggtgaagaaaggtaggtagacagacggctcaccagaggatagagtgtgtgtaaagatacagaggtgatggacagtaatatggatttgaattctccaaataggtcagttggctgaagcagagtgtgcaatgtgggaaggtacaagatgagagactggacaagcagccagggtcccacatgaagggcctggagtgctctagaaccaggtctttttttccccagctttagggaaaatgatgaaggattttaaccctaaagtggactgcacaaatttgaattataataaaatcattgtggcaccactagagagactgaagattagggagttaacttttgctttgtttttgttgttttcattttgttttgttgagttgaagtctcactctgttgcccagactggagtgcagtggaacgatcatagctcactgcagcctccaactcttgggcttaagtgatcctcccacctcagcctccagagtagatgggactacaggtgtgcgccacagagattttatttttggtctaacaagactttgtattcaaggcacttgtaagaaggaaaaagagagacagagctaaacagaggtaaaacaatcacccagtttaatttttatctaaatgaagtttgcaaataagtagcaaagtctgaaatttacacattgcattctaaatcataagaaatattatcttgtttatccaatcaggacaagggcctaaaaaaaaaccagttaaagatgacattatggtccatgtagacagagaagactatcagattagagtgctcaaagggacaaatcgcagcttttctgggtttcagtttcttcatctgtataatgaagggttcgggggttctttacctgagctatatttcaatataatttgttttctttgtaatcctacacattttatttatttaaatattaaaacttctcttatcttgagaaggggttaatgtcataaaaaaggttaagaagctctatatgatctttagggtcacttacaactctcaacttataggattttggacattcaaatacaggaactaaaagagaatactactgtatatggataaataggaaaggggcagtaggaaaaacacaatagtatacactgagaaattacatatagggattaaaagtctgagccagggtgacattatttttgccttttcatttctctttcctttcttctatagacttaggttaatgctggtattgtgactgcttgatggctctcttcttttgtatccttaaatttactgaagtatgatttatagcaaaaaaaaaaacttcattagtaaaggctatgagaaaggttagttataagtggaaaattatataatgaagagattggtagtattagcaatcatataaaagaggtaagaacaaaaagccttcttgataatatccaggcacaaaactacttgggaaagaagctaggtaaattaaaaagtaatttttttgaaagtaaaaaaaatttggttttaaaaagacgtgcagaacaaagctagttgctaccatcttataattacaggcatttaatagcagggatgcatctctcttgagtctaggtgatatgaatttataaggtcactgttagcattcaaacttaaaatggtcagccaggtgcagtagctcgcgcctgtaatcctagcactttgggatgctgaggcaggacggatcacttgagcctaggagtttgagaccagcctgggcaacatagtaagaccccatctctaaaagaaaaaacaaaaaccttaaaatgtatgtagttaccacatacaaaggaaattagatttaaaaaatttaggaacactattaaaacatgaacactacaaaacatattatcatcagcaaaaaagtgaatgaatgatgtaattattgcttcacagtgttctcactatatacttcatattgaatcagattgaaccatcaaaatggttctgattcatgaaagtctcagtgcatcatttgttcagttcaaaaggacatctagcatcagtttgaaaaaaaccactgaaagataacaataatataatctgtactatccttttaaataacatctacttagtatttataagctttcctattccagacatgagtccacaatgaggcagtcagacaactattcaactgaacaacaatagaaaactttcaaagctgcaaaatcaaatctaatcaattttaaaaatagtatatatattaaatttgtagggatttcctctcttagcaacaatctgagggaaaaaagcctttactattctgtttttctggagaaaaactacaaaaacaatgcatgtgtctagtttccttcaggagacttaacaacctaacaaatctgtatgggaaggcaggttcctgtctgtacaggtagctttcttctcacactccctagtaatttgcatatctctaaaccagagacaggtaactaaggcacctaaggcaatctttagtgtcactgtactcctcccaagtggtttcttttaacaagtatcttataaagaacatataagtgctatgcttagaaaacaaagtcactttttagtgactttgtgatagccttaaaatacagtctacagcaacaaaatattctgataatttatttatttcagaaaaactgtaccaagtgaatattacaactacttataaaaacttgtaaatttcttcagttttagtccaggcaataaatattacatgttcagtgaagtagaaaaatattcagaattcgcatttctagaagaactatcatacttgattcaggaaagcaaaatattttctaggtacaaggtatttagaaatcatgtgtaaccatacttcattatataaaatgaaccctattcaaacgaatctactaaacagggccgcaaaggtacacaaaacataagtcagtagagggatttaattttcaaaaggacttttcaaaacacaacttgtacacaacttgaagaaatcggctctgtttaaaaatagacttatttttactagtttattctagaacagagcataaactactattcaataaacgtatgaagcactactcacctccatttccaccgcggcaatactctggtcataatgacccatcagattagggaaaaacgtcatgttgtaggccattttcatacatctgggaacagtaattggttcacaggtgaagagactgtgccctcttaggaggggtagaaaaatacacgtcaacaaaaatgtaaacatttccattttcttcaaattcctgattttaccacatggcttggatgaatcactctttgcatcctcagaagatccccatccaaagataaaatgttcaaattcctcatttcactattttactcattttcaggctttcctgaaaatgagtcctgggtcaattactgtaaaaacaaaaggagggtgtatcagcaacatttgtcataaactcaaatgtggagtcaaagtgcagagttaagattttcaccccaggtaacaaacactggaaaaacaacggaaaattctgtcctaacgagatactcttccacctgccttagcatggaatatatcatttgctaaggaagctgcacctctaggaaaccgatgctaggaggttggtgctgtatggaagacagggttaaaaagagggaatggcaagagtaagatggaggaaaaaaggaaagctggtgattcggagtaaattataaaggattaatataagcatacaatctaagggcccctgttggaaagcttattaagtacaagaaaactaaggccctgggaaattccttaagacccaaagagttcttaaacttgtaaaagactctgaagagtcagtttttgtggcagtcttctgggtatgtagttttctcgattttcgtaaggccaactagagggagacttttaggattcctccagtggaggagcaacattgcagttttcactggctaggagggtgtagtgctgccgtcgaaaggaaagtgcgcaaatctgtcccgggggaagggcgaaggcagtccccttgcgggaggaaggctgtaggccccggattacgaattacccgcgccccaacacacactgatgcccggtccgccagcgccccacacccgggaacctgccccaggcctagagccagacagcagcgttcctggcctgcgcggcgccgcggggccccggcatcgcctttcagagccggttcccgcttccgaggaaactcaggtgcgggccgtcccgccgttgcctccccagcacctgcggctcccggcgcgcctcatcccagccgcggcccctcgcccctcgaggccctccccgcttcccccggcacccgcccggcccctgcccagtcccagccgtggaagcctcacctcggggggcggtcgaaggccgctgtcccttcccgtccccgtctaacccaccgttccccccagggacctgagacggctccggggttgcgtccgggactggagctgcctcgagagccgcacggggagcgagagctgagcgatcccgcgagactgcgccgccaggtcgggcgggcaggtccgggctcgcggcggcggcggcggcggcggcggcggcggcggcgggactggccctgcgcccgggcaccgcctgcgctgcgccgcccggcctcactccgcggcccgccaggacccggccccggtgaacgggctcggggtgccgaggtccggctgcggggccgggaagccacctccaccttgccgtctgttacgacccccgaggcgcaaggctgagccccatctcgctatccgggtccggaggggttcaccttagaaggattttttgaagctcttggcgctggctctaaaagaacccacttccttgcggatttcaggagtcaagaatccttaaacggagccaatttgctttgtaaagccaattgcccaagtgacttgagttcgaaaggagatacttcctggacaactgctataaaaacaacaacaaatacttttattaattcggggagcctggtcaccaactggatgctcaggtagcagtgggattccagccctggcgggtcccacagttttattgatacaaaccctaataggaagttgaactgctgtagaaatcaacctagtttggggtaccaactctgtcatagatattagataaattaccctaatctttaaggggcatagtttcctcacaatataggaatgacaatagttgtaatgatggttaacgttaattgagcactggctgtaagtcaaatagtgccaagttcgttacaagtgtttacacctaacctgtaaggccctcctatgaaacaggcagaatagtatgagaagcaaatgaacttgtagaagtactttgaaaaatgcaaagtaacttgtagatggaggctattcttgtcagataaatcatcctgttgcagaaaaggaatgtcatatttccatacctagaaggacaaccctgaacaaccagagtaagagttttggaatctgtggggaaagacgaatttggagtggggaattcctccccagttttatcaaaagcttactgatgttgggagacaggtagtgatgaagaaatattaacatcattaagagctggatagttgatgtattgcagaataaatttctatgta

SEQ ID NO: 12033 - DNA, 6000 bp, Homo sapiens
ttcacatcagctgccaggggtgggaatctcgggcctccacgttgaccaccggcccctcctgctggacggtgcccctgggatcctgacacacacacaccacagtttctggccagccgggaaaattcagggtcgggccctaagtggctgagaccctggccggctccctcccactgtcccggagaaatgaacaaacacacctccactgggtgtctgttcttgttttctctctccagcccaaagagccctctgggcagcgcacagcacccaactgcagacacggcggcctgggccggcttcctctgtcaggaggctgccacctgtttgccagggggaagcgggcagcactgcagtccaggcacggatgggtcagggctgctgcccagagcttctgcgtgggagccccctgcccctcccacaggccactcactacactccggcccgtctgtcctgccccagcccagcttttgtaccctctgcaccagcgggtccagacagacaccctccattcccaagtcctacggccctgggtgctgccccagcctgagcgtgctccttcttgcacccgctttctttcctccatgccccccaacacctccttccgctgtgggaggaggaactcacttgacctgctgaacctggggcagaagaaagggcagagcactggggaggggctccctctgaggtcaggcaagcagctggctgtggctcaggggacgactcctcctcccccaccacccccctgggccataccacagaagaccccaggaccctccaaacctggggtgctctgcctctccccgcaaggggcagccacactcagagcaggaagctgggggacatctgtatttatttgaggcaccaaagcagcaggagggctccaatgtgggggtgggctggggcaggactggctggatttggggcagggcctagacccggaagtggcagaaaccccaacccccaaaggctgcccttgaagtgcatgcagctgtgccagggcagggggctacagggactgaggctctccaggctgctggcacacctccctccccaaacatggcccccagaagccgccacgtgctctcacgtgcactgcacacccacgtacacagccaggcacacatccctactgacacggtctccctggggaccctgtcagcatgtccatgggacttggtcctgatgttggaccgtaagactccagggaaccctcgtcccttccgcggtcccccaaggaaggtcacatcatccaccccagaagtgagggcagctggccccacttggggcagaggcaggggctggggcaggtggaggtgcagggggtgggcctgacctgggaccaagggcacagatcaggcacgtgaggagtcaggggctcccatacactgtgggatccagaaagggctgggctttccttcctgagctgggggatcgggggacagggtctgggcggtcaggggccaaaccgcagcagggccggcagcaggctcagcagcagcccggcacccagcagggtgacgcttgcccgcagcccgccatcggccgcactgaaattgcacagaaagctctggcagcagctgatgcccatggaagccacaccaacattgacgccttctgggatggggcaggccggggaacaggtcttgctcaggctgtggccaaatgtcacgagattccctgcatgggaaatgaggctgtcaggggagagacagacggctgcagacagacagcaatggcctctgctgagccccggcccgggctagggagatggccaggggaggaaggcacggtctgaggcctggcactcaccaatgccggcactagcagacacagtcacgcagtagttgtcctggtcggagcagatggtcggcttcaggcagtacagattgctcttctggttcaagcaggagaagcacatcagcgagctggctgcggaaggaggacacacctgtctcagggaagcctccagtgtccctcccaggcctgaccccagtggacatttactgagaaattactgtataccaggccctgggctgaaggcagagcaaagacagtgacaccccaccctggccgtcgagcaggtcaagcgacactcaaacacacagtgagacagtgtggccaggccgggtgagccctctgctgggagcggcctggaaggacccctggggcgtctgctcaggggagaggggtggagagggagtggagcagggcacagctggacaaaggtctggggtccccaagggcacctcacctcgctccacacccagaagggcagccagcagcactggcaagaagatcttcattctggagaggatggccgtcctgcctggaggtcacaaaccaaagcagcctgtcctgctctggagagacacactggttagggggccgggtggtgcctcactcctccccaagaccatgcacccccactttgcagatgaggacacagacagcagaggggaagggacctgccagcacacaaggacttccctgcttctctcctgacccactcctcactcagtgcagacatgctctaggctatctccctcctgaaacctggcaggagggggctgcacaggcaagaggaggaaactcagcagccttctcagaaccacagaaaagaaggcagagtgagtggcctctgccagtggtcctggggtgggggaatggggaatggggaatggtgatcagtcataatattagctagtctggggctgggtacaggggctcacgcctgtaatctccatgctatgtgaggccaaggcaggaggatcatatgaggccaggggtttgagaccaccctgggcaacacagtgagacctcctgtttctacaaaaaatacaaaaattagccgggcgtggtacgtgcctgtggtcagctacttgggaggctgaggtgggaggatctcttgagccagggagttcaagactgaagtgaactatgatcatgccactgcactgcagcctgggcaacagagtgagaccctgtctcaaaaaaaagagaaatctatatacacatctatatgtgtatctgtcagtgtatattagctaatctgtatctagaattttccttgggatggctcagtgttttgagcccaggcagctcccctcacatggagacctggggccaggtggggcatggctgagggggaaagcactccccattcctgatgttactcagttccgaggaaagcaccccactcagtatctgctactccccattctgtggctgggaaatgggctccgagagacaaggctgcgtgccactggtcccaccagcaggaaagggccagatgggtcgctgtactgctcctcggcctctgcacaggaccctctgcactgctggagaaagaatctggaacacacccagctggggtcgtgattctctgttttgtgagtgcatggtgttggagggggaggctgctgccttctgtcagggacagccgtgggcagaggagtgggagggacatcccgggcctggggagctagtgctgggcactgggggtaaggaggatgcctcagagaacagatctggagaggggcccgcagaggccctaaggggagagcagcaggccaggacagtgagacctgggctgacatcctggggttgggagtgggagccccaggtggccaaaaacagtgccaagtccggctggggcctatccccgcctccagggagtagcccgaggaggaaggatctccaattccttttccccccacccccctaaagtgaggttctggtgtgggggggtccctgagctgtctctgaggaagtcctagcatacagggccacaaacaggtccagctggtgccgccacctgctcactgggtggcacccaacccgctgggccaccaggctgagctaaggcaccggtgggagccgaaggcaattaggaaggccgggtgggccatggagcccggagggagccagccggcaggccgtggggggcgcccctggggcccaggctgcaggctcatggctcatccccaggctcagggaagctggcccctgggagccaggtatctaggggctgcccagccagcaaggggcgggagcctctcctgtgtcccggaacggggaggggcccggcggtccactcagggaggctgggctccttggacctcaccgcaagcaccaccagtgccaaaacaagaagcgggggcgggttccagtgctccggggtgatatgccgggggcggtcaatcctccctttccggccaggagctctgcaaggtcccgtgccccctcccctagtcctcaaggctgtccctcccggcccacgtagaggagccaggagcgtctggagttgggtgatgggctccagtggctgcgcagccctggggcggccgggaggctcctggcggcagtctccgcccgctcccgccccagatctttggaaacattcggggaggcctgcgggggatgggaggagaagctcagctctctggggaccaacccaccggcagccccagcccctctcctgcgcctccccgtgcgcccctcttgctctctcccaccctctcccgccccggcccccgcagggcgccttccgccgcgcgtggctgagccggggccgcgtgcaccgcagccgaggccgccgggtctgagcgcgtgcgcgcaggtggcgggggcgtcccggccgggggcccgcggactcaccgccgggcggacgcaggtaccagcagcctggccgagctccccgaacctcgcgcgctctggaccgcggctggcccggagcctcccaggcagccgcgcggccccggggcgggggcaggggcgggacgcgggaggggcctccggcgggcggagtcggcgagcccgcggtgggggtccccgcgccgcccaggcctaccccggctccttgggatagatggggaagctgaggcccagaagggggctgagaccacctcccagtttccccagtgaggtggcgcctgagccacggccaggcccggcctccttccacccggccctgctgtgcgcgcggcgggtgctgacctggcgaggccggacaggggaccaggtcggggtgaccgtcactgacacctggacagtcctcgttgtgttcggggtgggaagcccacgggtgagcagacgtgtttgggtgtgagcacggaggaggggtgcctcggagagtgtcggggagcagtgttgggggtctcgcctgcggagtggagctcgggaggggaggacgcaggcacccccgcagcctgggattcctgaggtcatcttgtccctgcttcccgctccaggctgggctgttccttggccatccctcaggcgggggtggggagaccggcaagggttgggaggtgggaggttgtgggtgctggcttctgcgagggcactgaggctctgccatcggtgggtgcctctcctcccgccaggccctctccgaggggctgtgggcgctggggctctgccaccggcctgttctccagttgacagtgcgtttcctttctgggtgacagggcgagcaccagggaggggtcttctgaaccccacacgggagtagggggagggtgtgcggaaatgtgagggtgggcaggtggccatgtggtcaggagggggctggggctgacagacacctgtaacacccctgtctcaaatctaggggtgcagtcaatgtggctgtgtgtgtgttttgcatgagtgagtgtgtgtggtgcgtgtgtgtgtgtgtatggaggctgaggctggggctgtgtgtgtcacgagatgtcctggccgtggtatgatggcatcgtgggtggggcttccacagctttgggggcgatggcccagctgtctctggggacaggagcctccagtaggctgtggcccgggggagtccctgcctctgggtcttacgtggggcacaggcagggcatcttcccctctggaatgttggcggtgagggcagggggttctgtctctgcagccggcacctggggccatccctgccatggcaggggctcagtaagaactgtgggacgaaagcacgggtgggtttgcccccttcaagac

SEQ ID NO: 12034 - DNA, 6000 bp, Homo sapiens; identical to SEQ ID NO: 3779

SEQ ID NO: 12035 - DNA, 6000 bp, Homo sapiens
acacagtgaaaccccatctctactaaaaatgcaaaaattagccaggtgtggtgatgcattcctgtaatctcagctactcgggaggctgatgcacaagaatggcttgaacccaggaggtggagagtgcagtgagccgagatcatgccactgcactccagcctggacaacagagtgagactctgctcaaaaagaaaaaaaaattaaaaattagccgggcatggtgacatgtaccaatgatcccagccacttgggaggctgaagggggaggatcacttgagcctgggaggtagaagctgcagtgagtaatgatcaagccactgcactccagcctcagtgaaagagcaagagactctgtctttaaaaaaaaaaaaaaaaaaaaaaagggccaggcacagtggttcatgcctgtaatcccagcactttgggaggccaaggcgggtggatcacttcaggtcaggagtttgagaccagcctggccaacatggtaatgccgtctctactaaaaacacaaaaattagccaggcatcatggtgcatacctgtagtctcagctacttgggaggctgaggcactagaattgcttgaacccgggaggcagaggttatataagccgagattctgacagtgcactccagcctcagggacagaatgagaatcccatctcaaaaaaaaaaaaaaaaaaagataggagaaaatacacccatgttcaatgtcaacgataattcatcaatgggagtgagaaacagatgatgtaggagaggagataattgttagagctctgtccttgactaggccaaaggggacaggatacaatgtacaagtggatggccctgagaagtttgtgccagatactattctaaatatatcagtaaataaaatagttatctaagaaaacatacgaaaaacacttactttctggcacatagtaggcacctaacaaatgctggctaaatatacaactgaactgtgttcgtctaaaactttttttttttgagacagagtctcactctgtcacccaggctggactgcagtggctcgatttcagctcactgcaacctccacctcccaggctcaagcagttctcatacctcagcctcccgtgtagctgggactacaggcaagcaccactgcacccagctaatttttgtatttttagtagagatggggttttgccatgttggccaggcttgtctggaactcctggcctcaagtgatccgcccgcctccaccttccaaagtgctcggattgcaggcgtgagccaccctgcttggcctcatctaaatctttaacagaaatctggatcaaaacagtatcctaaaacctgctactagagaactatcagaggaatttgaataaaatgcctttcagtagataaaatgtagcacttacttttgataatatgacaaagtgtctttaaatctcaatgcaaccccttaattgtgcagataacaaaaaaagtaaacacagaaagccaagtttgcttgcttaaaattactaaattaattcagtaaaagccaagaactaaaattaaaatctagtcatcttacctcctggtctggcttccaacacactttctttgatatatctctctttttctctcttgacagaaagaaaatattaagattgcaatttctgtcttccctatacttctgcctggcccttccccttccccctgaatttacctgggggtgtaactgacttcttatcactttattttaatccaagaaaaatgacatgggccagggtggctcacgcctgtgattccaacagttttcgaggccaaggtggaaggactgcttgagttcaggagtttgagaccagcctgggggcaacatactgagaccttgtctctaccaaaaaaaggttcgccaggcatggtggcacgttcctgtaagttgcagctacttggaaggccaaggcaggaggactgcttgagcccgtggagtgaagactgcagtaagctataatgatcacaccactatactccagcctgggcaactgagcaagaccctgtctcgggggcaggggggaactctatgtactagaagatgttttgggggaaatacaatattttagttctcaaaattccaggttattttctacagccccctgctcctaaaaatctaaaataaacacagtctaatgcatcacatataaagtatcttaatttccctatctggaaatcacgtaacttttgtaaaaacaagtagacaaggccacgcgcggtggctcatgcctgtaatcccagcactttgcgaagcagcggcaggaggatcacctgaggtcgggagttcgagaccagcctgaccaatgtggagaaaccctgtttctacaaaaaatacaaaattatccaggtgtggtggcgcatgcctgtaaacccagctactcaggaggctgaggcagaaaatcgcttgaacccaggaggcggaagttgcggtgagccaagatcgcaccattgcactccagcctaggcaacaaaaatgaatctccgtctccaaaaaaaaaaaaaagttgacaagctcaaatatcaccatattgacattgatggtgaggatatggaccttacagatgtttaaaatcagagtatttcaaaaactaataaatcagaacagagaactttttggctttcaataaaaccttaagaaagtgtatctattttaggctgggctcagtggctcatgcctataatcctaacactttgggaggctgaggcaggcaaatcacttgaacccaagaattcaagaccagtctgggcaatatggcaaaaccttgtctctacaaaacacacacacacacacacacacacaaaattaggcaggcatggtggcatgcctgtagccccagctactcggggggctgaggtaggaggattgcttgagcctgggaggtagaggttgctgtgagccgcgatcgcgccactacactacagcctgggtgacagagcaagatcctgtctcaaaaaaaataaataaataaataaataaagtatatctattttgaacacccattaccagtacttttccattttacttttagtatataagtcacattgagaacattctgaaaatgccaattaaaagatatagtcactgaaaaacaagttttcctgtttcctttctgcatatttaataatggtttaacagagatacagcactgttttactgaataggacttctacttcaaaccatgaataaagctgcaatttagtatttgtcaagatagctggtaaatctaatccttttagctttaatactttttttatttcaagctttaaactcgaggttctgatacaaattacccttcaagacttttctttaatcctagaatgcccaacttctagctaaaatcttccactctgtttcataattactgttctacccttattatcgtaacccagctactcatcccaataatgctgcacatctatactggtatatctgtaaccgtgcagcactcttaccttcttgaaccaacaaaatcagcctatctccgacctcaaagtagggcagcagtaaggaggtgggaataaacatttgaaaatgaatatttccactaactagtaaatgtggccaaaatactattgaaaataccattcaaaatgcatgaattttagctcagtttttatatagttctgaagaagtaccaatactattttggcatttcgtagcaccaaccacgtccgaagcgctccaactttcaagtctgagcttgtctctgaagaagttgcccgtgcagcctccatgaataccacacaccaaatactaactgctttttaacagatccagcaacgctgctgtttccattttctccatcctatttatgcccacatgaacttttttcttattagataattagtaacttgaaggcagagacctgttttacaggctgcaaaccccagggaccgagacagcacttaacgcctacaaggtccaaaccgacgccaacgattaagcgcacaaaggaaaggtgtaatatacatcatttcgtttagtcctccctgcagcctcatgtagtagttactattaatcaaccccatttcacaggtgatcaaaggtaagctcagaaaggtgaagttgcctgcccaggtcacaaggtaggaccaggattccaagcctgatcggtctggatacgaacgctctacccacgcggctttccccctacactctcgggatcaccacacacttccccttggcttttacaccggaggctcgacctgggtcccggaaccagcgaagccactgggcaagcctagaggcctctacagaggctagagacgcctcgccccaccagatgcattaggatgaaacgcgccgaaccgaaggtttagagcgccaggggagaagaggggcggggagagcaggctctttgacccagaggagggaggatctccacacccggccactctggcgctggggcgcaacactgaggccggcgggaagccgagcctgcccgcgaagagactggggattccgaggcggctcctgggagaccggacgcgcgcggcctccgccgctcccagtcccgccagacccgatgccgggctggagaagcgcgggggccgacgcacctcggataggcgggggcaggggcaggggcagctctcctttaccctagagcggcgacagaagctcttcgggggatcagtggccaagggggcggacagatttgcacggcggattcctccgaagcaacccgtgtgaaagaagccaagcggcggctgcagcccgggccgcgatgggggtgacaccgcccgtggtcccgccccttcccgtggcccctcggagccacttccggcggcagcgtccgggctagttcccggcgcgagcggccgcgggccagtttctatctcctcatccagggcttgcgggcgaggcctgttttaagtctccagtaaccgagcggaggcccggcaggcgcgacccgggctgcgtacgtcagagctgcctccgaagtggtaaaatgtgctgcgagaagtggagccgcgtggcggaaatgtttctcttcattgaggagcgggaggattgtaagatactgtgcctttgctccagggcatttgtggagtaagtagaaaagagaatctcttcatgttctagcacagtcattacccagaaatgtaggtattgcaaacgtggttgtaattgatccctgaaagcagccagaacatctgacccttgggcacggtgatgtttaagaaaaacaaaaccctcagacatgacggagtggtcgcccactgccattatttttatgtgaaggactacatctacttggtaggctgctatgaaaaaatgtcgtaggtgctatatgtcatctcatatttgtaaatcgaggggacatttaaaaattgggggaaagcgacatgtaaaatgaaatctctagtagatatgatgtcataaagtgaaagtttaaagttgagtgacttgctttggttaacgtctttttttaaacctaaaaatctacttaagcccaaatgcacataattaaaacttcaaactagttgagataaaagacttaaccatatttacatcagtttttgtgatatctttattttggggaaatctttgaatcaggtaaaaattgccccacatgaaaaatagctagtatgcaggaataataccgccaagagacttgaattctaggaattgtttcctttatattaaatgcgtgagttaaaccacttgaacctttttttcatctctataacgggtatatttaatctcacatgcttattttgttagagttaaatccttgtggaagtgaattttatgtgatagacttttaatatagtttaatatagtaggatttaagtttgaaggaattcatttttctcgtgtaattttgtggagtaatttgaaaacgcaaaaagaagttaaacttgttaaatttaatgtaaaaagtattgtcgcctttttagtcaggcatgcatgtagtcatacaatcattcagaaaatgttttttgtgctcttgtatatcaagtatgctggtaggcactgaggtacaaga

SEQ ID NO: 12036 - DNA, 6000 bp, Homo sapiens
agactctgagacagggtctcattctgtcacccggattggagtgcagtggtacgatcatggctcactgcagcctccacctcctggactcagcctccagaatagctgggactacaggagtgccccaccatgcctggctaattttttgtatttttagtagagatggggtttcgccatgttgcccagactggtcttgaacttctgggctcaagcgatttgcctgtctcaacctcctgaagtacttggattactgatgtcaaccaccacaaccagccaagactcaattttctacttgaataagtgaggataacaagacatacctcagggggctgctagaaggcttaaattaaaaaaaaaaaaaatttaaattattctgacatttgttaaaatggtaaagaaaggctttatttaggataattgcgatagtaatcaacataatggtagccacacgcatgtaatcccagcactttgggaggccaaggcgggcagatcacttgatgtcaggagttcgagaccagcctccaaggtaaaacctcatctctactgaaaatacagaaattagccgggtatggtggtgcactcctgtaatcccagctacttgggaagctgaggcacgagaattgcttgaatctgggaggcagaggttgcagtgagccgagatcatgccactgcactccagcctgggcgacagagtgagactctgtctcaaaagagaaaaaaaaaaagataatggcaatggagagaaattttgctcaacttcaaatatagcaaagacagctgaagatagccaatgggcaaaattcagggggcgtggtcagtggatggaaaattactaaggggagacatccagcatggggggattgttgctataccaacagtattcttgctgagggcaggccagagcgatcagatacgaagggtgggaagatcttgctacatggacttagcaggattctggctaaaaaaaaaaaaaaacacctgtaatcccagcactttgggaggctgaggtgggaaaactgtttgtacccaggcattccagaccagtgtgggcaacaaggtgagatccctgtctctacaaaaaataaaaaaatcaggcaggtatggtggtgcatagctgtggtcccagctattcaggaggctaaggtaggaggattgcttgagccagggaagttgaggctgcagtgagctgtgattgtaccattgcactccagcctgggtgacaaagtgagacccagtctcaaaataaacctcccaaaacccaaaaaacaaaacaaaaaaaacacccaagaaccaccccgccaccaccaaaaaaaaaccaacaaacaaaaaaactaatggacttagaaggattcttgttaaaactggaccagacaggttgaagacaagtcccaaatgacaaggcctaatcaaaaggagagctcactcagagcctgtgtaaagtctggttaaggagagtctctgtcagtacaaaatgtagaacaattagtggtggcacttaataagtcatctaagggaggagaccacccctcatattgtcttatgcccaatttctgcctccaaagaaagaagtaaaaactaaaaggcagaaatgaaatccataagcagacagcccggcgccacaccctgggcctggtagttactgatccacccctgacctaatcggttatttgcataaaaaaggcactgggccgggcacagtggctcacgcctgtaatcccagcactttgggaggccaaggcgggtggatcagaggtcaggagacagagaccatcctggctaacacagtgaaaccccgtctctattaaatacacaaaaaattagctggacattgtggcgggcgcctgtattcccagctacttggtgggctgaggcaggagaatggcgtgaacccagggggtggagcttgcagtgagcagagatctcgccactgcactctggcctgggcaacaaagcgagactctgtctcaaaaaaaaaaaaaaaaaaaaagacaccgtgaagacccctgtccagttcggttcctttctaattagtggtgtacgcagcccccagtcacgtaccccttgcttgctcaatcaatcacgatcctctcatgcagacccccttagagttgtgagcccttaaaagggacaggaattgctcgctcgggttgctcggctcttgagacaggagtcttgccgatgctcctggccgaataaaccccttccttctttaacctggtgtctgaggggttttgtctgcggttcttcctgctacagtcaatcgatccaagggatttagtcaattctagtggatacttttagtcctcattttgcttgatattttggcagctttccaatgttgattacaccttcactgaaacacttggtgacagtgtacttaggcttgtctgtttcctagttaatccatctcttcttgtctttaaaaagtgctggaattcctcaaaggtgggtccccctcccccacccttcattcatgggttcaatcactatctaaggctaaatggctcaagtttttaaaactagcccagacttctccagcgctccaaatcaatatatctaactgcttataccatctactcttggttatctcatagatacccccaaatcaaaatgtataaaatcaaactcataatctcttctccgttgacccaaaataaaattcatgattctccagtgatccctacctcagtgaaaggcagcaatacaattcagtccccacccccagcaagttttctcccatctttctttctttctccatttctgctgccatttatcctaatccaagtcactataatctcttgcctaaacaatggtcttaagtggttctcttcctccaaacaatcctccacactgccgcctgagtagtattttaaatatgcaaatctgatcatgtcattccccagcttaaggttttcctatagtctacaaagtcctgcgggttttgaccctgcctactgtgcacaccctatcttctttctttcccagttttttttcttttctttcttttcttttctttttttttttcgggacagagtcttgctctgtcatccaggcacgacaatggctaactgcagcctggatctcctgggctcaagagagcatctggcccaagcctccagagtagctgggactacaagcatgtgccaccacagctggctaattttaaaaaaaaatttcagtacagatgaggtgttgttatgttgcccaggctagtctccaacttccgggctcaagtgatcctcactcctcggcctcctaaagtggtgggattacaggtgtgcaccaccgtgccctccctcccagccattttgttcagtttcccaggctttcttttgctccctcaaggcctttactgagttcagcctgcagagaacgctttctcccactgaaactcaccccaatttatcccccttagacctctttccaaaagctacttcctcaaagaaacctctgtgacccttggaaagttatttgttttcacagcatcctgcacttctctctcatagcacttataactataatcaaccaagtaataatgtaaccagttatcttaatattgatcttctctgctaggaagtaaactcaatacatgtaaggacagaatgtcttgtacctcagtgcctaccagcatacttgatatacaagagcacaaaaaacattttctgaatgattgtatgactacatgcatgcctgactaaaaaggcgacaatactttttacattaaatttaacaagtttaacttctttttgcgttttcaaattactccacaaaattacacgagaaaaatgaattccttcaaacttaaatcctactatattaaactatattaaaagtctatcacataaaattcacttccacaaggatttaactctaacaaaataagcatgtgagattaaatatacccgttatagagatgaaaaaaaggttcaagtggtttaactcacgcatttaatataaaggaaacaattcctagaattcaagtctcttggcggtattattcctgcatactagctatttttcatgtggggcaatttttacctgattcaaagatttccccaaaataaagatatcacaaaaactgatgtaaatatggttaagtcttttatctcaactagtttgaagttttaattatgtgcatttgggcttaagtagatttttaggtttaaaaaaagacgttaaccaaagcaagtcactcaactttaaactttcactttatgacatcatatctactagagatttcattttacatgtcgctttcccccaatttttaaatgtcccctcgatttacaaatatgagatgacatatagcacctacgacattttttcatagcagcctaccaagtagatgtagtccttcacataaaaataatggcagtgggcgaccactccgtcatgtctgagggttttgtttttcttaaacatcaccgtgcccaagggtcagatgttctggctgctttcagggatcaattacaaccacgtttgcaatacctacatttctgggtaatgactgtgctagaacatgaagagattctcttttctacttactccacaaatgccctggagcaaaggcacagtatcttacaatcctcccgctcctcaatgaagagaaacatttccgccacgcggctccacttctcgcagcacattttaccacttcggaggcagctctgacgtacgcagcccgggtcgcgcctgccgggcctccgctcggttactggagacttaaaacaggcctcgcccgcaagccctggatgaggagatagaaactggcccgcggccgctcgcgccgggaactagcccggacgctgccgccggaagtggctccgaggggccacgggaaggggcgggaccacgggcggtgtcacccccatcgcggcccgggctgcagccgccgcttggcttctttcacacgggttgcttcggaggaatccgccgtgcaaatctgtccgcccccttggccactgatcccccgaagagcttctgtcgccgctctagggtaaaggagagctgcccctgcccctgcccccgcctatccgaggtgcgtcggcccccgcgcttctccagcccggcatcgggtctggcgggactgggagcggcggaggccgcgcgcgtccggtctcccaggagccgcctcggaatccccagtctcttcgcgggcaggctcggcttcccgccggcctcagtgttgcgccccagcgccagagtggccgggtgtggagatcctccctcctctgggtcaaagagcctgctctccccgcccctcttctcccctggcgctctaaaccttcggttcggcgcgtttcatcctaatgcatctggtggggcgaggcgtctctagcctctgtagaggcctctaggcttgcccagtggcttcgctggttccgggacccaggtcgagcctccggtgtaaaagccaaggggaagtgtgtggtgatcccgagagtgtagggggaaagccgcgtgggtagagcgttcgtatccagaccgatcaggcttggaatcctggtcctaccttgtgacctgggcaggcaacttcacctttctgagcttacctttgatcacctgtgaaatggggttgattaatagtaactactacatgaggctgcagggaggactaaacgaaatgatgtatattacacctttcctttgtgcgcttaatcgttggcgtcggtttggaccttgtaggcgttaagtgctgtctcggtccctggggtttgcagcctgtaaaacaggtctctgccttcaagttactaattatctaataagaaaaaagttcatgtgggcataaataggatggagaaaatggaaacagcagcgttgctggatctgttaaaaagcagttagtatttggtgtgtggtattcatggaggctgcacgggcaacttcttcagagacaagctcagacttgaaagttggagcgcttcggacgtggttggtgctacgaaatgccaaaatagtattggtacttcttcagaactatataaaaactgagctaaaattcat

SEQ ID NO: 12037 - DNA, 6000 bp, Homo sapiens
gcagtggcacaatcatagctcactataacctcgaactcctgggctcaagcactcctccagactcagcctcccaacagtgctaggattacaggctcatgccaccatacctgaacccatatatactttaaaagtatctccttcatggttatgaccctctagaaagcaaagattatcttattcatttttaacatgccctcaatatgtctacaacattaccttgcatgttgtaagtagataataaactattgtaagtgtaactgaacagaacgtgaaaaatatttgatctgatttcttggagaggaacttaaacttcaagtcacatttctaaacatattcacaaagacttaattttgtatcttttttttttttgacatggagtctcactctgtcactcaggctggagtgcagtgccgcgatctcagctcactgcaacctccgcctcctgggttcaagtgattctcctgcctcggcctcccaagtagctgggattacaggcacccgccaccatgcccacctaatttttgtatttttagtagagacagggtttcaccatgttggtcaggctagtctcccaaagtgctgggattacaggcgtgagccaccacacccgaccaaaaaatatatctaactgtccataggtttctttacctggatataccacaattacctcaattttatctcatctaaaacatagtcactatctaccttctatttgtactctttttctagtatctccttgtatggccctatgcaagttgccttacttttaaatcatttggcctattccttcatctgccaaatgaggagcttggcaattgattaaatggaatccagaaggaaagtgcaagtgaaagtttaatttttaaaaaaagctaatgaagctggaccttgtctctcatcatatgcaaaagccaactcaagaaggattaaacgtaagaccttaaactataaaactactagaagaaaatattggtaaaatacataaggacattggtttaggcaaagattttgtagctaagacctcaaaagcacatacgactaaaataaaaacagacaaatttgactatattaaatgaaaaagtttctgcacagcaaaggaaacaatcaacagggtgcagagacatctgctgaacagaagaaaatatttgcaaactattcatctgacaagggactaatatccagaacatacaaggaactcaaactcaacaagagaaaacacaaataatcccaccaaaaagagggtacagaacatgaatagacgattctcaaaagaagacatacaaatggccaacaaacatatgaaaaaatgctcaacatcactaatcatcaggcaaatgcaaatcaaaaccataatgagatatcatcttaccccagttagaatagctgttattaaaaagacaataacagatgctgcagaggatgtagagaaaaaggaactctcatacacagttggtgggaatgtaaattagtacaaccgctatggaaaacagtacagagatgtataaaatacacacacacacacacacagaactaccatatgatttagcaatcccactactatttgtatatcaaagggacaactgcacctgcatgtttatcacaacattattcacaataggaaagatatgaaatcaacctaaaagtccatcaacaaacaaatggataaagaaaatgtgatatatacacacaataaaatactatttggccataaaaaaatgagatcatatttctgagggctctgttctgttccattgatctatatctctgttttggtaccagtaccatgctgttttggttactgtagccttgtagtatagtttgaagtcaggtagtgtgatgcctccagctttgttcttttggcttaggattgacttggcaatgcgggctcttttttggttccatatgaactttaaagtagttttttccaattctgtgaagaaagtcattggtagcttgatggggatggcattgaatctgtaaattaccttgggcagtatggccattttcacgatattgattcttcctacccatgagcatggaatgttcttccatttgtttgtctcctcttttatttccttgagcagtggtttgtagttctccttgaagaggtccttcacatcccttgtaagttggattcctaggtattttattctctttgaagcaattgtgaatgggagttcacccatgatttggctctctgtttgtctgttgttggtgtataagaatgcttgtgatttttgtacattgattttgtatcctgagactttgctgaagttgcttatcagcttaaggagattttgggctgagacgatggggttttctagataaacaatcacacgtatgtttattgcggcactattcacaatagcaaagacttggaaccaacccaaatgtccaacaatgatagattggattaagaaaatgtggcacatatacaccatggaatactatgcagccataaaaaatgatgagttcatatcctttgtagggacatggatgaaattggaaaccatcattctcagtaaactatcgcaagaacaaaaaaccaaacaccgcatattctcactcataggtgggaattgaacaatgagatcacatggacacaggaaggggaatatcacactctggggactgtggtggggtcggggaaggggggagggatagcattgggagatatacctaatgctagatgacacattagtgggtgcagcgcaccagcatggcacatgtatacatatgtaactaacctgcacaatgtgcacatgtaccctaaaacttagagtataataaaaaaaaaaaaaaaatgagatcatgtcattttcagcaacatggatggaactagagattatgataagtgaaataatccatgcatagaaagacaaatatcacatattctcattcatacgtgggagctaaaaagtttatctcagccaggcatggtggctcaagcctgcaatcctagcactttgggagaccaaagcaggaggatcacctgaatcgcttgagttcaagagttcaaggttacagtgagctatgatagtgccactgcactgcagcccgggtgaaagccagaccctgtaagtaaataagtaagttaagtaaggaaattaattaagccaaagaataaaagaaggggagtgcccagattctcaggaatctggtccagaaattactgttccatcctcttctccagggttcactgactttccagcagagttcttaaaaagggaagatgtgcaaagcctcctgcctgaatagccattaattgatggctatcataaatacatattgacagattgaaatgcctgatgtaggagatttggttactttaagtattttttgaagggtatactgtttaacttcccattgcaacaggggataacttatatgattatttcagcgatgattttttgaatatttttccattaaaagtacaactgtgtgaaacaaggcaaagacatttctcacacacaaagcagatgtcattagccactctgatacactatgctgctgattcataaaataggtaagagcagatcgttttcttcatcagaaatatctggaaaaaaaaaagccaccaagcactgtatgtgtcaatttctcacctttttttaaaaaaaaaaagagtgggctgctacagtggatatgttctacatctctttggggcagtgattacatacaattgtcataactcgatggaactgtctacaggatctgtgtattttcttttaagtaatttataactcaactttttttatgggaagctgtagttaacactggatagttaatacttggctgataagaaaccgacttgttacagagaaaatgagtcccttccatcttgggcacaaaacggctccacaagaccagcctagctctctgggcaggcaggtaacactggcaggcagaggcatgctccttgaatctcactgagggggacaagtgttagtgcgaggcaggtaggagcaaggccgcacacgcagactctgtcatctgggcagctgcccaatccccgtttttcatttgtaacaaaaatagtgtccacctcttaataatgttctgaggattaagggcgttaagtcggatgtttgttgaaagcacttaggcatagtaggaagtactaagtaaatatgtcttaccactatttattataaaagatgaacaggctggcccggcgtggtagctcacgcctgtaatcccagcactttgggaggccgaggcgggcggatcacgaggtcaggagatcaagaccttcctggctaacacaatgaaacccggtctctactaaaaatacaaaaaattagccgggcgtggtggcggacgcctatagtcccagctactcgggaggccgaggcaggaggatggcgtgaacccgggaggcggggcttgcagtgagccgagatcgcgccactgcactccagcctgggcgacagaccgagacttcgtctcaaaaaaaaaaaaaaaaaaaatgaacaggctactactactactactacacacacacacacacacacacacacacacacagagccactgcctaaaaatctggcaatccttcctgacatttattactgaataacgaacggttaccaaacctgtctcccaaatcacaagactcttccagattaaaatgtctctcgcccacttggatccactcgcctgtctaggacacaaacccgtgaggcaccagcccccgtgacagaggcagattccagcttcgcctcacgccacctcacgcctcgcgccagccttcccaccactgcccgcgcagcccgcgcggcgtcacgtgacctctagttccgcaccgccccccccaccccccggcctagctgccggatccccgccccggctcgtccgcggtgtcacatgacacctggaccagccgctggccaatcccctccctcccgggttgcgaggcatcacgtggacgctactcgctatccccggcctgttggcttcttccgcgctggagtatccagataggcgacacgccggcgggcggctgaggcgggaatggctgctgtactgcagcgcgtcgagcggctgtccaatcgagtcgtgcgtgtgttgggctgtaacccgggtcccatgaccctccaaggcaccaacacctacctagtggggaccggccccaggtaaacgtccctctccaacctccccaacgttcgcagccggccccggagcccgggctttgactgatcgcggctgcgcgggcagtggagagcgccgcgtcctgtccctagctgggcagccccgcgcctagcagccccgtcgggactgcacgcagacactcggatctcgaagctagctaaaatacgaccaccccaggtgatagctctctaatttagggagaaatggaaaaaaaaaaaaaaaaaaaaaaaaaaacttctgttttgaaacccgatttactgttcttgatgtttgaatgccagggtgtgcgtgtttaaactgttgagaaaattcggatgtcaagagtccaagaaagcgtttactttgctcacttgactttcactggtgttttgcccagagtgtaacttcccttctcaaaagcgattaattatgttgaggcgatttcctcaactcagcagcagagggcaggattctcctggcttccaaattggttctctgcagcctgtgggctcataagaggagctgacataagtaatttggggaagttttttgttacaattgtgtgtgaccttgtttgagtttaatttgcagacacagtaacacacctgtatttctaagaagatacttttgctcttgtttagctgcattctgttttagtggaattatgcaggaatgggagatttggtttactgcatagtaagtcttaggcatttagcaacttttgtagtctttactggatgaacccagataatgtagtttctcttgagcatagaatttaattgtgcagtcaagacataaattatttttaaaatataattgattactaaaaacgatttagtaagtacagttaattgagttttccttggaagt

SEQ ID NO: 12038 - DNA, 6000 bp, Homo sapiens
acaaaacatttctaaaatgtatctgaaagataaacttcaaagttgcacatatttctcaaaaatatggacaatggtaagtaacctgccctagaagaggggaaaatatctttttttttttgcatttagggagaagaggaaactcaacacaactcaagattatattgagtcttacacaatcaactgagtgccttacttatctcatacacaatatagttattcaagtatctaaaactagcacaaaatactttttttaaaccttagaaaagaatttccaatacttgggcctagctttataagtatatttttaagataacagcatggcactcatatttttttctttcagaaacctgatacttctgagtctgagaatgcttattgtgaaaataaagaacagatgttggagcgagtattggggaaagcagagttaaactgcctctgattagctctgtattctagcccaggttcactaacagattgtgtgactctagacaagtcattttattacactatactcttcattggctaaaaaaagaaacaaaaaaaagcaactgtaagtttacctacctatctagaatccttatagaaactgctttaggaaatcttgcaagggaaagggaaaaaaatgaacagctatttccaattgcaaaagagcaatacaggacatgaggaaaatagagaaatcagagcaggacacaggagacagagacagtattcatggagagtaacagtaaaccactaaggaagacaatcccaatgaacttgttagtttacaaccagagaaaacacttaacacctaccagttactgagtgctaacaagtgactactatagctaattaccaagtacaaatttaaatattaaatcatttaatccttataatactaataaagagcttctgttattacttctgttctaaaacaaggaaattgaggtgcaaagagattagatgacttgtgtgaaatcccatgaccagagggggcagaaccagctctaaaccagcgtcctatactgacaacgcggtaatggacccaaaagttaaacataaacactttaggatggtaccacaggtcacacagatggggctaccttaaagaggccaagtactaagagtataggcacaaactatgggaaaaacactagtgcgagtatgaacaggacacacatgaaatgtatgagcagctagatgtttaaatactctataaataatttaaaaatgggctttagaatctaattgcttaagaattctaaatgacttgaaaataactggaacaaacatttaattgcacattttatggtacaagagaacacggaaatatccccaaaggaacaaagagccattagcaatggaataggaggaactaccatgtgatacatatcatgtacaaggcactacaacttttctttacattctttatttcatttaatcctcacaacacagtaagtacagtattatcatctccattttaagaagataaaaattaaggcttgagaagattaacaacccatctaaagtcaagctggtaataagtaaatttatggtaaacatcagaaaaactgtagaacatacaaaatacacttagtagaatggacatttgctaagcttggatcaaatttaatcccacagaactcaaaagaaatctttttccccttcaagatcattcaaaagaccagactgccagtcaagctgtcaggactgtagatggggaaagaaattaaaggaatgaggtaaagttttccttgttgcttgggatgtattttgtctatattccttctccctgcttcactatacatgtggtcaaaggaccattcaaagaaccatgtcaaatctgaacaaaaggaatagatgagtgaaaaactcaaggtgtgaacattaactattacgaacacatacatgcaaggtagaggtaatgccaactcattcatctaacactaaaagacaagtgggccgaggtgggcagatcgcctaaggtgaggagttcaagaccagtctggccaacatggtgaaaccctgtctctactaaaaatacaaaaattagccaagtgtggtggtgcacacctgtaatcccagctactcgggaggctgaggtaggagaactgcttgaactcgggaggcagaggttacagtgagctgagactgtgccactgcactccagcctgggcaacacagcaagactctgtctcaaaaaaatgaaaagacagtggttaggcataatcaaaacaccattacacttaagttcttggttgttttactagtaagaagaaagaaaagataacttggatggaattttatctcatcttattgacaggcagtaataagggagatgtctgataaaaagaaaatatattaaattgagtaagaagcaacatagaagaaggtatttttattgtatagatgggaatatgttaggaagaagtctaatatcccacacggagaaaggcagaggacactagacatcccttctttgcctccacttccatgtaaagaaactacagggctgggtttaaaagagcaggattacagacagggcaaatggagcaatttagggcttttctcctgaggtttcttgtacattccaaaggaatagaaaaggaacatgaaacatttacaaactgttatcacttcacagaaaagaggtacagagaacatccaatttgcttctaggttgtccaactcagatcatcaaaagaggaaaaaatgaaataattcaagagagaacttctggccagaaataaagattgtgtacattcacacattttccttgtgctattggaacctgagaatgtggatggtgtgcaagagggaaagaaacttacaattatttgatgttgtgagaaaaacatggggctaggactgagctcttttaatgggtgtgatgatgagcaagcctgctaatacctttaacgttcaggtaccaaatatgtaaaatgaaaaatacttgtcctccctacggcaagaatcattatgtgcatcaaatataagcaaaacttttatggctaaaataaaaggatatggagaagaaggaataataaattctaattctgttcataaagaaaaacatttcaaatttgtattgataaaataaattgaaacagaatagggacatatttgtagcttttagaaataaattagctgtgaatatattatttttaaaaactgtaataaatgtacattgagtacaaatgaataattatcccaaaaaccagaattttaatgctagaagaaaaggcagatcatctcgtttaagacataaatttaatcttcttaacaagaaccttgttattcaagcggaacacctaaatggctgctcttgttaaaataaacctgagggtgggcttgctttgtctctccctgcacggctccagaaaatttctacacaagttctcctatggaacagttttaaaaccccagcttgagtactaacactagtttctaaaaataaggagaatacggccaagaggtaaaattgtacaaaggcaactagagtcaggactagaatccaactgtcttgatttagtctaatactcttcagtctactagtctagtattcgctctatgtcctgttacttctatttttttttttaagaaaaaaatatgaagggtttttttttttgactctgtaaataattctttcaaatctctttctggctcaagatcactcaactgtaatctttctggaaacaagtaattgataatataggtgagatcagataagttaaaagagccaccccaagttcattctgttcaggattaagtaaaggtaacactttaggggaaggtgtttagactacaagctgcggtgttgtgagcgcccaagtatcatttaattgtccgaaacgtcaagataaaatatttccgaggggcatcacggaagtttaacagaatgtgttagacttgaacgttcaacagcttgctcattttgccaaaagccctttcactaaatgtgggaaatttggaaaatggtacctcaataaataaacaaacaacgatttttaatttaagaacccaggaaaaaatgttaacaattctcacattcagatttcttatcaaaagtcaacgtgaaatataactaatttatcgcaagcaattttatcagaaacttttcattatctcttcctccataagaaaaccaaactgcatttacgtgcgctttcaacagtgttagaaaactaagcactcaaattttttgtactacatataacactttacatgaactttcagatattaagtaaagtttggatcctcaattctttataaagccgtttataagaggtaaatatcttcacgaccgccaaatgagagaaaaagatttcgaagttcgtctcttaagttactacgtggaatgcagaggggctcaactgcagctgtgtgtgtgtttatttttaatgccgcgatcctaaaaacatctttaggagtttaggtttgcttcactgcctttcccaaaattcagcagctttgatttgccttttccagggagacaggaagccaataaacagggaaaaaaaagcaaacggcgacaattacaaggtcgtgaaactccacgacctcccagctgaaaacaagacctcgggtttgcactccggctctctagggcagacactgaccttaggagtctgcgaaacgcccacgctccacgtaactttctctgaaacattctctggaaagcttgtcttttcctagccgaatctggattaccaaggcttccggaactcgcaggcttccggagcgacgcaggagccggaagtggctgaaaaaaaaaagaaaaagttacaccaacgagaactgcgctttagcggcgctgctgaaggcactggatggccaaacaaccgcgaacgccgacaagccgaagagccgaagggccgaaaagccgaagcggacacccgcgcgcggtgattggccggttggccggaagaactctgtctctgattggcaggagagtcacgaaccggtcagccccgggtcaggggccgcaagtgaggacactacaagtgtcgaggggcctaggggaagccggggcttgggagggcagggctttctctgcttgcggacatcgcgaagggcctctggcaggcgccgccgggtggcggcgagacgcctccgcgcctccggggttccttgttcgctgtcggaggaggaccggctgagggatggcctggtggggagggagccctcgggcaggtggctgcgtcgggcctggggcagttgtgctgcgcttggagacctgcccgccctcggggcctgtgtgcacagggaggataggctgtttatctctgcaggctcaggaaggcaggtagctggcccgtcagtcatccgccctgcaaagcgctcccgagagaccccgtagagcgggccagcgcgcgcctggcctgaggtttcccgcccccggaggccctcacatctccccggtaacgcttaggaattcgggcagccagctcgcctacccctggggaatcgaggcagagcttctgggaatggggtctgagggaagagtgctcaccaggcagtgacatgtagccgttgaggatcgccactgccttctcgttctgtggtatgaatggcagtgtctctctagagagttagtgcttaagtttgaatgatggcaggcacttcaggattccagcacgtagtagggtttaagaacgtcttagttcttacctccagtctcgactcaccgttcctacaaggaacactcacttctacgaaagctctattagacattcgagggagagcttatactgtagaaccagtgttattaggaaagtttttttttttttgcttgtatttttatttcagaaactacccatggagcagagttgctaaaataaaatttattaactctaatgctatccaaattgtgaaacaatggtacaaatgagatagagtagaagctacaaattgatagagtatgtagttcacttaggggtttgggagtggattttctagagctgcaactgtccagtgtagtagtcactggccacctgaaaagtggctagtctgaactga

SEQ ID NO: 12039 - DNA, 6000 bp, Homo sapiens
aacagcaagcacagcggcgccaggaagagagcagaggaggtgagagggcataattcttgcaatttgtggcaggcatctgccaagcctctgggctgccggggccggactgcagccatgcaaatcccacccagcccgagaaactaagtgtaggaagaaaggggaaaaaaagtaaaaaggggaatggtgggggtggatagagaaactgacggcagtgcatgcccaggggctggtgccattgcccggccctgctgctgcaggagcgggagaactcaggagggaagaaggaagcaggggatgaagagagtgaagagagagaagagacagaaagagattaaaatacagagggaaagaataagagagaaactggaagagacagaaatcaaaggaagacatagagggtgaaactgagaaaaagaaatagcgtaaaaggcaggcagaaagttaagacatgttgaagattgtgaaagttgtaagaaaagctataaaagggaatttatgcaagaaatagtgtataatttaaaagtaattaggcctcctgaatgtaaaattatttaaaaaaaaacagtttatatacaaggtatgtcagaaaaataaaataatacttttaataacaggattataaggagacataatatggatttttacctacattaaaaggttaaaaaatatattttgttttaaaggtttaagcaagttttaaaatgttaattgtaaaggaaattctgtgtgtaaacatattggctaaagctaaaggggtatcatgcagtttttctgtgaactggatgttaaaagcacaatagatttttcttaaagcactaacccgctctttaacaaaaattataaaagcttaaaaagagtctataaaaatcttaccctatagtcagacattaaaattgaataaataatgtctacaagattttattaagtttggccgggcacggtggctcacgcctgtaatcccagcactttggaaggctgaggcgggcggatcacgaggtcaggagatcgagactatcctggctaacacggtgaaaccccatctccactaaaaaatacaaaaaattagctgggcatggtggcgggcgcctgtagtcccagctactcaggaggctgaggcaggagaatggcgtgaacccgggaggcggagcttgcggtgagctgagattgcgccactgcactccagcctgggcgacagagcaagactctgtctcaaaaaaaaaaaaaaaagattttattaagtttaacattaatagcacattagtataaaggtaaaatttaacttatctggtataaaatcatacaaaaagcactgtcaaatataaaatggtgtttagctttcttaaggcctgaaggtggccaggtaagtcacaaggcccctcatgtccaaggccacagtgcacaggggcagtgaaggccccaagaaggccaagagcttaagaggaggcagggccgcagtgtcccctgggcggcgctgagcaggaatggagcgggaggcatcaccatggggcctcaagccccaggatatgcagcaaaaatgatatacttaatttatcttccagtttcccttccctcagaactaaaagacttttagttctaggtaccacccctagaatttccagtacaccagcaccagcctgaaaaccacgtcctcatcaaaagacagaaagaaaaaacttgagccagcctgggaagaaccctattttatgctgttaaccactgagactgccatccgcagagccaagaaaaaaacgaccacactccagtcaagaaaacatctttctctcagaatcatggatgactgtactaggaccaatcctactaagttaaagttaaagaaagcttaattttcctgtaccttcatattgcttcctttccttattgttactagcgcctttgttattactgtaactaactcacctcagaccaccgccttgaatgcttgttctgtcataccttgcggaaatgtaaaagatcaacaacagctagccttttcacacaaatgcttacgtcccagccctctgatggacatggttacccctagctctcattatcgtaatgacctgcagccaagatgccaatgttctgctcctatagcctgccaactttgtagtaaacgggactatacacattcaactgctcaggagcaaagttaaacttccaagaaaaaggtctgtgcagatctaaaacccctcatctatttcactgaaaggactaccctttcgaactgtcagccttatcagtgtaaccctgtccttctctatcaccacctccaccttaactaactctagacctgccctcagtcgcttctgtggtatggggattgacataaatggaaaagaccccctaggtattttttaaatacgcattattcccccatctcccccttcttcagtagcctcagttctagatctcacaccggttgcttctacatctaataataaaactagggtgtctattgtaaaaataagagatctaaaacagaccttagccatcgagagagtatcaagatgcaaatccctggctgaaatggattaaatattccgttcgcactttaaataaaagcgattgttacacatcaggttataaatgagcctgtctcctttgttcggtgtactctcatggcaaagctgctggcgagtgtaccctttctgcaggaagtaaaaatggccttgctgaggaaattaaatttatgttcacgtgctatttctttacggcaccggggaacaagcgtttcaaacacagttaagggaacaaattaataatgtttactaaagagacccagacttgggagtgtccagatatcccgatgtctggagaacaaaggcattcctgattttgaaaccccgtctctactaaaaatacaaaaaattagccgggcgtggtggctggcgccgtagtcccagctagtggggaggctgaagcaggagaatggcgtgaacccggaaggcggaggttgcagtgagccgagatcacgccactgcactccagcctgggcgacagagtgagaatccgtctgaaaaaaaaaaaaaaaaaaaagaaaatagtaatattgattcttgcaaaatatagtaattaagaaaattactcctttatcacaaacccttgtagcagatcacatctccccatatatacaagcattgcacctagggtggacgcgttcctcctcttacaggaacatgctactgggtctacggaccagctattctttcaccgctttaccttaataaacttgctttcactgtgcgctgcagactcgccctgagttctttcttacacaagatccaagaaccctcccttgaggtctggatctgaatccctttcctgtaacatcaggactgagatgagacgttgaccctcgtctgctcgggaggcacctgtccgagaccggagagggcagtgccctaagggcacaccaggggtgcacaggccctggcttcctgcacggacgctccaggcaacttttctggcaactggtctggccacatcggcctggtggccgtccccagggccccaggtgccatgctgcaggggcggttctgccctgctgggaggagcgagccctgggaggtgcatggccctcctctctccaactgcagaaaggccagaaggctttcagctactcggctcaatacctcaaccccaaacccaggtgaccagaacccagcccttcagctctaagctgtgtgaaaggggggctcaggtcctcgggaactcctaggaacctcttctaactgatcacctctccaacctatattcaggaccaaggaccagagaggtcaacactccagccacagaacagagtaccaggagagaggagaggggtgaacacgaaaccgtgaggggccaggttaagaaatggcaggagggaagcacgctaagcccgactatgaagagttgattcggggaccctaggaacccccacgaacaaaggcatcagtgaggaatgcccccggtagagagggaggggcgggagcggtaagaggcaggactccagcagtatccgaaagaggtgcaggcagcgggccttccctaggggagggggccagggactaggaggagcccccggaggtcccacaaaggccgtgctccggggccaggggcgggggccgctcaccctgcgctggcacaggtgctgcacgacgcgctcgggtgaggtgcccagcaggtgctgccggaagcgcagcagcgcgcacacgaagccgtcccgcaggctgacaaagcgcgcctccaggtagaacgcgcggtcgtcccagcccagcaggcgggtgcgcacctcgaagggctccagcaggcgcagcgagcggcggtggcgcgcgcacgaggccgccagcaccgtgtgcgcccgcaactccctcagcgccccgagcaccccgcagcgggtcaggtgcgcgacgcgcgcaaagtcggcctcgcgcaggtagcgcgcgttgttcatgtgcagcagcaggtccaagtccgagggcagcacgcggcccgggaagcgctgctcagctagcaggtcacggacgcgcggctgcagcaggcgcgcgcgcagcacggcgcacggaaggcgcaccaggtaccagacgtccagcagcgcaaagacagcgagccccagggccagcaacgccaccagcagccccagcatagcggcggcggcgggcgcggggtcctgcggagtccgtggcgccggtgccggtgtccgcggcgctggttacggtgcccgccaggcctcctgggaactcacgagcgcagcgcgcccggagcgaaccacagcgcgagggcggccgagggggaggggcccggagccccgcccaccgtggcgcgaccttctcagcgccctacgtggtccgtcccgccgtccaggcccgcgccactttcgcgttccctggggcggggcgggcggcgcgctgagcgccacagcggcacctggcggccgtgcgcggcgctgcaggcgcgagggtgcacgcgcgccccggcgtctccgccttcccagcagcgcgagaccctcgccaggctctgaagacgcggcctggccctggccgttcggcccttcgtctgagcgcaaaggctccagcacctccgcggccgaagccgcgggacttttcgtggaaaatgggacccagcccgatcgccagcggcgctgcagcggactctgcgggaacctagcttctgctccaggacctccagggccaccccagctcgcagggcgttcgcagcggctcagggcgaatcacgctcatggtccccgtgcgcattttcagccccagccggtacctccttactcgccctcacgacattcattccaccccctaaaggtcctgccaaccccaggctcttcccgagcattcccgcccttcctcccttttgaaaccggagcaaatcacggccgggcggaagcgggggagcccgggtgagagtcagtgactcagctgcggactccaagtgtcgccggaggccctggggcgcaggcccagcgggctgtcgcacagctcggctgtcctgtgccccttcctgacgaggctggggaggaaaggcggcccagagaaggccggaccagctctccccgtcagccccaggctctcgaatgacagcggatgccagcgaccggggatggggtcccggaattgctgggttaaacaagctccggattcaggcctgggcctgggctggggttccagggttctggaccgccctcaaagaaggagctccctggggcggcacctggctctgcttgatagccccagggacagggagctcactacctatcagggcagctcccccagtgccgagaccagctcggtcctggagaccctaacccagcggtgctagaggaattaaagatacacacagaaatatagaggtgtggagtgggaaatcaggcgtctcacagccttcagagctgagagcctccaacagagatttacccacgtgtttattcacagcaagccagtgataagcacagtttctacagattatagattaaaagtaccccttagggaaacaaagggatgggccaaa

SEQ ID NO: 12040 - DNA, 6000 bp, Homo sapiens
gaaaggtaaccttagaaattagagatcatcaacttccaattcctaaatttagaacaaccttcctcttcttataaagacttgcagtaagaacaggattaatatctaaaataaaaatattctatgtttacttaaatctatataattctcacttatatttcatatatatttttactgaactttcaccccttaaattgtggtatcactggtaaagtggggaaaaaaaaaaggaacaacatctcatatcagaaacacaaaaaggccctcttgttcccttaatattttaataagctttaaattttctaattacaaaagtaaatctcaacattttctttaactgctgctcacttttcaggctaaaatcccttttatgttcttcaaaagaaattttactttctaggaaccttataaatcatttaccatacatcattcaaatctcctccatactctatctagaatacagttaacagtgcttgtttaatactttctgccctgataaccacctagaattttgtggaatgtgctgcccaccttcatattctcccaaggatatggatataatttagattctgaactcaaggaagggtttatgttaagcaattaattcaattttattcaacacattttatgtaatcaaacttgactttgtaagaagtaattggtatctggtttagatttttccctcatgttccagttacttctacaacctttctaaaattggaatttcttgtctacccttaaaccagttattaagtgctactgaacattccataaaattcatgggaaaagattcatccattacatatatgcaaagtaaaaagattattttaggctaccacaacatctagaatactactgtgaacagtaaagactcttgactgtaataagctgaaaaccagtttaaaaatgaattttatcacaagtcaatcagtatatgctgtgaacagttctacgactatcaaatgctctggcagcaagtaaccaaaaattaaccatctgcaactcttgaagtttattgtaaaatgatatacaaacaagaaacattctaaattacatttatttatttatttattttttgagacagagtttcactcgtcacccaggctagaatacaatcgtgcaatcttggctcactgtaacctccaccttcctggttcaagtgattctcctgcctcagcctcctgagtagctgggattacaggcatgtaccagcacacctggctaatttttgtatttttaatagagacggggtttcgccatgttggccaggctggtctcaaactcctgacttcaggagactcacccgcctcagcctcccaaagtgctgggattacaggcttgagtcaccacgcctggcctctaaactatattttaaggcttcatcttgggtagtgtttttcaagctaaggactgcaatttattagtggatccaaaatttatttaatgagtccagaccagcaaatgaagaagggaagggtgagaaagaggaggaataaatagaaaacatctgagtgcacaggtagttaagagtacgatttcattaacttttttctctatgtacatagtacccgaagcaatgtgtattttaagggtgggtttgagtaaaagttaggaaacactaatctgggagacaaacagaagtggaaaggataaagcaacggaactgtcagaattaccaaattgtggtttaggaggtgagcaagactaacagcttctattgactaggagacagaggttttggaaactcccatagatttgtaaaagcgagacatccctatgtgaaaaatgacaaagcactttttcctcttacagtaagcctaggacaatgcgtagcaaagcttgtggttgtcaccactgatatttttatcccttcaaactttcaaaggtggcagaggtcaacctttactctctcctaactcttaggcacattgaatgcggttaagatacagtagcccctgaaagataattacaggtccttgaacaactacttctagaaaacattatattctagattacaatttagagtttcaggtaagactctggcattcagaaaagttaatttggaagtacaacagtcacatatcagagcccataaaatcgtcatctggaaagtagcaccaaaataaacaacaaaaaatttttttatgtatgtgaaatgtttcaaaaatctgaagcacaccttagagtcatttcatttaagagtcactctgtgaagaattaatattggagttccctaaatattggccaatcaacctgcttttctttgttaacagtgattgtgaatattcagtttcattaacagagctaattatttttgaagccttttaaaacacacacacactttttactgtatagaggacagtttcataaattacagctagtatctgttctaacaggctcaaggcgacagctatttctcaggatgcatccaccacccattacaactactatatattctaagttactcaattcccactattgttatagaaccacatccaccccatactattgttacagccctttttcactattataaacccacatatggttagagacagaagaggacaaaaaacatgcagccataaagaggatttctcagttccagggtgaagggttccctttaatctctgctgatatagtttaatgttctgcctggttcactacctcctttttttttttacactttgaaacctgctgtggcttgagacatcaacctttggcataatcacctgctggttttataatctgcggcccacactgttggaaaaaggagtttcagtctttgcttactaacaatttgtgttcctcactgaacacaaattccaaaaagataaaagctttgataggcacctaccagaaagtcactttgtgtacaagtactaaagaatgcaccaaaacaaattgaggggttcacagcctcttatccctcgaggcaaaagacttctagttcaaacactgatgacacaggttttaatgaaagaagagcccatttatttatctattctgatcggacatcacagaaattcaatgcttattatagtagaggacaaagctggacaatcctaatcaccctaaattaaagatacctctcaatttcttctctctcctgggccattacaccaaacctagagcagaactatacccaccttcagggcagaagaaacaacgtaatagcttattgatctctggtgtagacccaaacccacaagtcatcaggcaagcagggattacagccacttgatgcagctaacaatcaaaagtcgtgtactgggtttttggtcccacacaagcacacctctggcaattacccctacataaaaaatggaccaaactactctcctcaccaaaacaaacaaaaatactactaatcaggtacgggagcaacacatccttaattgtaccaaaaagaatttcttggctgtcagtaaatgcccaattacgttcattaattcttcatttagcgtcacttgccaggtttcaaaagccaccatcacattcaattccgtagataaatgccttcaaaagagataacacttgctgacaaattggctgttgactaaacctcaccaccaccaccattatactagtcaaatcaatgtttgtggcaaatgaattagactttttataagtaaaatttaccaaagtaatgatatcttctaattctttttctggagaaatcagagcaacactccaaaaaggaaaggttaaaactgagctctctgaaatacctattcagtgtgtttaactgatgaactaagaacggtgaagtcagaagtgtaacttaattatcttaagagatagatgttctttgcaattaattccattcagctcttgctcagaccccaacgcaatataaagctgtccgcacagtcttcagccttctcttaacccgaaaggagttatctctaacccgatccatcgactggaataaagtaacagtgaccacagcggcggacgaggatggatgaaattacaattgaactaggagtcaggacagatgtgtacaccctaacaggagagactgaggtggggctggaaactattttctggccttctcccgcgtgctgctcccggggaaccaacaggaccctgcacgcccggattcggcagagcccttgcccccgaggtggagtggggagaagtcagcgggaagccttttcagggaatcgagtaggacaagggctggcgcggtgggaatctcgccggtgagagaacttcctaaccccgggttgagggggcggggggaaggaccgtcccggcagcggcgggggcgagctcctctgctttctcacagtcaagcatctttgtgtgtggattgtgccaggctacgggtcctggagcaactggccgcgggggccctcgaacccaggtcgggaagtccgcccgccaccccctcgctccgccggggccctcccggccgggccccccagcccctctccaccacccgagggtctggaggtggacgagtggagaaaagcatctccgtgtggggacacccgttccgccacatccaccccctcaccggtctttgtcccgccggtagccagggtctccgcgggagtctccaggggaacccccgtcctggaggcctcggggcccgggtcgcctcagctttgttcggtcagcggggcgcggggacgcggacacttaccgtacaccccagcgaggaaaagcaagagcaacgcagacctccaccgcggagactcttttgtgctccagcgacaggccataaccacagcagatggagagagagaggaggagacggaggaggagggaggagaagctggaggtagacgacgccgacgccgccgccgccgccgccgccgccgccgagccaccggctgctccctgcgctctccgcggctgcgggagggggaagggaggggccgccgccgcccgcgcgcgctccctcctccctcctccctccggctcgcctgctcccaccccgggcggtgcgagagccccacgcggggcggccctcctgggggcaagggcaaggagctcgcgcgccagcgcgagacgagagggtggcggacgccggactccggcctcgcgccgctcgggctagccggcgccgccactcgccagactgagcgcgcgcccatccgtgcgatcggcaatcccctggcccgcctgcctcggttccctccccgcgctccgctggactttccaagtttcgggccgatttccacgcgacgggagcccaaggagcaaggcagcgccaatcgatgacagagcgtgcgaacgccggctgctggatgcccaggggctggagcgcggggtgtgtggaggagcacggtcgctgtccgagggctgggctctggcccagcgggtggggggagggggggtgggataccagctgggaggctgaaggtggttccgtgttgggggaggcgtggatggtctgaagctgacaacttgggagttccttcctctatccggtacccccaagtctccacttgctgtcggcgcggagcttcgagtgggggtgggctcaagttagtgcggccaacctggcagctggtcggtcaaggggcagtgtggactcccacgctcaaggtgcccggaatgagtcgggcaaggcttgtgcagagcccctccagtctggcgtggaagcgccaagaggtcatttgacatctcacgctgggtcgggtgcagctgggccaggatgttcggcagggctggagccgactttcagggtagatatattgaaaggaggattcgcccatcacgctgcagtttccctaaagctcttttctcactcccagcaaatgggagtcctcctttacttagatccccagaacacttttctaagtacgtctgtagtgacgctggcacatcagaccttaccccctgtgtttttaaagcgtttgtctacaacgtcttatttatattagattttatcgttgccctttgcaagcactctccatgctattcattgaagacctacactgcatcatgctgtcctattgacataggttgtcactttttaatcccaaacat

SEQ ID NO: 12041 - DNA, 6000 bp, Homo sapiens
ataaattaaatgtccaagactaggagcaaggttaaacaaagtgtgactgtcactgatatgactatgataccattaggaagcttttcaatggttttaaataaaatgaaaacatgttcacaatgttagctggaaaaatacagattcaaagccatatatgcagtataacatgtttaaaatgcatatgtatatatttctgaatagaaaaacaaacagaagcaaaaacaccaacagaggcacttctagattgtgaaattataggtgatttctgcattcttcctatctttctcactctccctcctaaaatgagatgcgtcattttcataagggctgggtagcgatgtagaaacaaggttttcaaataaggtcttcagatggattttgctaacttattctcagaacagtcaacttagtatgcaagtgcctagaatataaactaatctaacggttttcgcttctcaaacatacatgatttttattttatgctgtggaggcatacaattgatatcgttagtgccctgggcctccctgaatgagatagagaaagtgaagcaagtttgctaagccatacataaatcaggtttttcctttttttttttttttaagagacagggtcttactataatgttgctcaagctggtcttgaactcctggactcaaggtgatcctctcacctccgcctcccaaagtgctgggattacaggtgtgagccaccgtgcccagccttaaatcagcttatgactcgggcattctccttcaccctttgtgggtgaattcagcttgagacgctttaccatcccatcatcattaccatatttctgattcatcaggtcccctaacttcccaattcctcgttcttgactcataagctccttgtcctttgttaactcgtaaattaaggggttagaccggatgacctcaaagatccttttagactctaggccctcactgacaattgccttgctcccaggaagcacaaaaacatgttttgctgtggggaaaatttcaccaccctacctactcaaggcagcaaggccattcccaagacctccttctcgtttcacctccaagatttcaggcataaggctttaaggccccccttaattttccacagactccattaataatttgggatcccatcaactattttctccattcgaagccactgtgcttttatattttacagctctacttcagaaacaaaggaagccggatgcggcggctcaagcctatatcccagcactttgggaggctgaggtgggtggaagttcaagaccagcctggccaacttggtgaaacccagtctctactgaaaatacaaaattagccgggtgtggtggcacacacctgtaatgccagctacttgggaggttgaggcaggagaattacttgaacctgggaggcggaagtttgcagtcacctgagatcatgccattgcactctagcctgggcgaaaagagcgagacgccgtctcaatagaaaaattgaaaaaaaaaagaaaaagaaaagaagccatgctggaaagagtaggtcaaaattgctgaaaaaacatttaaaagcaagttggaaaagagactttaaagggaaaatggtcaaaaaagcaaacatccaggacgttaaccattaatattattgaccagtccaaaaggtattggacacagccaaatgaaggaatataccaaaggaaaggcatgtgtgtgaggggtggcactctaaggcaggcacccgcaagcggcagctgcctgcttttgtagataaagtttcactggaatacagctttgctcattcagttatggattccgtttgtatggctgcgtatagtaggcattcttatatattatgtatatgatgctttcactctccaacagattctacagttcatcttcctatggctccacttctagacttttgatgggtcatttgggtgcatgtgagtagtatcctacactgcactttatggcctaactgtgggagagggaagtatgttagtaatgagtctccccaatcctcttctattttcaagatcacaggttttttaaatcctgcttctcttctccctagtaacatcacccaagaggtctgaatgactgaaaatttaaaaggactgtgcaactggttcaggcaagaaaagaaaagatgaagcttacaggtgagcccacctctgtccctcttgagctcacaaactctctctgcctgggctatgctatttccatgaaacctccaaacgtgaaaaatcctttcttccctctcagtcagctgccctatcattgaaagtcttcgaaatgatagttgccgaaatgaaggggtaacaaaaataaaatagaaatatgttaatagaagttttctgagctaaacttaataaccagcgaatggagtaggcagttttaggacgttatgaaacgtcctggtttcatattcctcgcctcactctagagtaacatacaaaggcgctcgaacctttaccaagagtaggtctgatgggacttcatttttctcctaacacctgagtctacatcagggaatccctcccaccctcctccagaagaccaccagtctcaactgagacaaggactccgcatcactcctgcagcccctcatcacccataaccctccaatccacagctggcctagggccctgcggaaaagaacaggtctctctctagtcttctgctggcttcaaaccaccctctggacttgccctctctcctagaaatacatttcccatgctcggcctggcccgacttacttctctccaaactgttcccttaaaatctttttactccgaggtcaaaactcttgaggcctaatcactgaaagatcccaactacacaccaagtattaacagggttttcccccactagaaaagcgagaagtggagggatacagacatacgcctgtcaatcattttttaggtaggtatgcccctcacatctctggacattaagcacgtttccggaagtctgaagagccacaattctgactcttccagaaagcacttaggctcgattctctcttgctcgtgagttcttatgattcctccggctccccacaagcaaacgaatgggaaattcccacaggataaggtatttttaacacatcaaataacagtttaagaaaacggtttttctttcatcacaaaatatttcaaagtccctctgctaaatagcaagtcgctgagaaggcttcgcttcgctccagactctgtgccccgcagttactatcccagcacacaggtcacagcgatagtcactgtatcagaatgcaggactcactgccgaacaaaatacagaaaactgcagagtctgcatggctgcaacacacaaagcctttaaaaacaaaagaaagcacggggagctctgccagtaaaaatgaagctacctaaattggacaaagaataggacaaagtgacaagaaatgctaaagacgactcttaagtaaatcacatatgggggaaataatggacatgttgtggtgttctgcgcttcctcctccaccaaaggagtcgaaccaagaggacttgatgaagcttttagagtttttaaaaagggaagaaaaatccaggttgcggggaagggcgggggtggggtggtgcgggtggcgggggaggggcaaaatccacaaaatttaagtcttctgagagccaaacagattttattaataaaaggagccgaagctctcgctcaatgtggggaagagaaagcagcacccatcagcagccgggcagccctggctcgcctccgaggggctcggaataggtgctgtccccgtcgctgggctcggagctccgccgcgcacacacgccccgcgcacccctgtccggtccagcccgtgcagcgcgaggccggctctaggggagctgggcctgggagccagggtcctgcagcacctggaccctcggacaggaagcggctcctctgactgtggctcctgaaaggaggcgagcccggcaaaaagagccagcggggagggcagcaggcgactgcgtgtagaagcggggggcagatgtgggaaggtgtgctcgggaaggggtgggggtagtccggagctgcgcctccgccgacagaagatgctccgggccagcagccagagaaacgccgcgggtcacagagggtggagggcttcagggagcagaggaagcccaacagctgcagccgagcgtccaaaaaaaggtggaggcgggtcccgagcagcccaaactgggacgagagagggcgtgtgggggcggggagggggtgccccagcccagggacccgttagccctcccggctgccggccgagggcctggcggcctctccccgggcccccgagccaccgggcaggcctactccgctcggaggctgcatgcctcccgccgccgggcagcagcagcctccccggggcacggcggacccggtccctcccgccgcgtccccagcgctcggggccagccccggcaccctcccatgagcccttccgggcgcggcccccgctcctcgggctcacgcgcggccagcagtcctaccggcttccagctcagggacccgccgccgccgccgccgccgcctgcgcgaaagtcggcgtcccagaagccgttctggctgccggccgcccgccttccaggccgcgcctgatccgccgctccccctgccggccggcagccatttccgacaggcgactgcggaacttgccgaagggcgccgcgccggaaatggccgaagccggcgttcgcgagcgggggcgcggacgcgggcgcgcgctcgccactttcccgaccgcgtccgaagaccgccgaggcctcccgcagctccgcggtgacacccgggtcaggggcgcggggccgggcgccggggattgtgggaggcgcgggggggcgcgccggccgccttcggagccccccaactcgcgtcctgcaaaggccgccgggccctgtcgagaagacccgaccgcagatggcggggaggatgctcccggcggcgtgggaaccgggtctgactcccgagccaccgccgcttccgcaggggcgccggccccgggaaagtcaagtcataaatccctgaatctaaaactccattctcagagaaaaggcctccaaggacgggcgccgtgcgcggcaactgcctgcagttttgaagccctttgactatttcataacaaagacaaggccgggcggcttggacgcttaggaaaatcctggggctttgcaaaaacaacaggttaatctagtcgtgtgggatgatcaccaaaacaagacaggaaagaagaacaccgtgtcaatgctgaaaagccagcccctgtgagccccaaagtgcacgttttccacagtcccaaggaacacgtgactgtgtgtttccacacttgagaagtcaggataagaccccttggataatggaacaggggatgggggtgggagcaagcaccctacctggtcacctgcttaacttagaaaccagcttttaaaacctgtaactgcagtatgagctacgatcaaatttgtcttaacgtattttttttaatgtttttaatacccagaacacagggcttctactccagggtttcctcgccagggaaccccaaacacacaggacctggagaagccgggtagagctggctcctggccctgcgcttgggtggtcggctgccttaagaagaactgcaccccagagacaggctcgcagctgccgaccttatccactcgccctttctgctggagcccaggcccagtgctccagcaaggaggctgagaaaatgctgaagactgatgcccacgggggacagcttgggctaaggataacgtttgcaaaacaaacctttaaaaacccatagcaacctgtttcctagagcacactcttcatctctccacccccaaactagtcccgactcggatcctccttttcctatcctctttctcttgctctcccgtctcctattcacttttcttctcctttcctcttgattattataaacaaatgctttccaagtcttaccgccatcatatgtgtacatatgcaacccttactgttacca

SEQ ID NO: 12042 - DNA, 6000 bp, Homo sapiens; identical to SEQ ID NO: 3470

SEQ ID NO: 12043 - DNA, 6000 bp, Homo sapiens
catcgtggcgggagcctgtaatcccagctactcaggatgctgaggcaggagaatcacttgaacccaggaggcggagggtgcagcgagctgagatcacgccattgcactctagcctgggtgacagagtgaggctccatctcaaaaagagtcctttacaaacaacaaatgagattcttcaaagataaatttagcatcaaattctaaaagcagcaaaaattagattatccttttagccaggcttccaaataaaattaaaatttgacctccagctggtttagcatgtgagtttaaatagaagaagaagaggaaaaatgtaaactacacactccaaaaagtttcaagtttaagctagcagtcttgctcctagccatttccaggcctcctaagcctcacaccctgctagcattgctgcagttaaactcacaccacaattaattagtagtaagataagttagtttagaatataaataggctacagaaatatataatgcactcgaaagtaaaaatacctgagtttatgacagtttgaacatttacagagctgctctccatttacaaaaatggaaaaatgaaaaaagagacttattcagatgcatcttaaataggttaccagaaactgtaatgaattacctaattctatgctgtatgcaatgtcataaatacaacatttctttaattaaatgtcaccggttggggcttggtatctttcttgttatatagagatgttaactactttgcacttgttttagaggaagatgtgaccagtcactacatggactggatccttgaaaagtaaagacaattctgaatatcaaattccacttccagtggggctcagtggcacgtgcctgtagtcccagccactcaggtggcgagaggggaggatcacttgagcccaggaggtcaagttccagccaaggcaacatagcaagaccctgtctcaaaaaaaagagagacccttttgtagttcacaagtgtgatgattggggtttcacgcttatatgtgagatgtgtctctccctcaaactttgttctgacctgagcaccttacctgtcataaaaagaaagaaaaaaaggaaagaaaaaaaaaacccaaaccttgaaaactgtttcaagattgttgaaattgtaaacgtccccaaaatctgtatggcataaagaacttgcagattttgaatatctttccttttgaatatatttccttttgaatatctttcctttatacactccttaaaagaaatacttctcttgtgaacccctaattcttcacccctcctccacatactcactttcagaaagcttcccaagcatccctaacattttttgaccattcaatttttcctaactcaaatatgaagccattcattgtatactatgatttgaattatgtggacagatatttactgtaataaaactatgattccaaaatttacaagcaatttttgattaatgtgaagttccctggaaattaaactcttacattactgccaaacagactactttgttagccttttcagtatgtataatctctttagatgctaactaaagagattccaggcccttctctcacataaaaatgctttctatttcccaattttggtgagtttttaaagaataataatagctaccacttattgcacaccttttggaagtcaagtattgaactaggcataatacaaattggttaatttgtcagagtaacccaataagccccattttacagatgaggaaacttcagttctgagctgccctaggtcacccagttagcaagctgcagagccctaacttgaacatgaatcccttcagctccagaatccatgcttttacagtgtatctccattgcttcttcattttggctagtaatacagtatttctttctttctgaatttctttgtcaatgtcaccataaatcctctgacatttcctcaatgtatctgcacaacaggcttaacagttctgcaaaaaaaaatcaatttctctattattctagcacaagtactgtaattctataattatgttaactttgagattcagcagcaattgttttaaaagtcgaatagcaaaactaacctagtctacaaagtcctatatatagataacatgctttgaaatcctaacaccttaatatatggtaagaaaaaggaagaactcgcacaaacttcacttttgtgtatcactttaacactcacttttgaattgacttaaaaacctctatttagtatttttgtctatttagattttcaaattttataaatttatataaaggtgaaaatccactgtttaaaaaaatcactaacatgtgaggcaaggtataggtggtggacttccctagaaatatagtaagagaatgtaaaatagtttatataaaatcaaagttatactatgtgtcagaatttctgatttatatttcatttcattcaaagcactgcaaatataccttgcaggtcacagtacccctaaaatatgtttttaaagtcaggaattcttaccatgtggagatggtttatgacaagttacagaaaattgaatatactacatatattaaagtactactttaaggtcaaagcagaaagtacatgcaagtatcaaattcagaaagtgaatacaaatgtttaacattgggttttttttgagacagggtcttcttgctctgtccttcaggctggagtgcagtggtgaaaccttggctcaccgcagcctccacctcctgggctcaagtaattatcccacctcagccgcccagctgagaccacaggtgcgtgctatctatcactcctggctaatttttaaaaaatcatttgtagagacagggtctccctatgttgcctaggctggtctcgaactcctgggctccagtgattctcctgccttggcctcccaaagtgttgggatgtttacaggcataagccagagcaccaggcctagcactgtatttaccttcacaccatatcatctgatacttgcaaaaaatggctgtgaggagaacagtacaggtgatattatttcctgataaagagcagaaaaattgaggctcagacttgggtcacccagtaggtaggtggcacagcccagacttaaagcttgagaatgttagtttccttctacctaccctttaactatacctgctacctccttagcagtggtttcaaacatgcatgacacaatcaggagtaaataatatctgtatctagatccagaaaagcccatttgatgagaggcgaaaataaggttaaaatattatttaattttaaaattaaaaaaaaaaacaaatatgctccattaaaaagaaaatgtattcaccttttggtcactggtaatatcattccattaggttttctcaaggattcttaacgtcgctcatctttttttaagcactcctatgtcccaggcactatcctagactctggaaatacagactcgtaaaaatactccaaaatctctactctcacttgttacatgcaggagagaggagacaaaacaaggcaggagcaaaataatttgtatatttactgagacataaaggctccagagaaaaattaaaaagggaaaaaagcaaaggaatgagcgtgtgtattggggagcgaggggaaaaacgtaggatgttactcgttcaccttgcaaagtttatcatccacattcaacagctgttaaataagtcatcaaaatactagatacgtgggaagagaatttacacactcctgacattcccatcctctcctacttcaagaaacaaaattactcgattccttggcaccgctgttcagaacctcgatttatccatcagaccttgtttctttaaagcgtcagggcaaaaagttcgttaactggtaataatatcagtttaaaagacaaaaatgaaaacaatctggcgcgcctccactgcgccggtgcccggcggccaccgcccttcaagtcgaaagcagatgcctgactccggtttctcgctcaccccaatctcggagctaccgggggctcccctgtcactcggggcctgtggtctccaggccggcactcctcagacccgggggccgggcctcggccttccccggccctcgcggggctgacgctcaccgcggccgaggctggcagtccccccaagtccgcccacccgccccgagccagctcggcagcgcaggggccgcccccgcccgcaggcccctcgccggctgccacgtaacccttcgcgggaaccaggaactgcgccgcgcagcctgcgggagggggcggcggcgggtcaggaagggggcgacgcggcggtccccaccccctgcgggccgcgatgaggcccaccgggactttgcatctccgggccggccgccggggagctgccgccgacgtggggcagggcagggaaggcctgcacctcagggactgggggtctgcacccaccccgggcccgagccccccgcgtcctgggcggagaagccggggctggcatctggagcccgggcccgggctggaggtggcggggcaggcggttgggactcggggcgggctcacctcaaacatgagccccagcaggaagaccatcgccacacaggagacgatgtccgcgtgattctgcaggacgaattcgtggctcagcactggggggctcttggtgcttttcttgcgaatcgccatggtggggccgccgcccgcgcctgcaggtgctccgccccggttctgctcttcccagctgctcaccgactcgccgccgcctcccgctggctgctcctcacggccccgctgcagccgctcgctggggcttcacttcccatcccacagccagtacgcagccgccgggccgcccgggggaaaaaaaaaaacacaacagctagcccgcagcgggggcgagcatgcgcaccagggagacgacgctccctggtgccgcggccgcctccgcgagcccacagcgccacctggggaccggaggccgctggcccgcggccgggcgagcgtgcaggaatgtgagcggcgcttccctgcttcgcgccgggcccgggtttgggagtcgtttgaggcgcgagcttcctgcgcctgctcagcagcctgaggccgcggccgggtgccctcctgccctcctggccatccagggattgggtgtcagtggcctgttgcacattgtcacttctacaagtgactaacaccgtcaggataatctaaaactacgaatactacctgactccacaagggtacggtgtattctccagttttagcatctgccttaaaaattacctcagagttaagcactgctggggacttatttctactcttggtaagtttggactaacttaaaaaaaaaaaaagagctgaccctattctggtctgcctctccgtccccacccccatccccgtccccatccccacccctatcccccactggcctcagactgaagacgaagggatcagtttgggtttactggcttcacatatattcaaattaacaacatgttttagtaatctaagggaaatagtaaaagagttaaaaaggatcgtggattaagacacgtcctcctcttatcgttttgcccaaacctggagtcctttgtattctttttcctgaagaattgctctcctgtttacccataagccaaatgtagaaaccaaagtcatgctagattgagccctttcagcgcccttccacatccagtcatcaccaattcgaggcagacctatcaccccgcttccccactaccgcagtccgagggtacttgcctcttgcctacaatattacaactctggtgtaaccacttagtggtttaagaatgtgggttgttaaatcagaattctgccacttattacttgtacgatcaaggacaagttacttaatctctatgggacccgatttcctcatttttaaaaatgtattcatttatgtacttactgagggttgactgtgtcctgggcactggggatacagaactgaaatacaaattaaattattcctagggacttatcattctagtgtgggagagaatctttaaacaagatttcaaaagcgaaacagatgttaaattg

SEQ ID NO: 12044 - DNA, 6000 bp, Homo sapiens
gaatctcgaaccctattgtgaactgcacatgcaagggatctaggctgcacactccttatgagaatttattgcctgatgatctgaggtgaaacagtttcatcctgaaatcatccatacctcctccacccccgttcatggaaaaattgtcttccatgaaatcagtccctggtgccaaaaaggttagggaccactggcttaaatgacctcatgatcattttaaaaacatttgccactaatgaattagtatgtagatctaagtacctatcaaataacttacaatggcctatcacagcactaaaaaaatgccaatggacacaagctgaagataaaaagtttggtgtacagaaaggagccaagacaggacactaattttaaattcattttcaaagaaagacaatataatgactttaaaaaaattatcatctagcactatcacccttacacaacctgtttcatttgctggatgttagttttacccctcctttcctctgtgacaagtttgtctctcttaataaaattaatctcccccctacctgtgctctatattggtgtttttaaaattgcagatgaatcaagaaaccaattgaacagattgccagtatcttttctttaaaaccagactggaattgaaaacaaatataaatgacattacaagtagttaaggataagtaatgtttcatgaaacttgtgtttcagtaatgtttgtgtgtggatagcaaaggtaaaatttatttcctactaagcgttctggtcaaaaatgcttgttctagatcctgcttcttcagataacccaccttagttagatacgttactctttatcctcctgcctccatttcccaatttcttccttgatttcagttctttcccattagtatttaaatagacttaagtctctcctaagtatttcctctttgatctcagtgcccccttatcaggtaagtgtctgcaatgagaaaaccagcccctccctggcccccgagacaatctcagcagggactctctcacccctgctgcaatctggtttgagctttaccaattactgcaagcgctctaattaagaaccttcaaaggcactttggagttctctctttcttaggaaccccttaatacacctgatattgtgtaaatccctctcttctggctcatttaacaccacattttcttgaatgtcctcttgcttctttgccaataaatttccttggcccccttttctctgcccatccttaaatgctgatttataggcacaatttccaccaaataggggtggtgtctcaaccattaagtggcttcaactgccatccctgtgcttctagtcctggtctcttattcctaacatcctgccctactaagggttgtggttctactgccagtttccattttcacatggcataaaagataatgtcaatctggcagcttaactttctggaatcattctttatttccatctctagcattttaatttaccctttagctataccaaactacccactcatggtttcaaactaacagcatatgttacggaaacagactttctgagcttgaatcccagttctagcaattactttgcaaccctgagtaagtcacttgattgctctgtgcctgagtttttctgtaagataggaaaaaataatagaacctaactctaaaaattataaaggattaaatcagttagtacatataaagctcttagaattatgcctgacatattgcaagcactctgtaagtactagtttatttatgctactgggtcttgcgataccacatacttacacaactttactcggcactactgttactgaattttacgttttggttccttaatattttggatgtagtcatagtctctacattcttcacaaaagctcacacacaactttaacttgcagattaggcttttgggtatttgagaaaattactatttttacatctcattctttgttggggctctctcatcattcttgagggtttaaaattacagagtaaagttagaaggggcctgaataatcatccaatccaatctttccacctaatacaagaatatcttctaacttctgtcatccaactactatctgaaccacttctgatcatcatcaatttcatttctgagcactgccacattgccaaaccaaaatctgcttccttgtaatttccactcaacctgtgtctgaccttaggatcaacccacaataaggcagccccctttcccacatgtaagttctctaaatatcttgaggtttttttctctcccgagctaaactagttcctccagtcatttttcatatgaagtaatttctaatctttctaccactctggacacctctgagttccaatttatacttgaactcacagaaaaattccaggtttggtttaatagcacatgcattcagaattaacccccacaccctgtcatcattagattttaactttattaaatgagtttaattacatggaagcataaaaattatagtatgttactcagcactgatgttgataatcaataaatttttatttcgttattcatcttcttaagttttcctcctatcaccatttcacagctacactgtgagctttattattacaaagtcctgcttccactcctggatctttaatttaggcctccaatccaaactcaatccttttatctgtcacctcagccccactagtctcctaatactcttcccaattcatcaagactattaatcttctcaggtaccaagaattccctttcctcaggaatgatatgcttcaaagcactgtctaaactcatcaggccaaccacactattcttcaatgatcacctcgactatcacctcttctgctcctagataaaatgctactgaagacagacagcaagtcatacaggcctgcacctgcaggcaagtctaaaattcttccaatgttcaaaccattgtataacaggtacttatagaggtaatacggtgaggggttaagtgccagagggttccagagttagattacctgggtttaaatcccagatccatctttacaaacttgtgacttgggcaagttagtcaacttctgttatcctcatctgtatagcagatatcataaactcacaggattgttcctgtgaatagatttacaggataataaatgagataatgcatctaaagcatagttcactgccttgctcctagtaaatactcgataaagattacttgtcaataacataattatttgtgcatgcatcataaaacttcatgacattatatgtctttgtggtgttttttctagagataatactccataattttcgatgattttccttcatagaacgggttcttgcttcctctccagctgtcaaaatattagcccttctatgggaaaccccaagccccaatcttccactgaaccttaaagatacacatggccatcagtaatgtagaattttcttaacggtttacctgtatttatattttgtttttgtatttcttgattttatgttgtctagaattaccttttatatgactaagtctaacgcctacaattaaattctaagttccctgaaggcaagaactttattagatacttctgtagcccatacagcagtctacaaatattaagagaatataaatcaagtgaactgaattgcctaatgctaaaataaacaacttctgtagatttaattctcaaggctgaacttaacttgtaataactttatttggaaactattttctgcaatttcagttatcaaagatcatctttgaaactctttccagactttagtgttgagtttaacttctaaaatgctttgttaatttcaacatactcaattcatctaatacacttaaaatagtatttcgattctagctattttttcacagaaacttgtaccattctacaaatgccaaaaaacaaacattcaagagaattctattctaaatctactcccaaccattcgctgaagattacgccctatcccaatactagtcgagctgccaaaccacgtgggtatgctaagatttcaaagttcctccaagagtgaatgatttgcacgtgtgaggactaaaccttaaaatgtgacaatcccttctttattttacaaatcaggctttgaatcccatcttctctgccaatgaggatgttttttctcagacttctctacatacatgccccctctcttagtcttgaggagcggggaagatcgcaggccgacccctccaccaagcaccatttcctcaaatctagttcaggttagccaacgcggacagcaacgctcccttcaacgctcctcctccccctagaacggaaaagacggaggagatccagttcgggctgacagtgagaggatgcagcccggtgtctgggcgggctcttaccggcgaagcggatcttcacgaggtcgagcggatgcagcgcaaggttggataagacgccgccgctcacgcccgctatcaggttctcataccggacgtggcggaataccgtgctccacgccgacgacccggacgccgactggccctggcccgtcataggctcggggcccgtcgacaccacggcgcccagggccgcggaggtgggacgcgatgcagtggccgccaccgtggcgacggtcgccccttgtgagcgcaaccccacctccgggaccaacgagaggactcttatgcccaaggcgcgtgagcgaagccggagactctagtactgagggggcaagaacggggcacagacactacgtcacgccggcggaaagcgcgatggaggggaggtcccagcctctcccgagtctccgccctgcctcgcccacaaatgctccagcccacggacgcggaagcgactgcacagctaaagaaccgccccttgctaacgtttgccggcaaaactacggagcggcgcaggatccagttgagccagcaggccgccgctccgcgagtcacgtgactggaagtagtctgggaaaagcggaagtcgcctgtgggaggaggtggcggtgggcggaactcctagcggacacctcgtggagtccggccggaagagcaaccgagatgaaggtgaagatgctgagccggaatccggacaattatgtccgcgaaaccaagttggacttacagagaggtaagataagttggtagggagaaagggacggtttccgcaagtcgttgggtctagcctcggctttcgcggagtaaagccgggggaggctggcactctggtctggttctttctcagttacctttcgctaaggcaaactttgtgcttacggagtcgctgcggaactggatggatagcaagtaaagtctgttcaagtcctttttctaagaatttcctctagtggtgagtgggaaacagttgtctatagtggagaaaaattccagctgctgctctgggattgtcttcaggttcctattactgaaaagtggacttgaatgagccaaactcgtgggttgaagggctgagagttaaacaggcttttaaaaccttcctactgctcttcttgccgctttactacttcacattagttgtggatgttggaagagacaaagatgaatttaaaagcatcagttttctcttaccatcccttaagaagtttgatgaaagaatggttaaatgaaattaatttatccttcctggtctgttcccccgttaacatgctaaccacttataaattgtactttgtgatacctaaatgacaagggaccaaccatgcgtaagcagattgttctaaataaagagaataacaggagcaaaggtcttcaggcaggaatgaacctaaggcatagaaagaagggctgtgtcattagtttgaatgaggagtaagcgagatgagatgaggcgaaaacagtatttcactattttggttgagtaggagatattatcaacatgtgtgtgagcattgctaataagtctctgctcaaaagatgtttacagtttgtcacaaggcagtaatgtttctaaaatataaattagatttgtcacttggatttggcatcgttcccagtccttgaatctctggtcccaccttccttgccactttagtcagtc

SEQ ID NO: 12045 - DNA, 6000 bp, Homo sapiens
taatttcttgtatttttagtatagacgtgttttcaccatgttggccaggctggtcttgaactcctgacctcaggtgatccacccgcctcggcttctcaaagtgctgggattccaggcgtgagccaccatgcccatcctgtttgttttttatctgtatttatttattttttttgagagagagtctcgctctgttgcccaggctggagtgcagtggcatgatcttggctcactgcaacctctgccttcagggttcaagtgattttcctgcctcagcctcccgagtagctgagattacaggcacccgccaccatgcccggctaatttttgtattttagtagagacggcatttcaccatgttggtcaggctggtctggaactcctgacctcaggtgattcacccaggtcctcccaaagtgctgggattacaggcgtgagccaccatgcccagccagcctgttttttaagacagggtctcagtctgtcactcaggctgaagtgcggcagagcaatcatagctcactgtagccttgaacttctgggctcaagggatcctcttgccttggccttccaaagtactgggattactggtgtaaaccacagtgcctggccaggacttgcattttgggattagtttatggcctgtcaagacttgaaaattcagtgatgaagacagctgttacttctaaagttaacgaagaatactggttttgactcaactttaaatgtgttcatacactgagggacaggccaaagtaaaagataatgctgtacaggacaaagtcagatgtgatgaagattttaagtaaaacactgtaccaaaacaaacaaaacacctctaagatccatattgtagaaagaccaaaagacagagatcttgtgaatacattttactttctttagttctgagcccagcaattttatgtcaaactggggcaagtattttgaaaagtagttcatttacgctaaagccaatttaaaaattctatatgatatatattctatgtatgcgatatataaatactgtgacaaatttttacttcgtccaggtgtgtgaataacagtggaagatggtttaaaagacttccttccactcctaagtagtccctttaataggaaaaacacatctagttgtagtaaaaactgtaaaaaggaaacaccgtaacagtaaccccactcacttctgcttcattcctgtaaaaagtcatatgttccagtgatactggctcatgcccactgtatttcatgagctggcactgtctccaggtaggcgaagcatgggtgggggtgcagggagacacagcctcaggcacccagcatgctaaccatatgaccgctagaaagcagtgcagggcccagggggtgaccctctactgtaaaggaagccaaaatcgtctaatttggaccatgactttgaagttcacattttatagactcaaaataactaagctattttaacctcaaaaagtttaaacctcagagtagtgtgtatattctggcttctggttctgcttgggttgatagttagctgggggtgggaagtggtgtttgtttttttaaatctggcacagaaatagttgaataaggtagactgttccacccattccttttgattatttttagttctgctctcctttcttctaaaggagcagtttgtggattttagcagcacttaggttttcctaagcgaaagtcaaagataaatgtatttactggtacctgtcattgtgtatgagaggaaagtacggatagtaagcgtcaatttcaatttcaggtaaaaaattatgttctctttaaaactgttggttttagttgtcgcttttttttttagtttgtcactttttttttccttctccgttatttattttgcaatgcatatagtgcagttctcaacatttgctataccttaatcacttggggaactttcaaactatattcacagccagggtcctaacaccagagtctgattcatttgacctatgggcccaggtggtattttaaaaaagtgacccagtgaatctttaactcagatgactggaaaaaaaaaaaaaaagtgagccaggtaattttagtgtgcagctacggttgaaaaccagcatggtttcaaagttgcttaaaaacatctaggttctagttccagccccgccacttaccagctggctgttcttggtggtcttctgtttcccataggatgatgaggttggattagaaattcataaaaattgttgaactctacaacaaaatgaaataaactgggattcatataatttcatctggtttgctcagctccaaagagatgaaaattgaattatctggagtatgagagtgttgtttgaaacaagttagtaataatttaaaaaacagctcttaagtaaacttttccctcttcccaattacaaggcatgggagaaaagaaaaatagacatttaagcttagaaatcacaggagacttccagggctgctttgcctgtccccagctctcttaaatggggagctagtcagacggtacctggggaacagagggaggagggagagcacttactacacatcaagaaggtaaatataaaccccaaaggcttacgttactcatcagaccacaatatggcctggtactaagcagcgcgcgtgtggaaggctgggtggggtgcgcacacacgctcacttgtgtacgtacacacacacacacacacacacacacacaggcacacacacccgagctcagtcacccacattgcttgcccagggcgcctggaagagctggcgagcccgcccagctctgttcacccggccccgccccgccccctccgggagggctctccgggcggcgcccagccccgagcagagcaaaggacggcggcggccacctccgttctccggccgctggtttctcgtctttcctcgtcctttcattgaacccatctccgtgcttcgaaaatctgactctaacccgatctcttcgcgtctccgcctcttctttctagagtgagcgccaaaaagggcctgacagacagaagcctttggccccagcaccggcccagcccgtctctagacgattcttgctcctttcaccctcacagcctccagtggtcgcttcatcttcgcaccctcccggccaaccctaactctcctcgtctctcctcgcgctgtctcgcgtcctcccctcaggatccttccgcacattctcagcgtccagcgcggtttcccacaacttcctcacgccccgctcccctcgccctgtccccgccctcgacaccacctgcgttccccactcgctccaacctccctcccccgctatccccacttgtgggcctccagctctctgcccctttcctggcccccatccctgacaccccagggacccttcctccctcctcacgttctccctccttccaggatcccgccccgacacttcggggccctcccgctacgcgcactctttctcctcaggtcctgacacctgggcgccccctccctgtcacccaccttcagctccagccctgactctcgggcgccttgccacccttacgctccccgccccgccccggtccctcgggcgcccccactcgccgcctctacctccctacctgctacacctggcacccctgcccccacccctgctcatactcttcccccgcccccgacacctcgggcgccccctcacacgctcctattctccacacttccgtccccgaaaactcgggcgccctctcccttcacgctcagtctctcctccctccccgcccggccccggacccagcctggagatcgcgctcgggaggggcggctgccgcccgcggggcgcccgcggtgcccgggcctgggcagcgaggaggtgacgccgcccccgcgggatgagcccgggaggcggaggggcggaggaggtgctggcggcggcactgagcggcggcggcgcagggcgcgcgggccttccgcgccgactccatcgacccaaggggcggcggcggtggcggcggctgagcgaccctgggccgggcgcgtgatgaggaggggccggcgccagaccccgctgcacgtcggagctcgcctggatccgggcgttggcagccgaagggccctggccccgggactctccgccgctagcccccgtcatatcttctccgctttcgcttctccactctagccgggggtggggtgggtggggttggggtctccgcgggggtttccggccccgcggcccgctcccgggtgtgcctggaggagttctccctctgtggcgcgcgggagccctgtgatgcgtcagccggcgggacggatgagttgcttctccgggaaaccgtcctcgcttcctcacgaccctctcggctcccgcctgggtgcccctcgggccggcagtactccgcctccgggcgctcgaagcgagttccccgggggcttgttcgcaggcaccccttcccctccgaggcggcgcgcgcgctcccggccctgaccgcggccggacacactcgcgccccggtccgcctgtcgccctcccgcctgctccctccagtcaccccacccttagctgtccccgccaccttactccaccaccctcccccgcctctccgcgcactccgcgtcccggcctccagttcccctttcccttgaaccgctcacttcacagcccttcgcccccgggaagaagaaacatttcccgaagcgcactcctcagccctccttccccacgcgctcgccctcccctccccctgcttttcttgggggaggggggctgtcgccttggattgaaggccattgatttgtatgtatttgtcccagcgctggaggctgccccagccgccgcgccggtgccgccgctgccagtggagttgcctccccgcttccctagggtggttcggctccaccaaacatgtcggctcctgtcgggccccggggccgcctggctcccatcccggcggcctctcagccgcctctgcagcccgagatgcctgacctcagccacctcacggaggaggagaggaaaatcatcctggccgtcatggataggcagaagaaagaagaggagaaggagcagtccgtgctcaagtaaggacctggctccatattcccgcctctctccctgccctccgccccctcgcccactgccctgcggccgcctgcgcgccccagttcgccgccctccctcccgctggcggcgcccaggccacgagggctgcggccagcgccggccgcccgggctgttttaggggtgtctgagagcaggggtgtgtgtcggggagggagggcgccaaggccggctgaggtgagggtggcgagccttaggcggtgtgattttccttggcgcctttccggatttcctcgctggtcatcttggctccggggccccagcgggactggggctgaacccaggctctgtgcgtaccctctcctttcccgccgcgctgaggcagtgactggggcacagaatccaatatggccgtgcacaggtgctccctggacggacccgggcgaaggcgcgctggcaggggatgcggacgccaccctggtcccacgcctccgcggggcggctctaccagcaacgcgggacagagcagggctgcccacagtggctgcgagcagcgggcggcggcgcgggctaggggcctaagctctgtcgcggtcgggtgggtgtgcgtccgccgccatcttccagcccctccccctcggcgagtgctaacaccctgcactctgctgctcttcctgtttgcaactagtaaatctgtttaatcctgaagagactccagttcctaccatcactgcagtttgggatgctccctaccttgtgaagttctactattcttgctcacggtcttggcaggccgggtttttctgagggtggtaggagtgaaagcagcacccaggcatgcgtttaccggctctggaacttcagcaccagggaactgtccagacagggttatctttagctctgagactacttttctggttagcgtagcaaagagatttgtttctacaaggtttgcttttgaatgttttatggttatttgattt

SEQ ID NO: 12046 - DNA, 6000 bp, Homo sapiens
ttaaaagggatagtatatatcctatatccattaaggttaacgaggcagctatacagtcacagatgtggaactgacctcttataaagcaaactgcaggacacatttctgtttttacgtttacatccatccatacatacatgtatgagcacacacatacacacatatacagacacacacaatattatatatacacatgtatttattcttatgcatagactgtctctagaagagtatacaatataaaatatactagtaacagtagttggctctgggtaggggaaataggtagctaagaaatttgggggctgcgggttgctcacacctgtaatcccaacactttgagaggccaaggcaggaggatcacttgagcccaggagttcaagaccagcctgggcaacatagggagacctcatctctacaagaataaaaaataaattagtcgagtgtcatgacacctgcctgtggtcccagttactccagaggctgaggtgagagaatcgcttgagcccaggaggtcgtggctgcagtgagccgttatttcgccatctcactccagcctgggcctcaaaccaagaaagaccctatctcaaaaaaaaaaaaaaaaaaagaaagaaagaaaagaaaagaaagaaaaaaaaagattttatttcaaaattttataaattaactttagaaaatacttttaaaattgaattattttaaaaaatagagaactgctcactatatatgtgctaaatatatactaattgttatcctaacctatcaggaaaatttttacttattgccttcctttatttgggaagcaaattaaccctttaacagaaaatctaaactatgaatgaaaatatacacatcaagaaacacataatttctaatttgtgttacaaaaagcttatctgaaaggctatgatatgtacatattagaaactcagtatttactgaatacttttctattgatttagtgggtttgctttcctcagacattttttcacaattacacaaaaacccactggaaattcaacttttaataaattatgtttttctttcaaacaatgattcctcattgtcccacaaaattgataagctacctcattaacattaccacaatttaaataaacacaatttattaagtacttattacgtgcaggtgttaaggatgctgcaaaacacaaactcaaaaaaagggtaaattttgattcttgccctcaagaagtttacaatcttgaaagacaagacttaaaaacattaatcattcagatgtcttggaagattgaaaaaaaaacattagtcagtaaaaggacattataaattttactgataaattgaattagccaaatttaaactgctacagcaatacatgaaaggattctttaaagtaattactgattagggttctactgagatttttaaatgcttccaaaattatagtacctcgctcatatgtaaaatggtattatttgatgatgatagacttcctatgtggatgttcagctggactttgaggaaattactaataattaggaatagcttttaattattcaggctcctaaggtgagagataacagtaatggtctcagttttgatcactcagttctcttattaaaaatatctcaagcatgaatctttcactacatgcatatttaaaattatatgcatctaggtattgtcatctatatattaaatattaataaggttcaaattccttctttctctccactttgcatgaatacttaatatgaacattgaaactcacagatcatgcaaaaatatttttatctaaccattgcagtatcttcacacatcaaatgtattttttaacataaatgttaaaaggcagcagacatgcatttaaatttcagtttatttttctctctactcttaaaatacatgttaattttcaatgtaatgaacagcactaaaaagaaacaaaggatagtaatgactaggtaagcgaaccctaaaacttcatgggaaatagtaaccattgaagaccgttagtattatttttcttatgtatttgtaatttaatacccaatattgataatgtattatttagtaaactgtcaaaatcttcaaaatgatttgtctctcattactataattccattataaagtctattcatttcatttccttgcctactctttcgttaaaaaaaaattaagaacatttaaaaccaaatgtccaaatatattatgctttaacctccaaataactttttgttaaaataaatataacaagaatgtgaaaccatgaaagccattttgaggtaagactcctttctaagactaagttaggtagcaatgcaaacaaatatttaaaataaatctgaatatatatttttcatcaatgtaattttatagattgtatgaatatgtatttagagaacatttgtttctatctaaactatggaaatatgaatatgtaaatattatatgtattgaatagtatgtaggtttacatacagaaataatatatacatatgtagctacctgaaaaacccttttacaacatcttcctaacatactgttcattttgaataatcctaatacttaaagtccacttaaatttctatattaaaacaacaaataaacttagaactacagtgaactagccacatagtatttctactatgaagaaataaaaacacattttacatttaaataggtaagtcaaaaaaataaaactacattttactggagcatcattttggccgcactgatttttatcaattatagtaaaaggcattaagttcacatatttaaatatcaaactgcaagtcatcaaaagcttggcattgttagtatacaaaaaaaaagttaagcacagtaagaagtatgctcaaaaagcttctaaaaataatgctttattcttctattagttagagtaaactgcttaagtctcttaatttcttcatatctgaaggctgttaataaataacattcccaaataagtattcaacgccagaaattagctttcatgaagacattcttaatttcagttatttcaggaacatatttgctcttttagccactcaatattttgtgagaaatagtatctttctctaagatttgtgaatatttgatgtttgctactataaattatttaaagtggtatttttcattaaaatatgaaaatatatacctattgacaatgaaacctgtttctttattagtacatgaaagactactaaattcaacaacctgcttttaaaatgtacctgaatagaggtgagtgtattagttccttcacagaggaactctacactttcaattgtatatttctgtggagaatatgggaaacgtatacttgacaaaacgcaaaagaatcatctgaataactcatttcaagtaaaaagaaaaaagccaagctggaaaaacataaaaaggttacacatcttctgaataacctctttcacaaagtaactgagaaatcaaataaccataaaacattcaaaagcaaaccttgtagaaacaaatctctttgctacgctaaccagaaaagtagtctcagagctaaagataaccctgtctggacagttccctggtgctgaagttccagagccggtaaacgcatgcctgggtgctgctttcactcctaccaccctcagaaaaacccggcctgccaagaccgtgagcaagaatagtagaacttcacaaggtagggagcatcccaaactgcagtgatggtaggaactggagtctcttcaggattaaacagatttactagttgcaaacaggaagagcagcagagtgcagggtgttagcactcgccgagggggaggggctggaagatggcggcggacgcacacccacccgaccgcgacagagcttaggcccctagcccgcgccgccgcccgctgctcgcagccactgtgggcagccctgctctgtcccgcgttgctggtagagccgccccgcggaggcgtgggaccagggtggcgtccgcatcccctgccagcgcgccttcgcccgggtccgtccagggagcacctgtgcacggccatattggattctgtgccccagtcactgcctcagcgcggcgggaaaggagagggtacgcacagagcctgggttcagccccagtcccgctggggccccggagccaagatgaccagcgaggaaatccggaaaggcgccaaggaaaatcacaccgcctaaggctcgccaccctcacctcagccggccttggcgccctccctccccgacacacacccctgctctcagacacccctaaaacagcccgggcggccggcgctggccgcagccctcgtggcctgggcgccgccagcgggagggagggcggcgaactggggcgcgcaggcggccgcagggcagtgggcgagggggcggagggcagggagagaggcgggaatatggagccaggtccttacttgagcacggactgctccttctcctcttctttcttctgcctatccatgacggccaggatgattttcctctcctcctccgtgaggtggctgaggtcaggcatctcgggctgcagaggcggctgagaggccgccgggatgggagccaggcggccccggggcccgacaggagccgacatgtttggtggagccgaaccaccctagggaagcggggaggcaactccactggcagcggcggcaccggcgcggcggctggggcagcctccagcgctgggacaaatacatacaaatcaatggccttcaatccaaggcgacagcccccctcccccaagaaaagcagggggaggggagggcgagcgcgtggggaaggagggctgaggagtgcgcttcgggaaatgtttcttcttcccgggggcgaagggctgtgaagtgagcggttcaagggaaaggggaactggaggccgggacgcggagtgcgcggagaggcgggggagggtggtggagtaaggtggcggggacagctaagggtggggtgactggagggagcaggcgggagggcgacaggcggaccggggcgcgagtgtgtccggccgcggtcagggccgggagcgcgcgcgccgcctcggaggggaaggggtgcctgcgaacaagcccccggggaactcgcttcgagcgcccggaggcggagtactgccggcccgaggggcacccaggcgggagccgagagggtcgtgaggaagcgaggacggtttcccggagaagcaactcatccgtcccgccggctgacgcatcacagggctcccgcgcgccacagagggagaactcctccaggcacacccgggagcgggccgcggggccggaaacccccgcggagaccccaaccccacccaccccacccccggctagagtggagaagcgaaagcggagaagatatgacgggggctagcggcggagagtcccggggccagggcccttcggctgccaacgcccggatccaggcgagctccgacgtgcagcggggtctggcgccggcccctcctcatcacgcgcccggcccagggtcgctcagccgccgccaccgccgccgccccttgggtcgatggagtcggcgcggaaggcccgcgcgccctgcgccgccgccgctcagtgccgccgccagcacctcctccgcccctccgcctcccgggctcatcccgcgggggcggcgtcacctcctcgctgcccaggcccgggcaccgcgggcgccccgcgggcggcagccgcccctcccgagcgcgatctccaggctgggtccggggccgggcggggagggaggagagactgagcgtgaagggagagggcgcccgagttttcggggacggaagtgtggagaataggagcgtgtgagggggcgcccgaggtgtcgggggcgggggaagagtatgagcaggggtgggggcaggggtgccaggtgtagcaggtagggaggtagaggcggcgagtgggggcgcccgagggaccggggcggggcggggagcgtaagggtggcaaggcgcccgagagtcagggctggagctgaaggtgggtgacagggagggggcgcccaggtgtcaggacctgaggagaaagagtg

SEQ ID NO: 12047 - DNA, 6000 bp, Homo sapiens; identical to SEQ ID NO: 1308

SEQ ID NO: 12048 - DNA, 6000 bp, Homo sapiens
gattatgtgcttatcaacaagaatttgaaagaattatacaaaataatacttgatataacaaagaacagtacatgaaaatctttacccctactgctgtgctatttcttaacattcatgcagtgaataagagttgaggggaaaaaaatgaaatgaaggggacaagctagcacacctgaaaattcctttggactatctttaagacgctagcattccaagaactctttgtccttttatttaaaaggctaacgttaggtgctaaattatctgcattgtgggaaagcactggatttcaaaccagaagacctggattataattttgtcatttgtagattaagtcatgttaattaattttgatcttgattctttaatggtataatcaggataacaccactggaggtacagggctgtaagaattaggcatgactaattaaacactaacgctcatgaatgtactttgtaaactataaagcactacaaaatggaatgcgtgatcattatttagcaagaaatgtttgtggctattcaatgttcccttccagcaatgtcagtatgtcttttccaggacctctgagagggtcatgcaaccctcttgaactcatagaatgaaggaaaatttactccttttgagaaagtccattctattcatgaatggctctgatcattccaaagttctttcttttgctaaactgaaatttgcctcctagctctgttttgcagagcaagtgtacataacagccctgcaattatctgaaaactacgagttttcacctcagtttttttcttctcagggccacactttcaagatacttccgctgttcatgataaggtatggtttccaggttgtttcaccatctttccatttctttgacatccaaaactgaacagactctactagagtctaaattacattagataacgtcaattatccacaagattccaatacccgggtcacctaagagtcaggaatgtattcctaaaacaaaaagatttcctctttaagaggaaaattctcattttgaatgataatttaaaagaagaaaaagtcacacatttccttcccaaaagtgatttatttttaaaaaataaaacacttcactaggttttataaaccaggcatcatgtgaactaagcagctggaaaggagcctcgcaatacagccaagtgctgcagccggcctgtgagcctgcaattctattgcggggccgctcctgtcacattctggtcctggaaaaatcatgctgccggagaggatgcacatccacatcggagacctgagaatcaggatgtccactgacttttaacaactgcttcaagaataacaagctctgaagtctcagacttccaaattagcaaatttactctgctttcccaaattcccccatggtttcaactagatcaaacaactcttctcacttcctgtcttgtaataagttacattagtatggccatatagcggctgtcagtttcaccagtgcgactgttaatctcagaatgagtaaagtatcacacgtggaaatcataacaaggcccagttaaaagttgtttaggatcacaactcctgggttcttctagttcttccacatactgggacttatacttacgttttcactgtgcaaaggggccggtatgttgcatgagaactgaaattccagaacagtagtactacagagtattgcagggaaaaacaaaaaatgtattttaattctcttgggaagggaagttgttctagacgtggtgcagatatgagtacaagagaaggaactctttgacttgctttttaacttttatcatagtgtgtgggtcctcattctcttctccaattccacaattccagtgttcatatgactcattccagacctcatatgacacagaagttaaaccaaaaggccctcgcttctcatttgagttatgcaaataaccacaacagttagaagttgattggttcttttgggagaaagttcctctgtgtgaatccagggccggtgctgtctgaactcctgtgctgcaaatggtgtcgtgtcctggtatcactgacctcccttggacatcaccccctaagttcttaacatctattcctgaagaaaaagcttaaaatgaaaactgcctcataaaatggctcacttaaattcttacaggcacatgagatttcccaatctcatctttgcaagcagagctcatcagtaccactctctcactataaagaaccacctcaaacctgagaactagtacaggttcatgagttacccctgactgggagagttaaattaagcattccttagctttttctactttttcttttctaaaactttatacaatcactttctgatgcaactcaaagcaatgcagataacaatggttaggatcaagaccaccaggcaaaaacaatctaaactctaatttgtgagcaaaaagtagaatcagagctagaaaggctatatatagtcatcgcaaataggatgactttcccacgcaagaggttcaaaagtattccatttgtcattttgcatgcagccaattcaataaatagaaaccagaatcttatcagatgggagaggaagtgagtaataccagagttttgatttttttttttaagtttcttaatggaggctttacacaatggaaacaggactacaaagacactttacggtttacatatatgaactttcccacattcacgaacctgaaatgtgtccaccactcggtgaagaaactcaatgacaaacagaggggggacctccgtctggatcacggccacaaaaaagatcttgtggcggtaaacacttaagagatagtggtgaggggtagggataaccggaggcacattttctgcctcagtagctctctcttgcgcctcaaaaaagtaatcacaaacagaacggctgaccacacttttccaatgtttctccaggaaaatgtctccagaggagttgatcaagaaaagactatggatcatggtggcgattgtcagtgacagaagaaagcctttttcagtctgaaagcctcaggactctgtaagttttcaactctaaaaacaaaagcagcgatattcagttccattcaaccaaaaggccctccccatcttttcccaacagtccaagacttacccatctttcaagaccaggcccaatcttcccctcctgcatgagcctgaagatagccctcccttgaattcgaaacgataatgatcagtcatctgactgtcaatcatatactcccagttatctttactatcgcccaaattgcatccatttaaaatactacttatctgtgggtgtctattttctcaaccgaaccgcaaactccttgaagaaaagggccgtgcctcatgttttgcgttgcctgactgcaacacaatcagtgttctttgaagagggcttccaagaacactgaatttgatgtcatgttttggcaacagctcacacatacacaagaaatgcgcagcttaatacgatagccactatgggaccagcgagcacttgaaaggtggctggtgcggactgaggtgtgctgttaagtgtaagacacacgacaaatctgaaaggctttgcatgaaaaaaaaaatttcaaatatcttaccaataatttaatattgattatatgttgtaataacattttggatatcctgggttaaatcaaatatattaaaattaatttaacctgttttattattttaaagtggttaccagaacatgtacaattacatatgtggtttgctttctatttctgcccaccagaattggtgggaggaatggaaagctgcccttgggggtctttattcatccaatcagagctattctctgagcactccttaggcacttgttaatgcagtaagacatttaaaaagatcccttggggctcccgcctgtgatcccagtacttagggaggcctccgcgggcagaccgctggagctcacgagttcgagatcagcccgggcaacagagggagaaccccgccccctccacctccaaaaaaaaaaaaaaatttccctgggggacagacaccccaaggccctcagacggttgcatctctctggtgccagtcgccaggatgtggccattccgcgaaccggcgcgggtggtcaaaacgcagaggcctgcggtgcccagcgccgcctggaggagacagcaggagggagagacagccaggcagcccggggtgcgagggagaggcagcggcctaggcaggcggtccctgcgcaggccccggcccagagccggcggcgacggaggccgcggggcgcaggcgggcaggggcctggctgaaggggcacgcgcgttccggggtgaagagcgcaggggtgccgggccgcgccagcgagcgcacgtgcgctgccatggcaacagtgtcccctccgcccgcagccgcggcgccgggaaggacgccctccccgaactctgaacccggcccctcacctctccccgccgcgtccgcagccctgagaggccgcccggctgcatcctgagaccccgccccgaccctcgcgcgcccccactcctgccccctctccaggctcggggtcgtccctactcctcacctggccttgctgctctcagcgcccactgctcctaggcgcggacaggccccgccccgcccgccgcgcgcgctgaggcagccgctcgcccgctgattggccggcccgcggcctggctaccgctccgcccacgatctgcgcctgaaggccgctgattgggtatctgggagccgctcctcccctctgattgatcgctgttggcggcttgccctgttgtcgggctcgagtcccccgattggccctgttgaggccacggtcatctccgattggtacagctccgagaccccgagtcctgattggaggtcgaagacagtgcgtgctgctcggccccactcatccagtcacaaagggctggggcggtcgccgcgctcgcgtgtttgcggagtgcgcctggagggggcgctggagtatgtgtgtgccggggcggggtggcttccgggcacgagttgctgacagcgcctcgcggttgataaatcctgagggcggcggctaccctgcactccatcggtgcctttgggaagcgccgccttctctgttgtacccggccgtgggtcaggtcggcgcggctggcggtggagtctcggacaccgagccctggaccccgactctggaagcccccagccccactgggccgcggcagggcgcccaccctccacaatctcagttcccagccggggagtgaggggctgggcgggtctctccaccgctttggagacctcaggacttggatacgcttttgagtggtcccagtcgtcctgatccacgaaggcgtggagtggaagtcaggaccaggggtcgccccagtgacgcaggaagtcaagcccagatgcggtgaggcgtcgccagccttggacccagcagtgggcgctggtgacagtggcgacctcgccgatgagaggttcgccctccctagcattagttgtcactttggtgaaatggagcgtgggtggcagctcctccacacacaagccctttgctgaggtggtgcggggggttctctccacgcttgctaagggcaggtagttggctgactttgaactatgaagaaaagccagaaacaaaatggcagaatggtatgactctgggtgggcttagggacgctggtgccagaggacttggcttgaacccgctccaacacttacaacctgagtgaccgtgagaaagaactgtaactcctctaaacttcaagttcctcacttctcaaataagaacgtgaatagtacctccctcctagagttgtgaggattgagttagaaaatgctagcaattgttatgccctaaggaacagcacaagatacaataacacgtgataatgtgtgtcgaaggtgcagaaatgcagtcgctgccgtgagaatttctcattcattcactgaattaacatttgccgaaaacccccacgtatcgacctgtgctggatgctggagatgctgcaatgactgctgtcacaggcattgtccctgtggttaca

SEQ ID NO: 12049 - DNA, 6000 bp, Homo sapiens
attttctaatgggaatttatgtggtcaagagggaaagaacagggaatgctagcaagtatccataagcaatataatacaggtggccacaagtatgccccaatgatatgacggtgaactggagttccaaagccaataagggaaattaagtaaaaaccattattaacaaatcaatcagtcaatcaatcagtctgtccatttccctgtccttgcctgtctccttagttctaaatcgaggagaaatgaagcatagacaaattgatgatcacttaagtacacaaatccgcagaaaggcaacgtcttctaggtaagtaacaatttttgttggacaagtgctaacaaaggctgattctactgtttaatggcaggtgcctcttaaggagaggtgggcttctttgaatgtgaattaatagattctggtgttttctaaatctaaagcttgagttttttaaactaaaggcattcaatatttccaagtttaccaacccctgaatgcagagtaaatatgagggtatcttataggtaattattatactctgagcttgagacaaaagttttccttgccctactttgctaacaaacttctaagacatatgcgtaagcatttatttataaaaatactatttattttttaatagagatggggtcttgctatgttagccaggttggtcttggactcttggcctcaagcaatcctcccaccttggcttcccaaagtgctaggattaccggcgtaagccattgcacccagcctacttattctaaaatgtgggaaaataagtttttggttttcttttgagacagggtctcattctgtcgagtgagtagggtggaggctggagtatggtggcgtgattcagctcactgcaacctctgcctcctaggctcaggtgatcgtcttacttcagcctccaggtgcatgccaccacgcccagctaatttttgttttgttttgttttgttttgttttgttttgtttgtttgtagagatagggttacaccatgttgtccaggctggaaatgagctttttcaaataggaaaatgattaggtagtatctaactttatttttaatgatggtgataaagacaggagatatttaaatactatggtttaacagggaattgacctaagggccatctaacaaaagaactacttgacaaatccaaacttgtctcagacttcagtgcaaggtatctaatcctctgtaattttaaattcttgctggatctctgaagcatgtgacagtacccaagtactgtttctcacatactggttatatgacatcccaaaagaatcctatctcctcgttctcttagacaactagtctttgcaaaacaaactttaagacatatcttttaagttttactgaaagaattgcactgaacaattgtccaactaaaatcttataaaataaataataaggcactggagttaatcattacaaaagaacataggatacattttcatttaagaagtcgttactttccgtctttatggaggaatatagagctatcattgtaatgccccacttaagtcacaaatcattacaaaaaatgagtaagatttagtaagtacgaattctattaatggtgcttatgattttatataaagtgaaacttgttattaattagttcttcattatgtgatttctgtctctttatgaaattagtggaagaaataaaattgttaacatttttggatgagactacagtctgaagttcagattatggttcttctattattttggacaagctgttaaaattcgtattcatttcttatactttcactgctgcaatttattgactgccttgacagaatatgatgtaaaaggaaatttcagaagattgtgactttttatatcagaaaagaggaagagaaacctattttgaaaggacctagaataatattaaaaatgaaaggctgaaacaaatggctcattcttgcttctcattatttaaaacaaaataccataattatttttctaatttccagagaaactccctcactaatttcattatttcaagcccacacctaagatgaagttaaactgaagttaacatcaaacaggtatgtatgttatctaatgtccatttttccagtgcttttatccttctcaattacagagcatactacatcctcgttcaataataaatataaattagaagacagtagcattcaatgaaatcacatcgtaataaccactaatgtttattaagcacttaatacttgccatgcactgagctaaacagattatctaaaaagatgaatttaatcctcatgacaaataatcccgacagattaatgtattgatattttcattttacatacagataaggaaactgaggcctagcaaaattatgtggccacacagctattaagtgataaaatcaggcaacataatgaagtatttgaaagtaaccatagttagggacatgattcatttctctccaaagctagaaatatgtctggtcaggtactgtggaaaggtctggtcttcacctgctgcacagctttagcagattttatagtaatagtggcaagatccctcaatcattaaagagtaagcaattgttacttaagctttatacctttaggtagattctttcaaatggataaacacttacataacaagaaccaagagtcaaatgaatcccagaggtaaggaacaagtgtgatgtgggaggatattagttttatgaggatttgaaaaactgcagttattcctaagggaggcaccaccggcacttgtgtgtgtgtatgcaaacgactgtgtagaagacaattccctttatgttgtacagcgctgtcacatatgtcacaatacatttagtatccgttaactgctccccctcccaaatactagaagttctctcaatccttgtgactacccaatatatatatccctacacatgttctgctgaccctgacagagaaccttgattgttggataaaaatactgggagagaagtaactgacatgaattgtacattgtgctccagggactctgctaaatgcattcacacacattcatttaattttcataaccctatataagtagatatttcatccccattttacgagtgtggcccctgaggctcagagcaaggttatgcaacttaattaaggacacacagccagttttgaaaccaaaagtgtggctcaaaaactactctactctaagttggccttttaagccataatggtgagagaggtgtgacttccctttctttaaagaggttcattcagaaagtataaatcattctaagtaggaaccacggtgtgtacctccttatgaaccaaggatgaattagttctctaggttaggaatgaggagccacaggcgcagtgccagagttaacatgaggtgtgttcaagatttgggctgggcagctcctatgaaccggtatatattagaatgtgtgtgtatgttttccagggaataagagagttgtgttatgctgtgtgaggtttatgtgtttcatttaacacacagcagttactataccccaggcaccattaaaattgctggacaagatcacatttcagcacgtatgttaggtaatgagtgagcagggtatgcaccgcgtgatgtgtggcgggctggtgtctgtgcagccatgtacacagatgatgggtattgggctgtgctggaaaggaaaggtccgctgtgaggtgtgtgtttagagtggcagtttgtgccgtggtacagatggtagtgtttgaggctgggggaagtgttatgctggatgacttgtgtgcaatgcatacgggaagtgctgcacaggaaagaccgtgtatgcagcacacatgtgcattttttgtgcgttacggatagtgccgaataccggagttccacaggaagggatctaggttgtgtcctgggcctgtgtatggtgcctgcaggcgctgtggattggggtgctttgtatgtgtagcggtgtgtgctgaaagtggtgcatacgacatgattcatgcggtgtgctgggtagggacgaaggctggagcagtgcagaggaggggcccgcgtcgtgatgttgtgtggagcgatgctgagtgcggtgggtgagggggcgatcgtgctaggtgactcgcgtgcgttccccgtgtaaccggaggcgctgtatggagaaggggcactgaggggtaggggagcaggctagcgtactgtgagacaccgggcgggcggaggggccgcgtgggcggcgggctgccagtgcgtgtgcgtggagcagccagcccacttcctcacccagagccatgccgggcccccctccccgccaccctccctcccgcctcttccctagcccttggacgcgccccccgctcggctgggccgccccacctggtaaaggcgaagtacatgaggctgacgatggtgaagctgagcagggtgatggtatgcggccggtagaagaagtcaatggtgatgtcctccacttgctgctcgttgatcatccggaaatgcattttgtagttcacatcatccttgcttagggtccggctccccacgcaggacgccatggcccgcctccccgtcctgccgcggtggcggcggccccagcccgagaaggccgggaccccgggggtgactagccacagtaggctaatagccggacggcaaagccgggtctggcgcccagcaaaggctgggagcagagggaaggacaggcgcgagagggcggggtcgcggcgccgccaccgcggcctggggcaggggacgccgccggccgtccccacgctgtcatcctagctgaggcatctctaccactcgaggaattttcagactccaagtccacaggacttcagaggaatagcgagccggagaagggtagccggggcccctggctggctcttttcagagcacgtagcccgctgtctccccgcgtaacccggcacatggtctcgcccactccgggcgcggcccacgtgggcccgggagcgcggctgcgctgtgtagggcgggctgaggagccggcgtgcggcgcggcgggacgggacgtgcggcccagcgagttggtcggtcccggggtcacccgctacgggaagcaggcctcgccacaggtaaagcaggagctgccccagcacgaggatcgcgctcctggcgagggttcaggttccggcgcacccgcgtccagaccgcgccccagggcctcaagggcctttaggttttcgcggcccagtagagggtgattggttttgttttgtgtttttccctggctgatgtagtgaaaactcaaccatgctggctaattagcgcagtgtgagaagcctcaggagggggctctgccttcctgcgcaagtttggggaactgaagtgggctaaaatggcctgggaagtattgagagaccctttattaggaagctgcccccataacctccctttctctcctgatttcatttatagcatttcgtaggtagaaatcttgaactctatttcagtgcctttttctagcgaagcactaggcactcattgagaacagtatatatgaattgttaagagacttcagtttctttaagggttttctgtaattttcctgatgaaaggaccttgttagaagacttcaggttaccaccttacagggcttttatacacatctgcacatcccctacccgcttttgcatactgtgtaagcaagtgagttaactgtacttgccattgatttatttccattccgcaaacattagagcagtacaaggctctgggaaagtggagaatagtccccggaaggatggatccagggatgagacccagctctgctctcgtgcatgaacagttaatcaattgttaagatgtgtaggcagcaatgaaaggatgtggagaagatagtgcacttgtaaataaaaatgcaaggataaacattagttgtatgcacaaagatcttttaatgacggggtgaaatttgaaagtgagtcttcctgatgtttaagtggtattgagtgtggaaaggcttcaggatgaatttgggatttcaggagtttgaagtaggatgaagtgcttagac

SEQ ID NO: 12050 - DNA, 6000 bp, Homo sapiens
aatactgccactgttgagaaatctctgtctattcctctgccagtgataattacttcggctttgttttttcacttcagaggttttctgaagtctttttcggcaccaaaaatagctatctcatttctttcaagaactttattgcatggctagacctaatacaatgaacagatttgtatcaatacatatttagattaagtttgttgctttgttatttccagtaatgcttgcccatagtccttaagcaaactatctctctaggccaattccctagaattgaaattgtgagtcaaaagttgtacgagccaggcatcccagctacttgggaggctgaggcaggagaatcgcttgaacctgggaggtggaggttgcagtgtgctgagatcacgccactgcactccagccttggtgacagagtgagactgtctcaaaaacaaaacaaaacactgagaagtcagttgtaaatgacagttgatactgccaaatggttttacactgaaattaagagtcttccgggccaggcacggtggctcacgcctgtaatcccagcactctgggaggacgatgtgggcagatcacctgaggtcgggagttggagaacagcctgaccaacatggagaaaacctgtctctactaaaaatagaaaaaaatttgccgggggtggtggcgcttgcctgtaatcatcctagctactcgggaggctgaggccggagaatcgcccgaacctgggaggtggaagttgtggtgagccgagatcacgccattgcactccggcctgggcaacaagagcaaactccgtctcaaaaaaaaaaaaaagtcttccaaaattgtataaatttacctatttcaaaaaggtaaatacctttgcaaaactaataaaactttgaactcttcaccaatctgataaattttttttgactttttttttttttttgagacagtctcgctctatcgcccaggctggagtgcagtggcgcgatcttggctcactgcaacctccacctccccgattcgagagattctcgtgcctcagcctccacagtagctgggactatgggcaggagtcactgcacccggctaattttttggtagacacgggttgtgccatttggccaagctggtgtcaaactcctggcctcaagcaatctgcctgcctcagcctcccaaagtgctgggattataggcgtgagccaccgtaagcggtcttgacagtatttaattataaacaaggctaggtacttttttttttcccccataaaatcaagctactgcaggaagggctaaatactttttctcttgcttattgaacatctgcattttgtttattgtgaattgcttgtcttaggcattttcctaagggagtataagttttttcttgttttgttttgtttttttttttagacagagtctcactctatccccaggctggagtgcagtggagcgatctcggctcactgcaacctgcaactccctggttcaagcgattctcctgcctcagcttccctggcagggtaaaactcttactggaacgtgaatcacttatgatagaagtattttatctcagtttgtcatttaaggattcttttttaagctttgccataaaaaagctttttatttttatgtactgaaatttttcagatttttccttggaacttctgggtcttctgttatgtttaaagccttttcccacctcaatgaattatcaccatattagtaatactattaaaacaaactcctaggcttgcattttctgccttggatttaaatttgctaactcagcattatgctgctctgggttgagtttcgtttagtatttaacatcccttaaaacacagctttatgttcttcaatattccatatattgtcatagaattttatttggatctccaaaatgagttgctttattttctaaccggttgaaatctcaaattagtttgatatcaaatgaaggtacagttgtagcaccattttgtaggtagaggggagtaaatacttctaccaccacacataaaactggtaatgctttttacttagagatttccatttttacacattaattttaaagaaaaaagtgaggttgacaagtggtaagacttatacacagtagtactgagaagtctacaactacaaaaaaactaacaaggcagaacgattaatttcaactatccattggcatatttacacacaaacctgtgtcttttagtaacataattttttagcaccgaaatcagtttttttcattcttatcatccttacaaatgtgaaaaattagcataattacatgacacagtaagaagagtcggatgatagatttgaagagtatttcgtatttctcaaagtctgatccagagattccagggatcaaaattttcaaataaacaacaccaatattttgccgatgatttcaaaagaccaaaatatctaacaaaatatggtattaaatgaagcattaaaatagatttattgtctttaacaccctatgaaacagataacctcactctccatcttttaaaaggtaaaaataagaaaccaaagcactgagcagttgccttaagtcatgttgttctttgtcaaacacaaacttccaagatttattacaaaagaaacatgcctagtacaaggaaaatatcagattgctttgttcaatgttcttacactacaaattatttaattaaagaaaatacttcttttccttgaagctgcctaacctgaagctcaacagactactgcattaaagcaccaggtcccaaagggattctcacagaatctgcagttatcatgctgtaagaatattcaaagcagtcactacactgtttctgggatgaacatgcagaatcctctcaaacagagcccagtttttaacacaaattatggtggtggtatacgttagcagtggcaagtaggaaaggctggaattaggtagcaggtgggttactgaagcagcttgggctgaacatcacgtttacatctttagttttaagatctagcatatgatcattactactgcattctgtatctggattgcagctgttagggaggaaagtaaaccatatttaatgtcaaaagatttttaagctcaggctctggcaaccacttagcggcagcctaccaagagcaaaacacttaacctctatgaccctgtttcctggtttgtaaaatgacaataccaccacccacctctgggggatgtttgaaggttaggttagataatacctaccagtgaaaatgctttgcaaaaggaaaataccagataaatgtaaaatatggctatttattgctaagaacaaaattcggcctttattgccactcctcttttgaaggaataaagcaacagatggcttgtaattcagaaaggcttggtaaagacctcaccatcagtctgccctcagcaacacttcaaaagcactagcctacttaagaccgatcaccagaattacctcatcaacaaaatttgccaagttacaattacttaaaaaattattttacgcataaatgcatctccctctgatgatgtaagtgaagatggaaaggaagaaatgaaatataagatacttttaacactccatccatacgaaacaaagacaatgattttcagaagtctctttggcaaatgtctcatcactttttacagtcactttcaataccttctcgtttattcatggaaaattttaggactcgatttaagcatcgccgctttcatgagaatttttggtaatggtttcaaggtctgacattcaaaaccctgtctccttcgcttggatgtcatttactgcagacacttcacgatcctgtggaccctcgggtgcagcagaagtgacaacatacaagtactcggcatttggtaataaagggaaactgaggcccacgccttggcagaagtccaaggtcacacacgacgagactgggatagcagagttgtttttcgaaggctgtcgcataggacgcggtaagccagtactcatttcccaaggcaaacgggcaaagagctgcatgctcacacatccttactttctccccacctcactcaggtacaacactgaatcctcgctagggggactgctccgctgtcaactcagacaagtatcatctccttccccctcccaacccgtaaagacgaccctttgagggatgaaactgtagttcccaaagacacatactcgacccatggcctctgcgcgcctgcccgctccccggggaacgtctcggcccgcatagccgtcccgggacgtacggtaccctgttcccttaccaaagagccggaggaagatctggagcacgatgcagaaccggctttggctggaatccgggtaggagttgaagatggcgtcgatgatgtaaaggcagggcacccggagcgccacttcgagcgccgcccagacctgctgatgggccatccgcacctgctgctgcgggggccccacggccgccatgagccgctgccacaccagggctcggtgggccgggcagggccgcgcggggcagggcccggggccgcggccgggggcgggggctaaggcgggcaactccgcccctgccctccttcctctcctgtctctctcacggccagccccgccgcccgctcgcgtccctcgaggtggagcaggcggcggaggcagcgatggccgagagggcggcggcggcggctccccaggaggtctctgggtttcggtgtttccggctggctaaggtctgactcctcctccctccactgcctcccccgcccgcggagccaccatcttgacctcgcccgctggcctctgccgttgctgctgtggctaggcccggaggctgcgccgtcagtcaagcgaaccgcagagtccgcgcccactgcctgcgtcataatccagcgtcataatccagcgctagagacgctccccatgtcgtcatcacccatggttgccatggtttccgcccacctcctcagcttactctagcttcgtgccaccccgtggcgcatgcgcttttcggtagccgcgctttccggcgttggagttgcagcttcaccctcgcagattcggcttagcgagcgagtcggtgcttccgcggatcaaaattattagccgttttattagagcccattaaacgttgcataaacatggttcagagctgcctgggagaagaaaagccaaaggatgccaccctctcgatttatcccaccctcgggagtctgaaagccgacgccaggagaaatcccgcgaaggccgcccgggatcctggtagaggcgacgctgtgtgcgtttatggagcgcttgcggtgcgtggcactaggctgggtgtggtgggtgctgccgaaaaaagggttcctcccatccatttgcacgtcacccttcccacctcctgcccagatggacagaagtgaggacattcatcggccgcattttactaatggcaaggagatagcgactgaagggcaagaacctagggtttcctgtctttgatatttctcatctttgaggtaagtacacctggacagtcccttccttcctcctcagggctcatgctttcttgcctatccgtgtaattaatatgatctggctatctttgtctttgttccgaaacttcagctgcaaatgaaagtgtaagttaggtctgagtctgcactatagacctagctatcctaggttaaaggggataaaataggaatcaagaagcctggcccgcttgggctcccagctcaagtgcattctgcaatccagtttatattaggcctccatgtgggtggctatcctttatcaagatcccccccagggggaggaggattattagtcacattatcaaactcccctccaacccctttctctgcttagaggtatgtgtaatgtgtagtagaaagaccgaatccccacccaaaagtccttactgctactcatgtttttaaccttctgttctttaccctactccctaataatgaccgccatcatttatctactgcttaatggatactaggcactgtgctaagggttttatgttttacttcaatcttttcatcggctttattttgat

SEQ ID NO: 12051 - DNA, 6000 bp, Homo sapiens
acacagaaagaccccatttctacaaaaacttttaaaaattagctagaaataatggcacggcagctactccggaggatcacttgaacccaggcattcaaggctgcaatgagcaatgatggtgccaccgcaccagagcctgggtgacagaagaagaccctgactcaaaaaaacccaaaccccaatctattacgtgttgattaattttttggcctacaaatttcaatgatcagttttcagtgtattgcataggaatgggggaaaagaaattttttaaaaaagaagcaaagaaaaaagaattctgacatttgaagacatcctattaacatttatcagcttcacagaacatgctaaaaagatttgtcattatttatcataacgattacagttattgtttatgcagctatctcaacatttaggatatatctagattcctaggatagaattctaggctataaactaacataaatctagtttcacgttaactcacgatgatagaatttaaggtaacttcattcctttttcatgagtcctacccaatcctctgtcagtactccaactttccttttaatttcccataagttttccttaaactccagctcaaggatatatatacggcctcttactctgagtctctaagcattccacattcaagttacttcctatcctatagatagggcttttaagtggcaaacaaaccaaacaccagtatattcaccacatcatacataattaattgtcttagaagttatatcacctttaatttatcaggatttcagttatttccatatatatatatatataatcacaagatggtaatttcagaatcagataagaattaaaagaataccgaaatatgaataagttggttattatacagaatgcagatttgttccgaaaataaaacagttaatcaaatgttctacttaagggatatgtgaaggtaaatctgtaaataagaaactaaaagattatgggaaagtaagtaaacttattacagaaaaccaggttctctgttaaagaaagcagagaccaaaatgctttaatacgtaaatacctaaagaaataaggcaagttaaactacgaaataactacaaaatactgaataggcagaactatggagttcattgttgtgggggaatgaagggcagcccctcaaaaaatgtgtccacatcctaagccctggaacctgtgaatgttttcttatttggaaaaaggctctttgcagttataattaaggatcttgagatgaagagatcatcccggaatatccaggtgggctctaaacccaatgacaagcatccttctaagagaaagggagagtgagatgtgagacagaagaggtggcagcaaggactgtaaggcagaggttaaagtgatggggccccaagccaaggaatgccaccagtcaccagaagttgaaacccacaagaacggattccccctagggcctccagagggagtaaaattgagcctacaccttgatttcaaagtgctggcctccagaatcacgagaacttaagttctattattttaagccgcttagtttgaggtgatctgttttggcagcacaggaaagtaacacaggtacttgaatcaatgcctctcaacacagtagagagacttaactggattttcaatagtctcaaattacgtgaaatataaaaaagcttataaaattcttattacttattctaaagaaataaatggtgaagaaagtacccatttgagtttcagtaccaatgagagattctggaaggacctaaaaggataaacgagttataaggaacaattttagcagcactgactgaaatatttctctatctcagagatacatatgaaaataaagtagtgaaattggggaagaaaaaggtatttacccagaatccaagaaaaatccaactaaatttgttggaagcaggtttacctgccaagcacagatcataaatctcatggacctactactacttctcttcagcttaaaaattctatgtaaaagaaaatattcttctgcaagaactactgtgaaccacttattttttaaacctagagttgaaaggtgtaaaaatgtcatttaaaaaaaattttattttaaaatgcctctttaatatatataaattaataaaccttttatttaaaaacttataacctcttaaattactaaaactcccttcagaaatgagtcaacaatactttatacagaacaagagaatcatcactagccttgcaaacgaaagctgataaaaacaattcaagaaaaaaagagtgtcctaacaaaacaagaaaagcaagctaaaaattttaatcaaaacatctcagtgacaaagttaatggtacaaagtcacaggtaaaaaataaggtgacagaacatcactataaatctttttcctttgggtcttatgtttgaagatagctatttattcctctattgatttaatcttaacagaaacaataaaaaatattgaaaggtagctttgtgtacacaggaaacccagattgcagaaaaagaccctaataaattcaaaataccctgctctgttactaaacagaaaataattatttgtcccctccatacaataaaaataaaaatgcaggaacaagaaactcttggttttaaatttttattaaatgttcataacttgcatttgatgatcagtgggcaatcagttcgttctacgactcctaaagaacttcatcaaggaacacacattaaacaaaattttgaattatacttaagggtcctcaggcatcctttcataaatgcatgaaaattagtgctggatgccacttcctttgatttgaacagacggtggggggaatgattagattaaatgttttcaaaatcacttgctgggaaatcaagaagtaaatcggatctctgaacatcaggtaaggtatgcaatttcagaaacactgctaggttttacagccatttaaaaaaataagaacttgccaaaccaaaaaatccttcaatggtgtattctgcatcatattgtgtcctctttgaacaaaaataacataacccgccacagatagaattatttttttaagaggtgaatgactttgtgttctgagcttatatcccatcccaggccagttgtcacatgatgtggaagtaaaaacttaatcatgataaaaatcatacatttagacaaacttggtggagttaccatataaagggaaaaaattagcctgaattattgaaatttttaaatgaggcccattttaaacgtcaactaccaggaaaccatgacctggaacagtatctttttttctttccaaggagacacttacagacactggtttaaatggaggccctggcctctcctagttccttccccccaaacaacttccaactggggccatcaagggtcgatcagcagtgcaactgcaaactaaatatagtacctgactgaccacagggtaaaaacagctgctgtaggtggaaaaaaaaaaagttaaaaagacaaaatgataccgtcccatttccccatgccaccctaaccctaccaagaaaagtaaaagaggactaggtggacattaggaataaccaagaataaagctgttctttcaaactgagaaataaaagaaaaattcaccttttttttttttttataacacttcaaatacctactgttaaagagggccttccacttttatggtttgtttctcaagtttaatctacgaatccaatctctacagagaaacagtaacagaaagaaagtaatcagacaacagatcacccacacattcaagcccagttaaagttggcaagaaatgtatctagttaggcttctacggttaacaaatgtattcatttcttcgcccagctttcacttgtccaggggaaagaacacaagaccgaattgtacttctgtttcaagaggtcactgtaaaagcgcacttcggagtgtagacgtctccgatctgttccaacatgaccacctctttggaccaaaggccagaaactgctaaacgcgtgccctattatttaaaacgtgcatctgcacccactttgctaagcagcatcagacccaggcgaggggcggggaaaggggcggcgggtcccactcgtagcctcaggacgacgcagccacagcttcctagagagcgatctcggcagaacggcaggaagcatgcggagaggaaggcggggaggcggcacgtgctctccgtgctgggtccgccgggccggccgggtgaccctcgccagctgtgggggagcggagaggtccgcgcccccgggagctcgggtggacgccgagacccgggagcgggaggcggctcacctggaccccggtgtaattctcgaagaagaagagcaccatgctctggtagacgcagtagagccggtcgtccagcgcttggtagaagcgggcgggcaggaaggcggagagcagccgccagaccccccaggccaacacgtaggtgggcgccgtgcccaggagcacgacgctgggcagcaggtagcgcatggagtacgtgtggagcaccagggacagcagcatcttctcagctcggcggcagcgagctccgcctgcgctccccgcccgcctcccgggcctcagtcgcggccagcaggcggccaatcaccgcccgggcccgggccgccgcgcccgccacccgctcccagcctccgcccccagccgcatgggccgcgccgccgcccggggccgggtaggcgagtgcggggctgcgtgcgccgctcccggcggcaaagcaagggaacccgcggccctcccggatcgatggctcagggatgctcacaccccatgaccctcacccatcgccacatccccctgccggggcagggggctccgcggcaacaacgcgccttctgattggtcgcccgttgccatagttccacctcggcggcaataacacgtctcttgattggttggtttgggccgacagttgcagtacagctacctgctggggcgcgggcaacccggctccggccactgcgcatgctccccagctgggccggctgcggacgcgggaagggaggtggtggcgactgacggaactgggtgaaggtgggtgctggccggaggagggtccgggtgcctcttgttctgctccctcgggccggacgtgcgcgcggtcaggtttaagggtcgctggagctgcctggaacgcgcacctgctgctcacaagcccctgggcgccgggatgcacacaattagagcagtgagaaagtgggtgttaacgttatcggaggtctaattcttgcaggcacctgggcccaggttgtaggcagctcggcccaggtcgcggggcagctcgagtgtccccatctgctcactgccagtcctttgcaaggggacgccgcctcctcagcctccgctctgagtgcgcagcagcccctcctgcccgtctctcgctaccagggtgtttcagaattagggtccgtgtttttccccatcacagtaatgatgataattacatgtttatgcatagctgaagaacaatcccacaaggatatttccatactgtttattagaccttttcagaattcactcttgcttcatttcctcagagtctgttggacttgtttctgatttttttttaataaggagcctcgtttttttctgtagtaattaaagtagttgcgtgcacatgtgtaatccataaaaagcatacttttgtagccttcactaaaagctacgaagggtggataactgttttattgatgttaaagcagatccacaggacttttggatctttctcctcccctttggctgtggtaaaaatggtttaatatgtaacccttttcaaggatagttgtactttaaaagaatgccgaatgctttaccatatatatatatatatatatatatatatatatatatatattcccgccccctccccaccaccaccataatgggagcctgtgctacctttaggcaggacggtatttcagtgggaagttctaatcagggccaggatggtagctactttctttatacatgattaacatcaaataacaacatcattggtaga

SEQ ID NO: 12052 - DNA, 6000 bp, Homo sapiens
ctgatcttgatttcactatttaggagctaagaaaccaagtttcaggctgggtgtggtggctcacacctgtaatcccagcactttgggaagccaaggtgggtgaatcacttgaggtcaggagttcaagaccaacctggccaacacggcaaaaccctgcctctactaaaaatacaaaaatcagccaggcgtggtggtgcgcacctgtaatttgagctactcaggaggctgaggcaggagaatttctggaacccaggagggtggaggttgcagtgagccgagatcacacaactgcacttcaacctgggcaacagagcaaaactccatctcaaaaaaaaaaagaaagaaagaaaacaagtttctttcctaaccaccctggaccccagaatctgactacaggaaaaagaaatacacagagcaggccgagtgcagtggcgcacgcctgtaatcccagcactttgggatgccaaggcaggtgcatcacaaggtcagaagttcgagaccagcctggccaacatggtcaaacctcgactctattagagatacaaaaaattagctgggcgtggtggtacatgcctgtgatcccagctacttgggaggctgaggcaggagaatcgcttgaacccgggaggtggaggtggcagtgagctgagattgcgccactgcactccagcctgggtgacaagatgagaccccgtctcaaaaaaaaaaaaaaaaaaaaaaaagaaagaaacatacagagcagcgggaaatgaagcacctactacaagccagatgttcaactagtttgtgtgatcttcaccataagagcaaatagctaccaggtcttcaagctttctagatatctttttggagagattaccatatctacagaaaagtggcagataggtgaaagacatggaaacagaaacaggtaagccacagctgagtgggcaaaccctcctggcagtcagagaacaggtgccaattagggatgcagaaacagcagattataaagaccagaatgcttacttccccttccagtcctgtagtgaatcccccattctgattctttgctcaaacctcctgactttctgggtaagctggtgctgttctagtctaactcgttactgtgggtctctgagtttagttaatgccaaccagcatcctccagccaggagttcacaaaggaggtgaactcctcagctctctcagccatgagggtagaaggccagtcccagaggcaggatccagcccaagcgcccagtcttcctggagtcctgcagagctctgctgtcctttcgtggcatcagcgttgtactgagaacagctgtggttcaccccaagtcacaaggtgggcacccacagaagtgtggctaggccttgttctgtcaggcagcacagaaggggtatgggaagagctcagcttctccttttgcttctatttctgctccttgacccaaccacaccctctcactcttgatacgcaaaatgggacacaggggttcccactgttcccttgctgtgcaccataaggctcaggccacatgaaggagtccttaagtgtaatgcacagctggaagtcactgttccttccatgggtaaaactggaggccgaatcggccgggcagggtggctcacacctgtaatcccagcactttgggagcccaaggtgggaggatcacgaggtcaggagatcgagaccatcctggctaacatggtgaaaccttgtctctactaaaatacaaaaaaaaaatagccaggcgtgatggcgagcgcctgtagtcccagctactcgggaggctgaggcaggagaatggcgggaacctggaaggcggaacgtgcagtgagctgagatagcgccactgcactccagcctgggtgacagagtgaggctccgtctcaaaaaaaaaaaaaaaaacaaaaaactggaggccgaacctaatggactcatctggttctttcattctggaaggcttccaagcccttccacaccagcccctttcctctctgcagtagaggaagtggagccggagaataaacaactcctggaaggccaccatctcttgacgctgcagatcttcattttctttggagaaaatgtatacaaaaagcttgtcttataagattctgtggtttcagctcttctattgcactgggccatgaagttttttaaaaatctgaatgcaaacacatcagtaagagtgttagctctgttgctgcagtgtgaccaggaaccaggctcagtggccactggaacccttcgactctgtcatgcatctatgcgctcctccggtttatgggggctaaactgctatggataccagcatttttgtttttcattgagataatttatccaaacttggaagtgacgtcaaaagggaaaaaaaaggttgcatgcttttttccctgctaacgcaagttcagtgttttacaaccccaacaatcacttgactttctaggagaaataactaaactatttaccactgattgtgggtcacgcattttacaatctgcaaagctaattctcctttccatcaagaagaaaagacaatcccaaaggctgtggtttcaatgcacacaggatattcaccaatcttattatctaatctggcaatcttctctcagcattcctgttacccactcactaagaaaatcctagttttgtgtattctcttttgaactgacattcctatcctgctgtatactgcattaatgactgaaatataacctgacaagagctatttacatgagaattatacttctaacattttgaaaattatacattgatgggttgtaaaaatgttttccaaaatcaacagaaatacatgtttaatacacaaaattcagaaaatataaacaagcataaaaatacaaaaataaaaatttacaatcctcttacacagctccaagcaccatcactattttttggtgcctgctgggtcaattgtttttctagatataaactcttctttttacataaaaggggataacagtatacaagctgctccccggcctgcttctcttctctcagcaacagctaatcctcctctgcaacacggttgcagggactccaccatttacctacccggtgtcctaccaggcttttgcccagttcctcgttatcagaagacattgtgtattgaacatctctgaggccacctagagaacctgtgctctttgtatggaaactggatgctcaggaagaacttccttaacaaccacagcctccatgacggccaatctgaaagtgaggcacagaagtgttcaagctcagtggggagctgtggccatctcatattccctcaatcactcacacttcctgcaccattgctctttcctctcacaaccttcctgaaaagttgtatgtaaataaaaatcaaaatacgggagtgaggtaagcagaagctggatagttacagatttcacacagagggtaaactgaaacaggagtcagaagcagccgcctcgcgccagtctttcagagaagagtcacttacagcagaatctacacaggctggggagcccctggctcccctccctactgtccacacccaaccccaacctagagcagctggctatagggcccagagcccaggcgggtcccacctcctgctgacctgacccagcgcccgctctctcccccgcacactttggtgaccttacccagcgtccctccccgctcctacaggttctgactgacccagcgtccctccgcctcccacaccatgttgagctgcaccttgtccccttccgccccagctaactcggtgaccagtggaggccacacccacgtgacacctgctgtccttgacagcagctccgacggcacctctgtggctctgcaggagccgcctccccgcctcgtgggcacacaggtgagctgaccgtacttgcccagccggtctgagggaagcgaggtcaggggcgacggcgccgcctccgcctccgcctgtcccctccctccgtccggcatccgcgccgctcaaggactccaaagtcagcgtcgcggtgaggagccccccacgcccaacccgcgcaggcaggaccccgggctgcggggctcgaaagtcccccacaagctgctgtccgggaaccgcacggcccggggtgccgcacgcccaccggaaggcagggctgggaccgcggacgccaggagccaccccggcccctcacccgggctccccctcacgtgggctcccgcgcgcccatctgggttccccctcagctgagttcccggcccctcacctgggatccccggtcccctcacccgggcttcccagccccctcgcctgggctccacgcgcgctcacctgggctgcccctcacctgggttcccggcccctaacccgggcaccccgcgcgctcacctgggctgcccctcacctgggttcccggccctcacccgggctccctgagcgctcacctgggctgccactcagccgggctccctgcgcttggcgccgccccgcccctgcaggactcccggcagtcactgacctcattgccgcccagtcacgactggccggcctcaaacaccgcccgcgcacgcgcgttcgcacgcgcgtgcgcacgcgttctgcccccctgggggcgtcgctacgagaggccccgcctaggcgctacgacggcggcgggcgcgggaggggcggggcggcgggcgcgggaggggcgcggcggggggcggggcgcggcgcggggggcggggcgcggcggggggcggggcgcggcggggggcggggcgcggcggggggcggggcgcggcggggggcggggcgcggcggggggcggggcgcggcggggggcggggcgcggcggggggcggggcgcggcggggggcggggcgcggcggggggcggggcgcggcggggggcggggcgcggcggggggcggggcgcggcggggggcggggcgcggcgcggcgggcgctgtggggcggcggggtggacgcgctgaaccacggccggcgggaggggcggggccgggctgaaccatggcgggcggcggcatgggggcggtggggctccgcgggcagcctggttgcgctgcacccggacggggccgaggggacctgaaagctgcggcagagcctgaccgcgccgttctccagaagagccccggccgcggctgagtcgcgctccgggtgtggacggagccggagcctccccggggctcggtgaggacacagggcccaagccccggaccttcaagtcttgaccgagcgcatccccggcccttctgcgcccacacctgagtttttgtctgtaggagtttccgcagtttgctaaggttgttattcgagttacttatgtttcttctctctaaggttgttattcgagttacttatgtttcttctgtctaatgtgttttgttccctctttagaatcgacatctagaggagtactcaccacttaattgatgatcaatacacgttccttgaaagaaccgatagcatgcgatcgatacagagcatctgcactgggattgtccgccccgcctgtcagggaggcctcgggggctaatggagctgagggtatagtcggccttggaccctcgcttttttcctttcctgtactatgaagataactgccttatctccccctcaggactgttttggggattaaataggacgtttaaattaccaacgctctttgaaataaacatttcaaaattattataaccctttagtacatgtgggaaaacgttgacattcatgttcaagtttatttttctgctggctcatttaggtttgttgaagccttgagtccctaggattgtctaagaacatgggtaaatgtgtgtggaggcctccctggaggccagagaactgccagcagccttcatgatgttaggggaacaggaacctaggagagccagggtgacatcgttttaaaatcaacaacccatcttggcgggcgcggtggctcaagcctgtaatcccagcagtttgggagaaaaaaattagccgggtgtggtggtgggcacctgtaatctcagctactcaggaggctgaagcagaattgc

SEQ ID NO: 12053 - DNA, 6000 bp, Homo sapiens
ccgttcagctgatggtggggggacgctgagacccagagtattctgtcatctggcacaactcgtttcacttaacttctctgtaaattattctgccaaggaaacaaataaataaacaaaagaaatggaataatcagtctcaatataaattagggaaaacagagggtattaatagggctggtacctcccagtctaagagataaaggagaagctgtattttgtgtgtatctgtcacaggttttttttggttttttttttttttgcctcttcttccactttcctgaagcagagtctttagctttcctcctgctgctcaagacttcacgcatttttcaccctgaccaccctctgaggaacactacccagtactctaagccaatagctttcattttcttttctttttttgagggatctttttgcagatgaaattttatgagactgtctaaaacagataaaagcaggactgctcaggctgaagcaagtgtgggtaacctgaggtgcacctgattggtttcttccttattcttgccagaggctctaggagtgcaaaggaacagaatttaaaacccagccctttctgtcttcttataatcaaaatccaccaatcttaagtctcattacttttagaccaaataggtgtcagctagccagtcttacaggattattagtttatttggaatagtctaatagtggtagtaaaatacgaatagggatcctactagataatgtttgtgtttcaacaggggtcttataaagaaagtaccttaaagaagtgactttatttttgcaaaatttcaggtgctaagacatctttctagagtatatttccagagccccttaaagtatggttacttcacagctaggtggagtccataccaaagtccaacatcctcagtcattgttataaaagttgtctttggagtgacacctgaatgaaaaatgaaataacaaaagatataaagtcttctacttatttaagagaatcttctctccctagattattgtaaaataataattttaaaacaataccagcaccgatttgagataataacaggataattctatttgcttttggtcctgtatctctgggtggacagatctctcatttatggatgttttgttgccaaatgatacacataccttagacatgactctctgatttcttaaaattatgttaatagatgccactatcccttgctcaactttgaaagtgcctgtaagcatgctcctgtccagtattgttttggttctccacaggtaactccgtcggcgtccacaggggggcaggagataccatactgcacagttgtacgtcttccatctgtttggtgtagaaaaatctaaccactacaagaatgccacggtgctcacatcagaccttctcaatgcatctcaagaaactttcacttttctaacatttttcacagataaagttgtttaagattactagaacatctaagattagatcgaaaatttaaattctatagcactagttcaaagactcaaaatgttccctgaagagatcttaaaagcagatttggacttgtggtttgctcttcgtatctttatttttcacacacacacacacacacacacacacacacacacacacagagagagagagagcaagagagagagagagagagagagagaaagacagcatgagtgcaaaggctttggtgtggtctccacattggggtggattcctatctgaaactatctgaaatttacccactggagaggaagagatcagacactatatactactgtgggtcattgtcatgatctttgaaattttttttttaatacaggagaagcattcgcttaggagtcagaatgtcttggctcctaatcctagctgtattttggactagtttaaaacctcgggctctctccactgagtttgtctgcacctctgtttcctcacctgtaaaatgatcgctgcagccctttcaggcaaagaccagctagaacttttcttgcaaagacccgaggctgatagcgatgacggagggtaatgtcagccccaggggaatcctgaaggacaacagaccatggcctttgtggtccctgtttcagtgtcatttactgttccgtgtggctccatctagcaggctgagaggtcctaaaccacagcaataggctcattactttgtttcctgtttactgataacttgcagcagataataattgctgtgggcaaaatgaagagagaacacatagagttgcctctgcaggcaggaaacatacagtacttattggatggagggtctgaaactgtaaaactatgaatcattgttaaccaggcaccatactgatagaaattaaaatattgataacacaaaccacaagtgttgtttcctggggaagggatggaaatagatcacaaggagggcactttcccggatgacacttgagaggcagacatacagagcaagacacagggcaggccaaaaaagaccacttacatcccacaggcgacaggtaggcaggggggaaatgttccttctgcaaatgagaaatggggagttttgagtctgtggttttacagagattgcatttgcaggccagcagaggggcagtgaaggggggacataggggagagacatcgaaggcagtggatttggttgtaaaatgttaagtgacaagggaggaatccaacataatatctatccctggattacaataatatgaaaaggatatgtgcataacaaataaagaaggagtggaagggaacccaaaaggtaaaaacatttggatttgttgtagtggcaaaaatttgagaaataattttttctttcagtttatctccttttattttattttattgtaaatattaacaagccattttaaagcacagagagaggaaggaagaaaatattatagtaaaagcaccttcaagtataaggtctcagaacttgacaaccatgaaacccaaactaggggacataagtagaattgggatagggccagaaggggcatccacggagaccaaggggagagcagccaagctcaatagcccagtgattaagagcccagactctggagtagtgtgaccctgggcctcactttccctatctgtaaaataggaataatacagcacttatttcaggattgctgtgaagattaagtaaaataatattggcgaagggcttcaaaccatgactgacacacaagttctctgtgggtgcttgccattacctggaggaggccagtgtccagggtggagggcatatcccagaccttaaggaagttaaaggatgaggggagcagcgcagcaaaactccctccccctgcaggctgtcatgtgagtggtccctgcaggacagaagaggtgatgaaaaagcaaaaggaagaaggggttagaaagtgagagggaggagattggagagactgggaacacacacagaaagtagcatggcggagaaagaagccacctgagatcaagtgaaaccataaagagaagaaaaaagccagaactgaaatagagaagttgggccaggaatgactgtctatgctgtagtgggaagaatcttgggcttggggtgggagcctgggttctgtcccttgctgcataacctcttggcagagtggccttggaaaagtcacttatttccattgagtcttttttttttccatccgtgaaggtgaaaatagtcaacgccaacctcacaaagctgttggcacgattaaaggagggtactttatggttggtgcctgagcacccaatcagtactgagggaaactcttctgcccatagcagtccagggcagagcactgtggcagacagaagcagcgctacgccgcatcgcctttcagcgtgcaggcccaggaatgagcgaggcagtgggcggggaagacaggcacggggaatctggggacagataaaggaaactcgtgatggggcgaggctgggctgaagagaaacagattggggtagagctgcaaagggaggggtccactggaaggcgaggggggaggccgggaagagagagggtgggaaggcagtgtgagatgggagggcagtgtgagaagaaaagcaggctggggaagagggattggaatgcagaaggaacttggggaaggaggaagtcctgcaggcgggagggaaagaagagagggaaaatggggatgcagtggaggcggggggcaggccgcgagagggagaggatcccgggagcagacgaagaagtggagcagctaaagtctgcgtcagaagaggttggggactgcgagaggagaggctggggcctgcaggggagcgcagcagcttttagcatcgatccaaactctaaagactcgtggcctttgcctgacctcgagggtcgggaatagacgcctgtctttgtggagagcgatacccaaccgagaaaatggggctgttccgagctgggccctgcgcctggcccagggcgaggcttctctggctccgggctggcccctgaggggcgcaaacggcaggcctggcggttggggccgaggagggagggtaccaccgccccgaggcagcacgcagcctgcagcagaggcgcctgctccaagctgtctcttgggggcgccgccgccgcttccctcctccggggccgctcgctcccaggaaagtggaggcggctggcgaggaccgagagccggggccgcgctgcggagggaccacacctccgggagttcgagggggaccctggcgcggcgggccagcctttgctccccggccacgggccggcagcgcccgccttcccccggtcagcgcttgcggcccgcgccgcgcgcaccgcccggcaaccccgcgcgcgtcccgcgggggcgctgcgtcttcctgccacaccggcgcaccgcggcccctctcccccacacctccggcccgcaccacccggctctcctcccaccctccccacccctcctctgccctccctccccattcctcccctcccggcgaggggcgggagggggcgtggcggggccggggtttgtgtggctgggacccggctcctcgcactccgagtccgcccgaggagccgggccccggccgctgtccagccgctccgtgccccgcgcgtcctgcgccgccgccaccgcctcctggggagacgcagccacttgcccgccatggatactcccagggtcctgctctcggccgtcttcctcatcagttttctgtgggatttgcccggtttccagcaggcttccatctcatcctcctcgtcgtccgccgagctgggttccaccaagggcatgcgaagccgcaaggaaggcaagatgcagcgggcgccgcgcgacagtgacgcgggccgggagggccaggaaccacagccgcggcctcaggacgaaccccgggctcagcagccccgggcgcaggagccgccaggcaggggtccgcgcgtggtgccccacgagtacatgctgtcaatctacaggacttactccatcgctgagaagctgggcatcaatgccagctttttccagtcttccaagtcggctaatacgatcaccagctttgtagacaggggactaggtaagtggcaaagaaaacgctcgactcccctcccgctggagctcggcagccagggagctgttcccgctggaggctacatttgtgaattcccttcctgctctggacacttcctttttacttttcttaaattgtttttctcaagctcgagtaagtttctgaatgtggctgcggattctattccagtctctaaacctcccttcctttccccccctttctttctctctcccttctttccttcttcctcttttgcagaaggcagcgtggttgccgcttgttggtggctggtgggggaaacgtggaggacgggaggcagcaggcggatgaacccggctggagaggggtcgggatggggactgatggaatcggtgtctcgggatactgggttcgcagtccaaggcctgagctgctggggcagatctagggcatgagacagccttggaaagccctgggcaaagccggcactagggagtcccacagtctgaggaactagtccg

SEQ ID NO: 12054 - DNA, 6000 bp, Homo sapiens
tcaaggacggtatcttattcatcatgtacttcctgcactggtacagtacgtattcaataaaatatgtgttgaataaataacctcttctgatggttacagctaaacaaacatagttctgatagttgtaattatcacatatgacttaaagtgaaccttactttttatgattaacatcttttgtatcaacttttctacaaatctacatagcctacacatttgtcattttgatagcaaaatcgtatttcattgtattgctatccacagactgcttaatcacttctcttaagtggctgggatgggaggttaggcccaagatatcttcacaacaggattctcagcctttcaataagactgattagaatcaggctctcctggggtctactcatatgaagattctacactactagaaggaagacgttaaaatcatcctaaaatgacttaaatcatgaaaaatctcattaaaagaacaattcatcaaagggaacgtcccattccctttgagttctgccctacattataacatgtctgggggtgatatcattttcttttcttccagtaaggtttagtaacacaatacttacattaccataaacataaataaatacaaacagaactgcatattttaaaacggaccaagttaatttctaaggttccctagctcactcttaaaagatgtgatttaaggccaggtgtggtggttcacacctgtaatcccagcactttgggaggctgatgcaggaggaacacttgagcccaggagttcgagaccagcctgggcaacagagcaagattgcctctccacacacaaaaaaagtttttaattagccaagcatggtgacacacccctgcagtcccagctactcaggaggcttaggcaggaggattgcttcagcccaggaattcgaggttacagtgatctatgactgttccactgcactccagcctgggcaacagagcaagaccctgtctctcagaaagaaaaaaaaaagatgtgactcaagcagtgtcccacatatgatcacttagggaaaataatctgattaaaataacaacatgaaatggaaaataaactacaataatctctcaatatacaaacaacattgtgctacccaactttagttgggtccacattagacccattcaaagactgtgagagaggctggggcgcggtggctcatgcctgtagtctcagcgctttgggaggctgaggtgggcggatcacgaggtcaggaggtcgagaccatcctggctaataccgtgaaactccatctctactaaaaatacaaaaaactagccaggcataaggctgaggcaggagaattgcttgaactcgggaggtgaaggttgcagtgggccgagatcgtgccactgcactccagcctgggcgacacagcaagactccatctcaaaaaaaaaaagactgtgagggattagctactgagatacaaaaggactgcattcatttatgaggcagttccatagcgctgactcaaaaggatggcatgactccaagcctccagtatatgttacataccaaaaaggaaaaagaaatatgaggctatgtcatatgtttgagcttgcggatattcccaagaaaaagcttccagttacttagagcttgcatcttttgggggattccataataaattctattataaacccagattttttacaaagagcaaatataaatttggtaagttaaagcttcaagtgctttttgaaaactgtcttggaaaccaggaactaggtttgtacatattttaattatatatgctttcttttttacttaaaaggttgaaaaccaaatcattcttaaatgtaaaaggctacattctcctatcggcacaaacacaaacatatcaaattcaaatattttgctggcatctgaaaacgagattagtatggacctaagttcttactacacaaatgattttacagtgactcaccatgagtaagctttcaaagtcattttctttagaatgccagtctttgtttaaaaaaaaattctaaatctgttcctcataattactaccttagaaaatcagaagaggtttcatacctgattccgcttattttttacaatgacacagttacctttgtcagtttaaaaaaaaaaaaaaagtttactgaaagttagctgtttggaaattatactgcatttcctcattgagacaatgttataaaaggtagtaaaaatcctataaaacctaattaactcctaatgtaactgacgtgtgcctggtacctcaaattcctctttcgatcctggaaaatgtttcagtgcacgttttaaacaccttatactgcaaaaatgtggtcagctgattttgtatgaacgttccccgagagaaacaagagttgactcactgcacactattacaaaagcctcttaaccggtgtcccagcctctagtctctccctcctagattctatcctccaccgtgttgcccgttttcttaacagaaaatgagattaggtcgcacccctacttaaaacctccactgcccaaagaacttcctacggggtgaagtccaaaccccttagttcagcatagaagactcttcccaactggtaacaacctaccttagtttgatcttccatccctcccttttatagtctgcatgaagacatattgacatttttatcatttcctaaaaagtcatgttctttcatacgccccccgccccaccatactcttgcaaaaactttcctctgcttagaatgtatctactattctacttgaaaaatcaccgatgtagcccagttcaaatattattttctctaaaaatcttccccaacatctctcagatgcgcttagcatatttggtcaccttctgcccctctacaatcaactgtgtggtgtttataggagttccataaacggtggctaaactttgaaggggcatacacatgccgaagtgaggagctggccaaaaccacagttaaagaccatcaggatattccactcacctaatgcaggtcggtaatgactgacaatttatattaacatttaaaaatacagtcttatttacatttacaaacacaaaaaaaaatcacagattaataaaactccggatgtataatcgtcttcaccttaaacatcggtgagtgttaaccatctagaataccaccggaaaagtagttttaaccagaagaaatttggcaacttcccattcaaaacattgtcagagtttcaacatttccacactggggcaaatttacttaatttcaaataaagcagccaaagataagaaaaacaagtaattagtttcctgaaggtcaacagtcctgcgttgaaatcttctatcatcacctttgaataactttcaatcaatgatttagtaaaaactcccattctccatcatcctctgtcgctgatagagaaaatacagccatgcaaacaattatatcatacaaaatccaaaataaacaacttgtttccagaaagacgccagcgtgctgacaatctgcttccactatgtttgggcatctccaatacaagtatcttacatagtcaagggcagtttcacaattcaaaaacgatttcacacaaatgatttaattcctacaataatcctgtgagttcaaaagagcagggattatctgtccggatttaacacagtacgaacccaataaaaacacagattttttaagaatggtttggctatagaaaggtagcacatcgtttacaaaatattcttactacaaaaatgacccaagagaaatgagcgtcctcccacccacctttattccaccattaaatttagctgtgttgacccaaggataccatgaacgtcaaaatttcaaattataacctgcagcaaaagtttcatctctcagtctctttccaagcgacattaactccacgagcgagagccagctccctccctgcaggcgtttggaggactgaacgcccgcgggcgcgcccagcctgcagggctccggcccgccgaggtcagcgcccgccccagagcgggtttcggggcgtctgggggacccggggtcgcgcgaggcggcgagggatggggggacgctgggaacggctccatcgaacaggacacggaggaagcggtgccgggcagaggacccgggccaagaagggcttggggcgccaaaccccgcgcctcgggtgcgaccccggtccgcacacacctggagcggccgcgccccccgaccccgggtccgatccccaggccgggcccctccactcccaggcaccacaggttcactccgagcgccccgtccctaggaagcagccgtcccaaccgacccggggcgcggacacccacctggccgcgccgcaccgaggactgggcccaccaggccaagcaacagcaaccaccggacacgaagggtccccgagggaaagcgcgcgccagaccccatctcggccgattccgcaggttcctctcagcactcggtcgcctccacctccgcctcttccatcattttccaaccctgccggggccccaagtctggccgggaagcgcgcgcgcccgacgagcacgcgcgcccgacgagcacgcgcgcggcactgacgcaactgagccctcggtccgagctcgctcccgacatcgcctagctgcgctgacgtagggaaaaatccagtccccggcgcgagaataggatttctaaaccggcggtggcaaccagcactagtcggcccgccagtcatatccgccccgccccgtcggctgccgggcacgcccacctaggggggtcgacggatccgattggagaacgcattcggcgcaaaagaaggaggagcatgagacccagaagaggaatcgagaagcagaagcagagggcggagtagccccgcccgtctgctcgaccttttctagttggttggcggaggtgcgcggagcgtcgagctgcgcgtccattggctgtttggcggggctacgcgggcggggctacgcggaaaggcctgaccacgcagttcttgggtctgtgctgctggcctggggttgtggttgaggccgggtctccgctcctgtgcccgggaagatggtgctaggtggttgcccggttagttacttacttctgtgcggccaggcggctttgctgctggggaatttacttctgctgcattgtgtgtctcggagccactcgcaaaatgcgaccgctgagcctgagctcacatccgctggcgccgcccagccggagggccccgggggtgctgcgagctgggaatatggcgacccccactctccggtcatcctctgctcttacctgtaagctaccagtggtcgaggcgggtggacgtggagggtgtgccaggaatatatgggtgttaagggaaggcagggttggggggacgctgcattttttcagaccctgcctctctgaggtcgttccggaggcaaatatcatgaaccaggtttctcacagcccgtgcagagaaaactcttgtgtgtcagtgacagaggctttgagatccccaaagaggaaaactgggtaggagtaacatcatatagcctctggaagaagggcgtaaggttgtgctttctttgccctgcgccctttagcccaaggagagtattagtcggtcgattcggtgccagtactgagtaaggcataaatggagtaaatgacttgtctctgcctacaaggcatcttttaaaaaagcaatcaatattcttaccgttgcagaatcacgccattttttaacatctctttttgatcaaacaagaaaaggcatttgggaaatgcaaagaggactgagaatactttggcttaaattttgcccccagaatcttgttgtttgcctactgaagagatgaaaccatggcagaagtagaatccttatagaaacaggaccagaaacacctcccttctccaacaaaaggttcattttggtggctgtccgtttgacctgctgtgcttcagtttaattggcttggaaaggggtcagcagggtgaaaccgaaccccagaaaacttgatgaagaaatgtcttttgcccgttttgattacgtgcatgcaaacagcgatttgc

SEQ ID NO: 12055 - DNA, 6000 bp, Homo sapiens
gactccttatccttgatgaatcaatctgaggagtgacttttgctgctgaaggggaaaacccaggagcaggggcaatgggagagagtctggtgccattcgggctcaccaccggaggctttgaactctgcacaacgggctggggtaccacaaacatgacagcgcctttggggacttgtgtgcccatgaacacaacaggggggcaaacggctggtggctggctgggaggagtgctgggaacgactgttgtcacaacagggttgttggcaggaaggggaaccatctggcagatgaccggcataggtggcactccccctgcagatactgcaggtggagagaccaacactgacttctgttgtggggacacaggggctggctgagacctgcagatgaccgtctctgaggaaggcacagaaaagtcataaagtgcagcacttgctttctcatcaacatctgccactgtgtttctctcacatttggatctgtttggtgacacagcggcacatggtatgttctttcttgcagcctcaacatttaggtgggttcttcttctaaaagaattgttctgatagttgaggatgctggctgctttcattgggcaggtctggtggttacatagctgggcatcagctgtatgacgaatcacacttgttgcctgagctttggggagtttgggggcagatactgggctcttttcttcctctttgaaaggtgcggcaatgtgaggtttggcagtatctgagagtgacttgaagtgtacagtagatggcgctggtgccatcagatttgacacttgagagggttcaaagtcagaaggactgtaaggtggagtcaaacactaaagaaaagggaaatacatagcatgagaaatctacagtttattatataaattttaagaaattatataatttacgtctatcttaaaaacaataatacttacaaatgctgggattgtatgaaaatcaggtgttcccggaagcagattctcttcctctgacaaatcagatactggtgtaacaggtctgttttcaacgtatttcttaaaatcagacttccaactgcagctcattgacataagtgcttctacagcttcaaaatcacttttctctgcagttttgttccaggaatacatactctcttttggcctttcagaaatcatttccattctttcctcctataaaaacaaaagaggaaagcttataagcatattttttgtcatccaaatgacacacagaaaaatgagcaaattttttttttttttttttttacaactcacacaactttccaaattaaaatcagaaataattttcctctcacacttactatgatactaaggaagttcagctacacttgttaggtaggtaacccaaacctcacagtagtggcaataaaatcttcctcattttttctgttaacatttagactttaacactgataaagcgatatccgttcatgggagagaggcacacctactaccattaaggggactaagacgaaaattatcaatgcatttgtgatccaaaaggagaagtatttggctaagaagaaaaggagtattttatatagactttccagagtagctacctgcaactggagtcgggcaaaaaaactaagagtgcggcaaaaaatttatcttcttaaatattacaggtatggtatgaggtcttttgaggtacaaattgctgatagaaaaaaaaaatagccaaaaccttctaataaagacaaaatgtagtagagctctggcctgttgttatgggtctgacctttggaaagtcactttgcactttgggataaaaatcaaaagataagggatcctcagggtatctttcaagttaaaattgcattatttaagatctaaaatttgatcacttgattatggtaaagaaaaatcaagtgatatacatagaaaaaaattctaatgtttattttaattaactttcaacctcttcatatttgtgctcccttttactgaatctatttgacacaatggtttgccatacataactacaacatagctaatgcaatattactaaaaactggataatcaaaaaatttaatattctacttggaatttgcaaaaaccgactttaaaaagtcagcataatcaaagtagaatctattttaattccttaaagaactgcttgatgacaaaataacagcacaggttttgcacttatttgtagaactacctaatgttttatagtaaagttctttgaactacgctaaaaaaaaatggtactactcaccatttctcctattttccattaaaagaaaactgtccagactcgtttggtcaaagtagagattgtgtaaaaataccaaaaaacattctttacgttgcaaggtattattctcaatactagtttttcaaaaatgcatgatgccttcgtgttgaaatcctaagaaaacgagccattgctcttgaaatatcgctaacaatataattgcataatcgcgcccgcctttatgtaagctgcaatggacagcgcgcgtgtgtgtaacagccccaagacgccaatgcaaaaaaaggaaaaaagaaaggcaggcggcagggaaagagagcgtgagctgggaaggacaggaagggaaacagggaggggaggaaagggagtggggcgcgaggcaggaaagggaagcgcgggcggaggcgcgggcgggggaggcagacgaggggcgggggcggacggcgggggagatcctagctggcggagaccgacggatggggccgccctaacctcaatgaggctcacgggtgagtcactgggaacattcctcgccgctcgcacgtccccgcgcccctgcccccgccattggccggccggctcggcggcccgagcccggattggctgtgcggcccggggcgggggcgtgggcgaggagggggcgaggcatgtgaacaaagcgtgatcagcggctgctccgggaggcgcaggaaacgtgaactgggaattgccgcgccgtcacctttcccctacttcctgagcttgcgggcccccgcccgcgcccgacccgggggaggggccgcgggcgccgccgccaaccgcccggccgtgcgcgccgggcccgcggggaggggcggggctgcgggcgccaggctccgggaggcgcccgccccttccagctccccgcgagccgccgttcccttaggaaccgacagcggggccgggcctcgctcccgcccctggcggaggccggggctgggtcactcggggacgagaagctccccgggcgcacccgctcccggcccacccccggcctccgcctcagatgcgggaggaggagccaggtccccgcggaaacccggccgccgccctcctcccgccggcagcccccgggaacccggccgagccctcggcacttcccgcccacgcggcccacgggacctcagaccaccccgtctctccctgtagacgcggcgccccctccccgtggcttccggcagctccaggcccctcccgccgcgcgtctccacgggttcccagacgtgcagcccccacaggccccggctccagacgcgcggcccccgcgtctcgcggcccagctccccccgcccaccttcccgccccagctgctgggtcccgcttcccaccctcctgccccagaggcggctccccgcctcttccaaggagtcgtcagaaggcggccacctgcccctggggtaagagtccccctccagacgtctgggggagcaactcgtcccccagggctgtcggcgggccctcgtgtcatccccccgctccgacgacaggcgccccttcccccagccccgagctatctgctgagcagcccccgtcttccaagcgtgggttcagacccccaggatgggtagcccactcgcctctcctgtggacaccccgcctcccgagtgcttgcgagcagccccttcctcccctggctcgcgttcctgagccagaccgggcatctctcctcggtaccaggtgagggtagcccccttgtccctcccgcgactctcgttccacactgtaccccaacctcgctgcagggcaacggccccctccccactcctcccccgctcgtcatcctcctcctcaccagccctctcgggtctccatgcggagttgtcccttcccctcagtacatctagagcaagacccctgtccctgtctgaagatcccagccccctggttcgaccccctcccgaacacacacgccctcactaatgcccatagtctgcaggcaggaagccctttccttccccacgactccgctgcagccccaattctcaggcatggctgatgtccggggctcggggttcgcgccccctttggccccccagacaagaccaggcgaggaagcacaggggcatccccaaatgacttaccgcagtctgctggagagaggcaccgaagttgagcatggttggctgcttggccgccggcggcaagctgactggctgctaggctgctggctgcttggccacagacgggcgcacggagacactcgacgccgctcccgccgccgccgcgctcagcgccgtctgccccctccccattcaggtagccgctcagcctgccccgcgccgcgggcgggggtgggggcggagcctgaggccggccaatcaacggcaaaggtgtgtgaggcgccggccaatgggctcgcggggccacgcgtgatcggcgactgcccggcagcgtgaagctggtgtcagtggagcgtgtacacaatccccggcagcgtgttccctctgccctgccccggggaactccagaggccacctgattgagtgacgccccccgcccctcgcccacccctcgcccactccttgcccctcgtcccccgcccctgcctagagaggcggtgccgcggccggggaggcgcggcgactgcagcgcgcccaggcactgcggagggccagccccacgtggggggtggggagggatgcccgctccgccccgtcccctccgcgccgggcctcgtctcagcccgccacggagtgggcgggacgccaggcaggcgggggacgcggcggctgccagccaaggggccggagccaagagatttgcattggaagcgccatcctcttgcgcgtctgatgaggaagcagaacccggtgaccgactgagctgcatttctgaagcatttgctgggttttgcctcactaagcctcggggagcactggggcgcgggatgggggaccctgtcacggagccgacacctgctcgcgcgcctctcccccgctcacgccgtgccgcgggctcgccctccccatctgcagcgcccgcagcgcctgcccgccccgcccatccttcctcctgggcaacccagaggatggcgtgaggactcctggaagcccagaggaccggaccaggggcgtggtggggagccgtagacccgagtttttatccttctctggcgccgacactcggctgcggaatcgagtttgagctcggtgtagctgaagtttaaattgtagctgtttcaaaggtagaccccacctcacccccacccctggaccaagacctctggaagcgtcctgcctggaagccgcttgtggggagggctctcctagggtctccaggctcccgctggagcacgcctggaggtgggtttgccggccgttccctgaaactggcaccactaccgccccacccacccactccagctggtgggaggcaggctgggtttctgaaaggaagccgcccgtgtgctgcgcctgggggctggggctaggccttctgatcaggaaagcccatggccctgctttggcacggatttgcccccgtttggccgtttgtgcgtgatcacagcagctgttgttggagaggaaggcagtgataacggggcttaaagcaaatcggagatcttatccgatttggacaggctgaatttaaggcaaaaatcactgtctctccttcgagcactcacgtctctgtaactgaatgaaaggctggtaatgcaaatagcatttctatcccagtaatcacagaatgaacacaggaagggaattaattcttttagaaactgccaatgctatgcgtatct

SEQ ID NO: 12056 - DNA, 6000 bp, Homo sapiens
taatggattcaaacctggatacttactactaacaacatatttctttttcattctttgttgttgttgttgttttagagatgggatctcactatgttgcccaggctggtcttgaactcctgaactcaagcaatcctcccatctcagcctctcaaagtgctgggattacaggcatgagccattgtgcctgcccccaacatgtttctgacctaataccaaaacctgaagaaaagttatttcttggaccaagaatgaaaacacggtacagaatgaaagtatttcctaccctgtttgccatgtttggcatgatgccacatactcagaaggcatttactaagtgttcactgaatgaatgaatgaatgaatgatgaattaatcagtatacaaaaggcctaggacttgcacagctcattattgaatattctgaagtaaaaaaagcactctgtgttcaagacgtatagaaactctgcactgacattaagttgctcagaagccacacactgcatgcagatgtgcaagtccccatttcaatttccttaatgccaactcttacagggaatattaaaaagaataacgaaaatgttgaggcacatggaaaaaggatgacaggtacaaacaacataactgactctttcggagcagttttaaaaaacaaaaacaaaaaaaaccctcaaaatttaaaccaaagattccagtgattagaactaaggccttcaaatgtttctgaccacacaccccattggtaacatacttttgggcatgtactcaaacatctgtatatttatgtatttatgaactacattccactgttagaaagtacatgttttcccaaatgatgaggactttcagtgactcagactatgaattagccactaagaatctcctaaatatttatcattaaatttagtgaaattctgccaaatacaggattgactttaaacattaaaataagccgggcatggtggctcacgcctgtaatcctagcactttgggaagccaaggcaggtggatcacatgaggtcaagagttcaggatcagcctggccaacatggtgaaaaccgtctctactaaaaatacaaaaattagcagggcatggtggcaagcccctgtaatcccagctaagcaagaggctgagttaggagaatcgcttgaacctggggggcagaggttgcagtgagctgagatcacgccacttcactccagcctgggtggaagagcaaaactccgtctcaaaaaataataataataaataataaataaataaataaaagtaaaaaacaaacaaaaaccaaaaaatcagaaaagaaaaaaatctgaagccatttgtcttcatgcactagaacttatttctaaatatcttgctaactaggatgactcatcctatcaatggctaatatttcaaagaataacatacacttagggagaggctgattattaatagcaattaataaataggacttcaaatattcttctttaaaactcagcactgtttcaacttctcaggtccaaagagacccactctttttttagtctcatggtttatacatactaggagaagtggcagcttctgccatttcctcattgtttacttgtgcttgcataattaatattgtctcaagctgcagtttctttgaagtaatcctttaagatcacttggcattttggtgagggttaatttggttaaaactagatataaatcttaatgtgccggttgtaagcttccatatcacaatgtcaatgacaaccaatctgtgaagaagacactattaaccttttcacatgtgaaggccgtcccttcttacaggagacctgagaccagctgaatgttcagtgactggaggcacctgtgtctttctagatcggaaaaatcaagttttcacattattttatatttttaagtgtaagatataaacaaaaggtatatttcttcctgacctccaataaatcgtcttggacactgtctgtggtgtgtcatctcactccagaaaccacagtttagagaatgcatagccctctctccaacgtcaaatacgtccaccactagttacattcattcaatacacagacaattcctggcgagcatataacacagcaccttggaagaattctgtgcctctccacgcccttccccaggcttcatagtctcacagtctggtaactactaaacaagctatgagagggaaacttacttgaaaaaacagagattattcttataaccaggaaacaaaagcagaagcgaggtaagggagataaagtaagtggtacagatattccaactggtggatgggaaatcaaattctattctatttgagtagcacttttcccagcttattcttaatgaacattcatgtcatgatcatgccaatccaattagtcactttatatataaaaatgcaagctgttatgtattatgcagctcttttgtcaaataagaataattataaatttttttaatcaactgaagggagagaaaacactgccaacgtcttagaatatgttcatcagctgagcagtgaagatcatggctttgcttctttttatctagtactctccagtttggatttttacgttgtaacataaacatatttatatttaattatttgagatgcattttccccaatcttctgagattctctagcagaatatttttaaagtaaataaaatttaaatccaagaatctaatctagtcaaaactagatagcttaaaaaaaaaatccgtgtgaacaacaatatggaaagaccaactcagttaatttttgacaaccaaattgagtggatttgggagagatttagagcaaaaatatttatgactaggtttaaatatttgtcttccatgagtaacatagcagagatactgcattaaaaaggtcaaccagaagtttgtttttgagaaatattaccaattttgaacatactaaatctttcttagagtaacaacatacgttttagataacaggtagtagctaagtacagaacaggtttagaaaaagttaatagtgatgagaaatgtaaacttcgtgaacatattttcggggtagcattcatgataactcaagaactcgaatttatacgaattctgattttaaatgagtattaaatctctaagaccaaaagaacataaaattatagccaacaaaccacactctggttcgaattttcggagcatgtttactctacactgaataatcggaaagccatttttaatgccactggacaatttcactatttaaaaatttacagtgttccccgaatgtgcaggcagcagagtattttggcaaccaacacagcgagacccatttacctttaccttagactcgtaaaggctgagttacttctaggtatcatttagcaacgcaataaatgtctgcctcgaacagtgaaaatttcccaaaggagcagaacaactttcatgggtggggcaaaaggctgggaaggaagagaattcgttttggcttgctccagcgctggaagaacactgagcaccacactctccgcaaaggcctaacacagcaaaggcgactgtcaaatcgatcccttttgggtctgctgtacccgtcctctagggaatcaaaataaggcaaaataataaaaagagtacagagaagtttggcggcggcggggcgtgggggcttgaggcatctcagagaggagggcaaaaatcaacaagaaaatgcccccattttaaaaatcctgtctgcgacctcggatgggagattttgtttatccacgggcagtttacttctgtctccctgacccatctccacaggctctggtgctcgccgccactttccgagcagatcattactcagcaccggagccggcgcgcctcctcccgcaggcgggagcggggtctcggggagaggcgggaagaggcgcgaccgcccgggcgcccaggtgaccgcggccctccccgcgcccccgtccccgcgccccccgcaccaagcatccgggagacccggagcccccgggccgaaccgcgccggcccccaggcagctgaggcactgaagggcaggctcgggcacgggggtcctgagggtcgggaggaggccgcggggaccctgtgctgtccccgagcgcccccagcccgcgcacgcccacctcccagcccctctacccaacttcaccgctgccccgccagccggttccgcaccgtccgccctcgccccgacccccggcccgccgcgccccctcacgcccccgttacctttccgttcttggggctgccgttcaggaacagggtcacccgcctcatcgcgctgcccccgctgggtcctgagtgagccgccaccctcccacctggtcctcctcccacctttttctcctcccgcccttcccctccctccacccactcggattcgcctcccttcgccaccttcctgcccttggggacacaccacacgcacgcactctgtcccacacccaaggttcggccggtcctccttcccaccccgcccctaggctcctcagcctgcctggggcccttcccccacctctccgagactgacactctgccgtaccaaccaacccgcgtcaccggacagagtccagccaatcagcacccagtatcgggcgggctctggctaacctagccgggacggagggagggaagagacgctgaaggctagtagacgggaaggggcatcagccaatcagagaggctcctggagccggacggcggcttccagcgttactgagcaggcgcaccctctagtttaggtagcgcttatctgcatacgagggcggggtctggggaaaggaggtggagcgctgaaagggacccaagcaccagtcagcccctcctccagcgttagccccgcccacaagccggcccagctaggaaacggctgcggtagggacggactgattgggtaagagccagctcgtcgctctgttaggattggttgaatgagtcttttcgaagtttgcagcatccaatagaaaggtgggaggcggagttaaagcgctaagagaagcgttactccgcgagactctcctgaaaagtagtccccgaggtcacaaggcagtggcaggtgtctgtagtcctcgggttgactgcagctcgcggtggtccctctccgagcccaggaagccactccagtgccgagggagaggcctgggagcgctcggagtgtgcgcggactggagaagggggaggtggcggagtgattcgtagagtaaattcggtaccgaggggcggggtcggggatttgaatcggtcggcgggcggaggaggcgggtggaggaggctgccgggcagagcgcaggccaggatcagcgcaggctgtgagtccaggtcagccgtcgggacctcgggctccgggttcgaagagcggctcccggctgcgggtgctttgccaggagagcccttccggacagaggagccggggtctggaaggagcggccgacgcgacgctcgcctgccacggggctctgggagtaagcctgtctgcctggcgggccttcaggtgcggcgtgagaggtaggattgcatccgcgctgccacggggctgtttctccggggcatttctaggcactttgttcggcttaccctgcagcacagaattagtactcctgtcaggagctgctctgggtgaccaggagtgcatccggacctgttgagagaatttctggaaatggatagagctgcgtcttgagaggggtacccttatgattcaggttttcgctacggttgaaaagccatggcttatcctttggggtctgctttggtgcctgaacagcagttttctccatttctttctgtttaatttggctttaaaagtacgcgcttagagtaaaagaatggttagcacagggtgggaagtgtattggggatggatgggaaggaagtggagatggttaataggtagaaaaacaaagaatgaataagatctagtatttgctagcacaacagggtggcggtccataatttaattgtgcatttaaacataacgaagtataattggattgtttataacaaaaaggataaatatttgagataatgg

SEQ ID NO: 12057 - DNA, 6000 bp, Homo sapiens
agcagcacttttaatttccttaaaaaaacctttaatttcctttgcattcacaacttggctaaccagcggaaaaggccttgctttctacccaccttggctttcaacatgccttcctcactaagcttaatcatttctagcttttgatttaaaggaagagacgtgtaacggatttaaagtgagagacatgtaactcttcctttcacttgaacacttagaggctatggtatggtcgttaattgtcctaatttcactgttgctgcgtcttagggaatagggaaccctgaggagagggatagaggcggaggaactattggtcggtgaaacagtcagcacacgcacatttatcgattaagtctgctgtcttatgtgggcatggtttttttgtgccccaaaacaatgacaatagtaacatcaaaggtgactgatcacagttcaccacaactgtgtgtagatagagtaataataaaaaaaagtttgaaatattgcaagaattgccaaactgagaaacagagacagggagtgagcacatgctgttggaaaaatggtgcccacagacttgctcagcacggggttgccacaaactttcaatctgtgaaaatacaatatctgccaagcacaataaaacaaaatgcaataaaatgaggtaggcctgcatctgacaactgtcaggaaataagtctcctagctaccccttgaagggcaagtgatttctgaggctgaggtgtgggactgaagaaacaaagtctatttctcagaaggcagtcatcataattctcacctaccttgtagcaatcgtatctctcataggaggtgcccccaggagagtcagggaagatgtatggctgtggatgctgacggtaccagaattcttcctcggcctccttcagcagctgggtggccttcgccatatccttttcattcttatgttcttcaaaccgggctctcatcaaacaagcaaagtatcggtatttgtctcttaaaccaaaatgattttgaagattagaaatgttacctactcacgtggtcagtgttgctgtctgacaggaggctgcacttctgataccttctggatgggcagtggacctaccccaaccctcccaatggagcagccgtatcatcatggctgcttcctctacagcccaccaaacagcagcagcaaaaaaatactgtattaaatatataccctaaccatttttctcctcttacatccaacaatggaatgaggatttaaacaaaaaaaaaaaaaaaaaaaaagaaaagagcattcgcaagagaaaagctataacctctgcaggatcattcaacattcattgaatgacaacttccatttccttctatcttgtgctagtcactatgctaaattctggagatacaaagatgaataagaaaggtgttacttggcagaaacagtattgcttagctcatacagagctaggtttgtatcctgactctgacactagctgcataaacttaggcaagttaaagtcaagttctaaagaaactgggcaaagatcagttaggaggttttgacaataatctaggacacagctgacgagggcctgaaagtacggagctgtgatggtgacaggagacaggggagacattgagacttccaagttatgagaataggctctccagtcagactgtatgggcctgaatcttagctctgccactactagctgtgtaacttggggtaagttactgtcttctggtcaggtgcggtggctcacacctgtaatcccagcacgttgggaggccaaggcgtgtggatcacctgaggtctggagttcaagacaagcctgatcaacatggagaaaccccgtctctactaaaaatacaaaaatgaggccgggcatggtggctcacgcctgtaatcccagcactttgggaggccaaggcagggggatcatctgaggtgaggagttctacaccagcctggccaacatggtgaaatcccgtctcagctaaaaatacaaaaactagccgggcgtggtggcaggcacctgtaatcccagctactctgggggccaaggcaggagaatagcttgaacccgggaggcagaggttgcagtgagtcgagattgtgccatttgcactccagcctgggggacaagagcgagacttcatctcaaaaaaaaacaacaacaacaacaacaaaaaggccaggcacggtggctcacgcctgtaatcccagcactttgggaggctgaggtggaggtcacctgaggtcaggagttcaagaccagcctggccaacatggcaaaaccccgtctctactaaaaatacaaaaattagccaggcgtggtggcgcatgcctgtaatcccagctactcgggagactgaggcaggagaattgcttgaacccgggagacggaacttgcggtgagccaagatcgcgccactgcactccagcctgggcaacataagcgaaactccgtctaacaaaaaaacaaacaaaaaaagtcttctaggccacgggttcctcctctgtaaaacagtggcaataacagtgtgtatatcttaaggttgtcataaacagtcaataagataaacacactttaaaaagtgcctggtacatcccaagtgttaaataatgtcagttactaatatcatactggaaagagaatttataaaaaccagtgtctaattatacatggtgtatgagtatgtgtgttattggcaaaggaataaggagcaaatacttgagaacaattctgagacttaaagctcagtaactgaattactaataataccattagcggaggcagggaatttgggaaaagagtcagaatggggagtgacaggaaaacaagtttgatttcaaagaatttagataaatggagattgagagaacggttggtgatcttttcaattttttttttattattattttttgagacaaagtttcactcttgtcgcccaggctggagtgcaatggggctatctcggctcactgcagcctctgcctcccaggttcaagcggttcttctgcctcagcctcatgagtagctgggattacaggcacccaccaccacgcctggctaatttttgtatttttagtagagacgcggtttcacatgtaggccaggctgttgaactcctggcctcaggtgatccactcacctcagcctcccaaagtactgggattataggcgtgagccatcatgcccagccaacagtcgtgatctaacaagcaattcgaactacagctctagagacaaatgagcgcaggtggtgacagcactaaatgaggctgcccgagtacatacaacaacacagtatgcctaggatggaaccacagagaacagcacaatgagggcaaatggaggaagaaattaaggcaaggattgagaaagaatgtcagatctaaaaaatgctgagccataactgtcatagtagctagtttatatcattttcctctagaactatggactttagtattcccagctatagttcagtattgcttgaattctttttttcatgtttaactttttttgacacataattattgtacctatttatggggtacatgtgatattttaatacatccatataatgtataatgatcaaatcagggtaatttggatattcatcacctcaaacatttaccatttgtgttgggatacctgaatccctgatggctcaacttccttcatcatcgatttgtttacatgtccattttccccactaatccgtgagctgctgctgctcaaaaatggatttactaacatttatatatttagcatagagcatagaatctgaattgcaaattctgtcaaatcaataaataaataaggaaaactcaaggaagaaactaacaatcccatcacattgtacttggccatcttcctgccaaatcaagagaagtatgtcagtgattttctaatagtcacatatatgcaatctgggcttcgagggtaccctctgtaattcttccaggcctactccattttccatagagtttttttcccagaaggccttcttataaaactacgtttggagagtcgtaagactggagtggaggcgaggcactcacacatcttgggttgttagcccaccctgcaatgaatttaggtgattaaaatctacacattttaacactatgttctcagactagtctcagacggatagaggtcgaaagagaattatgtaagaggtgaaaaagatgtaaaggtaatgaaaaggactagatgaagctaaaaagagaaaagctaatgggaggggtgggagaatgatgatgctttggagaaagacctaaattttaaccctggctcagacacttagaaactctatcaccttgcgcaagttaccagctgtgctcatcttcttatctgtaaaataagcttaagataattcctaactcctagagttttgcagactgaagaaaataatgcatagtttattgctgttaatattggaaaggagaagatcgtgaagaaaacgattgagcgagcgctggacccatgacaattacaattttaggcactttcctttatttcacttaattttcctgcgaccctctgcgctggtcgtgcgtccgttttactaaacaaaaagctgacgcccagacccgacaagcaactctacaaggtctcccggccataagtggcgaagcctggatttgaacccgggtctaccataggattctgtgaagcgagaggccaccttccaattccgttcccgaagtccttgaacctccaggtacccaggggcctctccacctccatggggccccgagggtcacctccccgagtcctgggtccccatcccttacctctggacgcaccacgactcgaggtggcgtagcgcccgcttataaagccgcaacaccttttgctgatgggtcaggtagggtcccgacgccaagaacgccattacggcgctgaccttccccggccgcgcggagagccgggaaactgcacgcctgctgcgggtgactgagcggggccagccggaagggcggagttgccggcggccacttccgcttccgctggggaggtcctccatgcgcagtcatgagtcgcttcaagtttatcggtaagaggagcgttttccacgcccttgggtctttctgacttgtcccgggcgtcggtcaccaaggtcacaggacccaggaattgcgccctccggcattgtaagggttgaaagggccgctcagtggaggagggcgcggggaggtttctgggtgctggtaatgctctggttcttgatctaggttctggattcacgagggtgtatttatttgtaaaaattaacaagccgtacagttatgatttttgtgctgttttcaacatctgtaatgtattcagttttttaagaagaaaactccaaaaaggccaatcactatgtttccattcatcccacgtgcacctcccggcccttcccctctgccttggcggagaggctgaccgcttctggggaccaattcactcaagcattcattcgttcatatcatagttagtgagcgcctcaagtgggcctggcactggcctaggaacacagggcacaaagctcccagttgtactgtcatcaccatctggtggagaaactagaaaacacaagtaatggggagaaaaacaaactgtacttggcaagtacaatgatccagtcggcatcagtagaacgagagggagaatgctgcgggatttaaatgggcatgatcctcgttttgtggggtttccagctacctgaaggtgggaaatgacagtgatcacacctctgctttagcaaggtaatcctgatagctattatgtaggttttgtgggaaatagggagaggtagggaagcatttcaagagcttaaactagggtaatggaaaagagagagaaatggaagagatgtgtgcagcatttagcagctgagtgttcatggccggtagtagagagtgaacaaagatgactcagggtttggaaaagtacttaaatatgaaatggaagcatgactagtttggcggtgaagagaggtacccaggtccatttggattaggttaagtttgagata

SEQ ID NO: 12058 - DNA, 6000 bp, Homo sapiens
ctgacccctgctctaacatctgggatgatacctaagtcaactgtatagaaccttacccagtcctccataatgtctgatctttaaggtgctctaagacaagtattctataactggaatcaggatgtgtctgggaaatccagctcttcttggaccaacactagtgcctggataagttaatgactctaaacatttactaactgtgtaatcttgagcaagttatttcaccactgtgcctcaactgcttcagctataagatgaggatcagggctgaaatgaacagtaaataagttatgtgtgcatgattaaacagtgcccaggaattagttaagtacaatgtaggtatttgttaaatttttttaaaaagtagctcaacttcactgtccttattttggaaggcagaggatggtgagaaagaaatagtaaataatgagcaaactatatattttatcacagctttgcagcaggtattattaaacacatcccacaacagaaagtatagctcaaaagagtaactataactacttcaagatgacactgtaaatgttggaaccaatctcatttcaagtttctaccatgcatgggagaaggggaaaaaatggttcagaggagataagcaagggaaagcacctttccttcttccatatattatcctttacaatcagctcctgcttctaaaatgtgaatacaactacctccaccactacaaacaataatgacacttaacaattactgggaagtgactatgagccagacaaaatacttaatgccttcactgtatcagcttttttaagcctcataactactttattttacagatgaggaaatggagaaggccagatggcacagactaattcaggatcatctatttccaaagcctgggcctcacatgaccactacacctaacttctttgaggtacgcccagatgaatttctctaattatgggcacacaaaaaaaatgagttttaactggaatttttttctttaaaaaaaaaaggatgatttcaaagatagggagggatgtggaaaacacaagaaatatgcctagaaaagggggcagctatggtcagcaggaggggtatgaggtggagaggatacatgaggaggcagaatggagttctagaaggcagaaagtcaagtcagactaaaaccaacatcagccttaactaagctttcttttctttcacatatcttggctgaattcagtaaactgtttttgttgaaaggactacttctgtaagcaggcagttcagaacaataggtataaacaggacataacagaccatatccaggggcttcacagtccaccctgctatggctgagtcaaaattttacagtaagatgcaccatatcagctgatcctgggttcaaaccctagctcagccacttggtaggtgggtgactgaagaagttcctggatggttgagcctctgtttcttctcagtgaaatggtgacaataatacctattgcaagaggccatttttcttttttttcccttcttttttattgaccacacaatgctaaattgagatttgtcccttgtcaagctcagtttcaactacatgattaccttaaattattaccaagcacaaaatacaacctcttagttatatacttaatatgtaagagacaaaatcaaaagaaaagcctaccttattgtcagtcgataaatacataatgagcccttactatttacccatgactacaccaggcattaaatatatattcaagaaataaagaggtggttggttgagacactgccatcagaccatggttcaaagtttgactctaccattaatttagtaccttggtgaccttgggtcataacaacagaaacgacaaaagccaacacgtgtttgttaagccaggctctgctgcatgtattcatctcatgtaatcttctcaataatcctatggaagtaggtatcattactttcctcattttacaaataagaaactgaagcccagagagaataaacaacttgcccaaggtcactagattctaagcagacagcaggatttcacaacaccagccctgtgctcccaactagtagacactagtctataatatgtgcataattaacttctgcagggctggtttaaggatcagaaatatgtggaaagagccgaggacagtagttggcacacggtagatggacaagaaaaggcccaaggatacatgctatattgaaacacaaactaacagaatcaatctatttaggttccttagcccaaccttctttcaaagtcctgggacagtttatttattattacccaagactgggtcaaagttcaagtttatatttcatactataggagggtatgaaaaagaaatttaagactaagactataccaaactactgctaacactaaactttatctctacagaaaaccccttatctgtttccactgcctctaccaaataccattccatagtcattgctgctgttgcttggaatcaagaggtttgcaaaaggcatttaaaagaaaagaaaaaagagaaaggttttaatttcatcacaaagaggcagattggttagtattattcctaattcaaaacaaaatgagaaagtttccagaaactaacaataatttacgttttgaaacaaaataatgcatcagaatcacttaaaatacatcaattcctatggttttgaatgcaattatctctttatttcagtaagttttctttaagtctagctgaagggttaagttcctgggaatctacataaactcttggtagtttagaatcactgaatttggggaacatggtaatctacttttttaagtccttcactttcgaaaagagaaaagtgaagccagacagggtcagtaacttgatccaaagtcacaaagtttgtaaagaccagattcctttcttccaataagatgatctcttcactagcagtgtttctatcctaaatcagttgcatggagatgcacactagctatagaaacctgagtaagcaaaacatatgaatacaaggacagaaaagagtctataatggtgcagatacagaagaaaaatatatgctaactgagcaaaagattatctgttctgttttattcaccaccccgtgatttcgaaatgaagttcctccaaagaaagaaagataaacagtaggattttcttctttacatcacattaaagcacaattacttgaagaagaaaaagcccatttcaaatttagcaaactccaaaatctggagtctgcaactagctcctccactgtttactgaaacacttcctttggtccatgtcgctaaaaacttgaatcaaaaccctggatgtatttatgtaagcaagagagaaagctttcctccctaaatgttgccaaagctgctacaaaagatgacaagtattaaagatgggcatttccattcatgtccctgcatgcctattgttaagagggcttttcatttttaattacattcccatccctaaaagaaacattagttttttatctaacaaactctctttcgaggctccgcgttaggtatgttttatgtgtaggacagacttcccaggctgcgatggaaagtaatcgtaactcctgccgtcaatgtcacttctctgctggtatttatctgatagagcgccctcctagggccgccacaagaccgctcaaaaacagacttggagagggataggccagcgggaccccacttaccgaaaacactgcattctgaagcccaaaaggtatgggtgtcagtctggccagcgccaccactttcaggccgcttcctccctccactacgcgaataaccgcgctcagcttctcgctgctctggatcctggcggccacccaggcggtgaggagccgcttgcagaccacatgggcgatgaaggtgccgatgaggacgcccaccatcatcagacccatgcccagcacgaagccgtacaggtagccagcggccacgttgagcacgatgtagccccagccgcaggggaaagagaccacgatgaagcccacgacgaagagcaggacccccagcagcgagtcaaggctctccacccacagcaggaggtggtgaaggtagcggcggaccagggccagggaagcgaagcacagggcggccaacacgcagaccagcacgaggctccggcaccaacaggtgctgccgaggcagcagcagcgccagtttctcacctcagccacgccgaccaccacgccgccgccgccactcccggggccgcccgccaaggccccgcccggctccggcagctccgaagcctcgggcggaccgtggcgctccagataggcgccgagcagggcgcccgaggccgccgctgctgccgccgccgcgctcgccccgcccccgcggggaaggcggtccgccgggccgtccccgcccgcaccccgcggcagggcccagcgggccggcagctcggcgaggcccgggagggcggcgtgctgcagcagccggggcagcgcctggagcaggatcccgcccgggctccgcatgcctcggcccagcgcgggccctcagccggccagcccctccgccgcggcgcccgttaggcagctgcccttcatggcgcccggttcgcccggcatcgactccctgcgtccgctcagagggtgggagacggcccgtagaagggcgcggagtcagcggaggagcgacggccaggcggggagtgaggaaactcctgccccagcacccacggagcccactccggtggtgcccgccccttgtcggccagagggggcggggccgcgggcgatggggcggagcgggctgtgttctggtccgctcccgtgacgcgctgcccgccaggctgcgggggtcgcggggcgtccgcgtgggccagcggaggcccacagctgcggagggaaaccactgggaggggagaaggagctctagggagagcgaggctgcaacgaggggagagccgggcgacgggcaggggcccaggcgcgctccccgacttcccacaggcgcgcgcatgcctgcgtgtcagggcgcgcgctccccctctcggaccgaggcgaccccagtccgtgagcggcttggatcctcgcccgttccctcctggtcgtttccgcagtaacctcttatcagagcgggcagctgtgagtggcgctcacatccgccgctgccctgtcgaatgggggaaagagttcttgtgttctgaggagggtttggctatggtccttgaccctattcttgtctcagacttgcctcccaggtatcgaggtctccctgtgggtttcatatggcttggtcctttaggagctggaaaaattaggcataaagtccccccacccccttgacagaacgccccttctgactccagaggtcctttatcgagtgccaggcattggtctaggggcatttgaaaaagattcactgaaggacatttttaagagttcgctttctcagagggcagcttctcaaactcattcgctggtttcttttcctctttccgcctgtttaaggttagtgttccccaggtcctcttgccgtcttccttttcagagtttcctgagccatctcatccaggcccaacagctttgatcctgccgtgccccccataagaagtgacccctaagtgaatgtctctgcccacacttcccagcttgtggtccggcctgtggacacatccaggtggaattctgcaggcagctcaaactcagcagagcttggtagatagatgatcaacttgggctctggtgcaaatcacgtttagtaactggtcaaacaatcagtccctgaatctcattgtttctttttaaattgcaaaatggagataatggtacaacttagcttcgtaagagtgttgtgaggattaaacaaaatagtaaagtaaggtgattagcactatgcctgaaatcagtcgtcagtaaatgttaactatgtgatggtatccctcattaaaagtgtgatcccccatagaccgactcttccttctgggtttcatatctcagtggatgaccttccacccagttgcctgccagataacggaccaggacaccttaggtcgttgctgatcagg

SEQ ID NO: 12059 - DNA, 6000 bp, Homo sapiens
ctgaagtaaaaaaagcactctgtgttcaagacgtatagaaactctgcactgacattaagttgctcagaagccacacactgcatgcagatgtgcaagtccccatttcaatttccttaatgccaactcttacagggaatattaaaaagaataacgaaaatgttgaggcacatggaaaaaggatgacaggtacaaacaacataactgactctttcggagcagttttaaaaaacaaaaacaaaaaaaaccctcaaaatttaaaccaaagattccagtgattagaactaaggccttcaaatgtttctgaccacacaccccattggtaacatacttttgggcatgtactcaaacatctgtatatttatgtatttatgaactacattccactgttagaaagtacatgttttcccaaatgatgaggactttcagtgactcagactatgaattagccactaagaatctcctaaatatttatcattaaatttagtgaaattctgccaaatacaggattgactttaaacattaaaataagccgggcatggtggctcacgcctgtaatcctagcactttgggaagccaaggcaggtggatcacatgaggtcaagagttcaggatcagcctggccaacatggtgaaaaccgtctctactaaaaatacaaaaattagcagggcatggtggcaagcccctgtaatcccagctaagcaagaggctgagttaggagaatcgcttgaacctggggggcagaggttgcagtgagctgagatcacgccacttcactccagcctgggtggaagagcaaaactccgtctcaaaaaataataataataaataataaataaataaataaaagtaaaaaacaaacaaaaaccaaaaaatcagaaaagaaaaaaatctgaagccatttgtcttcatgcactagaacttatttctaaatatcttgctaactaggatgactcatcctatcaatggctaatatttcaaagaataacatacacttagggagaggctgattattaatagcaattaataaataggacttcaaatattcttctttaaaactcagcactgtttcaacttctcaggtccaaagagacccactctttttttagtctcatggtttatacatactaggagaagtggcagcttctgccatttcctcattgtttacttgtgcttgcataattaatattgtctcaagctgcagtttctttgaagtaatcctttaagatcacttggcattttggtgagggttaatttggttaaaactagatataaatcttaatgtgccggttgtaagcttccatatcacaatgtcaatgacaaccaatctgtgaagaagacactattaaccttttcacatgtgaaggccgtcccttcttacaggagacctgagaccagctgaatgttcagtgactggaggcacctgtgtctttctagatcggaaaaatcaagttttcacattattttatatttttaagtgtaagatataaacaaaaggtatatttcttcctgacctccaataaatcgtcttggacactgtctgtggtgtgtcatctcactccagaaaccacagtttagagaatgcatagccctctctccaacgtcaaatacgtccaccactagttacattcattcaatacacagacaattcctggcgagcatataacacagcaccttggaagaattctgtgcctctccacgcccttccccaggcttcatagtctcacagtctggtaactactaaacaagctatgagagggaaacttacttgaaaaaacagagattattcttataaccaggaaacaaaagcagaagcgaggtaagggagataaagtaagtggtacagatattccaactggtggatgggaaatcaaattctattctatttgagtagcacttttcccagcttattcttaatgaacattcatgtcatgatcatgccaatccaattagtcactttatatataaaaatgcaagctgttatgtattatgcagctcttttgtcaaataagaataattataaatttttttaatcaactgaagggagagaaaacactgccaacgtcttagaatatgttcatcagctgagcagtgaagatcatggctttgcttctttttatctagtactctccagtttggatttttacgttgtaacataaacatatttatatttaattatttgagatgcattttccccaatcttctgagattctctagcagaatatttttaaagtaaataaaatttaaatccaagaatctaatctagtcaaaactagatagcttaaaaaaaaaatccgtgtgaacaacaatatggaaagaccaactcagttaatttttgacaaccaaattgagtggatttgggagagatttagagcaaaaatatttatgactaggtttaaatatttgtcttccatgagtaacatagcagagatactgcattaaaaaggtcaaccagaagtttgtttttgagaaatattaccaattttgaacatactaaatctttcttagagtaacaacatacgttttagataacaggtagtagctaagtacagaacaggtttagaaaaagttaatagtgatgagaaatgtaaacttcgtgaacatattttcggggtagcattcatgataactcaagaactcgaatttatacgaattctgattttaaatgagtattaaatctctaagaccaaaagaacataaaattatagccaacaaaccacactctggttcgaattttcggagcatgtttactctacactgaataatcggaaagccatttttaatgccactggacaatttcactatttaaaaatttacagtgttccccgaatgtgcaggcagcagagtattttggcaaccaacacagcgagacccatttacctttaccttagactcgtaaaggctgagttacttctaggtatcatttagcaacgcaataaatgtctgcctcgaacagtgaaaatttcccaaaggagcagaacaactttcatgggtggggcaaaaggctgggaaggaagagaattcgttttggcttgctccagcgctggaagaacactgagcaccacactctccgcaaaggcctaacacagcaaaggcgactgtcaaatcgatcccttttgggtctgctgtacccgtcctctagggaatcaaaataaggcaaaataataaaaagagtacagagaagtttggcggcggcggggcgtgggggcttgaggcatctcagagaggagggcaaaaatcaacaagaaaatgcccccattttaaaaatcctgtctgcgacctcggatgggagattttgtttatccacgggcagtttacttctgtctccctgacccatctccacaggctctggtgctcgccgccactttccgagcagatcattactcagcaccggagccggcgcgcctcctcccgcaggcgggagcggggtctcggggagaggcgggaagaggcgcgaccgcccgggcgcccaggtgaccgcggccctccccgcgcccccgtccccgcgccccccgcaccaagcatccgggagacccggagcccccgggccgaaccgcgccggcccccaggcagctgaggcactgaagggcaggctcgggcacgggggtcctgagggtcgggaggaggccgcggggaccctgtgctgtccccgagcgcccccagcccgcgcacgcccacctcccagcccctctacccaacttcaccgctgccccgccagccggttccgcaccgtccgccctcgccccgacccccggcccgccgcgccccctcacgcccccgttacctttccgttcttggggctgccgttcaggaacagggtcacccgcctcatcgcgctgcccccgctgggtcctgagtgagccgccaccctcccacctggtcctcctcccacctttttctcctcccgcccttcccctccctccacccactcggattcgcctcccttcgccaccttcctgcccttggggacacaccacacgcacgcactctgtcccacacccaaggttcggccggtcctccttcccaccccgcccctaggctcctcagcctgcctggggcccttcccccacctctccgagactgacactctgccgtaccaaccaacccgcgtcaccggacagagtccagccaatcagcacccagtatcgggcgggctctggctaacctagccgggacggagggagggaagagacgctgaaggctagtagacgggaaggggcatcagccaatcagagaggctcctggagccggacggcggcttccagcgttactgagcaggcgcaccctctagtttaggtagcgcttatctgcatacgagggcggggtctggggaaaggaggtggagcgctgaaagggacccaagcaccagtcagcccctcctccagcgttagccccgcccacaagccggcccagctaggaaacggctgcggtagggacggactgattgggtaagagccagctcgtcgctctgttaggattggttgaatgagtcttttcgaagtttgcagcatccaatagaaaggtgggaggcggagttaaagcgctaagagaagcgttactccgcgagactctcctgaaaagtagtccccgaggtcacaaggcagtggcaggtgtctgtagtcctcgggttgactgcagctcgcggtggtccctctccgagcccaggaagccactccagtgccgagggagaggcctgggagcgctcggagtgtgcgcggactggagaagggggaggtggcggagtgattcgtagagtaaattcggtaccgaggggcggggtcggggatttgaatcggtcggcgggcggaggaggcgggtggaggaggctgccgggcagagcgcaggccaggatcagcgcaggctgtgagtccaggtcagccgtcgggacctcgggctccgggttcgaagagcggctcccggctgcgggtgctttgccaggagagcccttccggacagaggagccggggtctggaaggagcggccgacgcgacgctcgcctgccacggggctctgggagtaagcctgtctgcctggcgggccttcaggtgcggcgtgagaggtaggattgcatccgcgctgccacggggctgtttctccggggcatttctaggcactttgttcggcttaccctgcagcacagaattagtactcctgtcaggagctgctctgggtgaccaggagtgcatccggacctgttgagagaatttctggaaatggatagagctgcgtcttgagaggggtacccttatgattcaggttttcgctacggttgaaaagccatggcttatcctttggggtctgctttggtgcctgaacagcagttttctccatttctttctgtttaatttggctttaaaagtacgcgcttagagtaaaagaatggttagcacagggtgggaagtgtattggggatggatgggaaggaagtggagatggttaataggtagaaaaacaaagaatgaataagatctagtatttgctagcacaacagggtggcggtccataatttaattgtgcatttaaacataacgaagtataattggattgtttataacaaaaaggataaatatttgagataatggctacctcatttactttgatttgattattacgaattgcatgcctgtatcaaaatatttcatgtaccccataaattatacatctactgtatacccacagaaattaaaataaaaaatgaaacctgtgacgtgtgtttctatgccagtatggactgtattacaattcagtcctgaataaggtacgtgatcgaatcacgttcatcttgctggtggggttatttttcattgtttttcttcacctcttagatggatgccaattcaaaagacaagccccctgaaaccaaggagtctgcaatgaataatgctggtatgtgatgatctgcctccttgtgaagttgaaggtttagacagagagttgtcctcacccctacaatatgtcgtccgtttcaggaaatgcctctttcattttgggaactgggaaga

SEQ ID NO: 12060 - DNA, 6000 bp, Homo sapiens; identical to SEQ ID NO: 1286

SEQ ID NO: 12061 - DNA, 6000 bp, Homo sapiens
tttttgagacagagtcgctctgtcgcccagggcggagtgcaatggcgccatctcggctcactgcaacctccgcctcccgggttcaagcgattctccgcctcagcctcccgagtagctgggattacctgcgtggaccaccacgcccggctaatttttgtatttttagtagagatggggtttcaccatcttggtccggctggtctcaaactcctgatgtcgtgatctgcccgccttggcctcccaaagttctgggattacaggcgtcagccacccaccgcgcccagcccacatgtggcttcttactatgctaaccaatatgcattattcaggtttctctgttctctttcttgtacatacttcatttctcattagcaccagagcaaataaataaagacagagaggatactaggaggcagcaaaaccaggttctgtcactgaataatttgttagctgcaaagagaataattacgaggaaggcttaattttccaatggatttattcatacttcacactaataagcaagctaataaaaagctgaactaacacttcagtaacctgtcacttccctcagtaagtaggcaagaaaaaaaaaacattcaaatgtaagcaactcttgctttgccatttctccaacaaccagccacaacttcaacaagtcagtgaacatatttaccttactaacactgcctttttaacaagtcttgagtaaatgtattttggttaattttacatacaaacatttttcttttgactctgatgttacaagctagaggtaaaacctactttctatgcttccacgtagatatctttcaatgtatataatgtaacttacaacagattcagactggtgtcttgtgcacaccatagttgttcaataaaaattttgaaaattgattaaaaggcaatgttatgaagagctatgttatgaagagttgtaaactattttattagaacccaatcacttcaaaatggccatgtaagcctgggcgaggtagctcgcgcctgtaatcccagcactttgggaggccgaggcgggcagatcacttgaggtcaggagttcgagaccagcctggccaacatggtgaaaccccatctctactaaaaatagaaaaaattagccaggtgtgataatgcacacctgtagtcccagctactcaggaggctaaggcaagagaatcactagaacctgggaagtgaaagttgcagtgagccaagatcgtgacagtgcactccagcctgggcaacaagagcgaagctttgtctcaaaaaaaaaaaaaaaaagaaagtttatttctatggaggggttaaagaaaaagtaaaaaagaaagaggaagagaaaggttttactccctctacaaagcaggatgtggcttaggagcaggtcttcagtgtaaaatgcacattagaaacctgtagtttctaaaagcctatattgattttaacctgaagtcctaaaatgtatgtaaaatctgatagtatttgtgaaggtccctgaaagctgcaaccacctgttacaaataattcatggccacccaaaccatagctctttctccatctagaagaataattctgccaagtttggcttgagcgccccatcattatctcattatacatgtgcatgattccaaagccaccattcaaggaaaacccttaatcactgccctccgctgggctacccaatgtaccgcacatcaccaagtctctgaccaccggagaaactggggtttacttttcataatccttcattattctagtttttttaaatctcaaaagctactaagccttatacatctttgcatttcacctgaaaacttagattttgcatttctcttagtagcacaatcatgtgttcattccttttcctatattaaactgtaagctactcaaaggcaaatgctggtactcataagaatgtcttttttaacgtcaagcgtggtggctcacgcctgcgatcccagcactttgggaggctgaggcaggcggattacctgacatcaggagtttgagaccagcctggccaacacggcgaaaccccgtctctactaaatacacaaaaaaattagctgggcatggtggcaggcgcgtgtagtcccagctacttgggaggctgaggcaggagaatcgtttgaacctgggaggcagaggctgcagtgagccgagatcacgccactgcacgccagcctgggcaggcaacagagcaagactccgtctcagaaaaaaaaaaaaaaagaatgtctttttaaaaactcctcattgccatacacttgcatatatagaactgttaactgattcattcttcctcataaaattgtcaagtgaaaaaattacaaatagttcacatccttctcctttaaaactattttccaattatttttattgtagaaaatgtcaaatatatatactagaaagaatagtgtaatgaatacttctgtactcagcatttggcttcaataatggccaactctgtctcactatctcccatctactaacaacccaaattattgtgaagcaaatataagatttcatatcattaatatttgtatatattccagttcccatttattatttttttcttttttcttttttcttttcttttttttttttttaagaggaggcctctccagatattccccaagctgttcttgaactcctgggcccaaaagatcctcccgactcagcctcccaaggtgctggcaatataggcctgagccactgcgcccggcctctctcatttattttcaatcactcctaaccctgccttccttcccacttctgcaccctcaaaaagaaatgtacagaataatgcaagcaattgccgctgttttagcagttttgctcatagccactgcctctctttggaattatattctatcccattcaccaacatcactgaactgtccaccaaggtattgtgttcggtccctatttcactcagaaatatattgtacattttccctccataattccatccacctgtctgaacaagtgaaaaaaaaattgtgccacaatttctactgtcttgacaaagattacttctgatttgcttccccaccccagataagctaaagagagctaaagggagtggaaggattagaagaggaaagaaacttcaatacggtactcaaagtcatagattttgcctaaactggtgtgtgcaaatattttaaactattttattttcaaaatggatacttgtaaacatcagcggaaattttgtcatgaatcccttttaggcagaagatgtttataaaatgaattatcttaatttaagggagctattgccctcaggattttggtaataacaaccgtagctgcttctgtacctaacaaatggttatgtaaaaacaattaaagcaaaagaaaacaaaacaaaaaacaagggaggatgtgctctgtttctgtaattgctctaaccttgttttattttgatatgagatttcttggcctcatctcagatagcaacaccaccctacactttctcctccacaccctttgcaaatagaattccaaaaggtagttcaggcactttagagttcatcctgggaaatggctcatcttgagggcatttcagtgcagtaactgagatttcgtctgctccttcccgggccgccgcactgcccatcccctgcccagtgatttccccaggaatccggggacggcaggaaaagagctccatccacagccagcccctcgcctttccggggacggccctcagccctgagggctgcccgtttaccgtgcgcatcccccggccaagcatccccgcaaggcgcccctcaccgccaactttccccactggaaactattctccgagcaaccgttaaagatcattgaccccgcgaacgcctcttcctgaggtagatcacgtaagatctctccctaactcccactttcccctccagaccagacgtcgcagtgcccacatcccactcaggattgagctaccccgaaagaacaagtgcgcccggagccgccacgggccagaagtcctcgcctccagagcgaagaccgcactctcgccccagcaccccaaaacccgacccccggcgctcgccccggccgccccgctcccggggaagtgcccgatccgccagcgcctccgcggagccaggacagaactcgcggccggggcgccccgagacccaacgcagcgccgcgcagccggggcctccacgcccccacgcccggtcccggccctccccgggcatccgcggctcgccccgggggattagggctcggcccgacacacacggcccgctccggggcgccggggacagggaggcccgcccgcgccgttcctcaggccgccggggacccgcaccaactcccctcgcctccgaaggacaagccggcccgcacctcctgctcgggccaaggcggacgaggggcattggaaccccgcctcctccccaggccgcgaggaccccgaccagcgcgccctcgcctccgcccagcagcgcggcccgcgccccctccccaggccgcggggaaacgcagcgcgcgccccgcatctgcccgcgggcccagcccctcactcacccagagctcggtgccccagctcatggtgcaggggacgcgaaggggcgctccgcgcggcgggcgcggctctctggtccccctccccggcgatccctttgccccccgagatccccgcgacggcggaaagcccggagtccgcgcggcctcctccggctcgcagctcctcgcccggggtctcctcggcggctcctcctccccgccgctccacagcaaaatggcccgaggaagcagcagccgcggccgccgcagcgcccgcccgccctacacccggagagcgggggaggggcgggaggggaggggcggggccggtctgacagctcgcgcacgcgcgcccgccccaccccggcccggccccctcccccgggctcccccggccgggtccgcgtcgccctggggtccggaaggacgcggagggaggtgtgagggacggcgggacccggatccctaggactccccctgccaatctggtaatgacttcttagtgaccactgtctgctcgcagtactagcgcttgccttggaacgcggcaggccctgggatcaccgatgctccgccgcggtctgagatcgctcccctgcgcgtatcgccgctctggatttaaggacaatactttcccctggcagccatgcgcgccgagcagagtcagcccgggaggctcttttcccaccgcccgagggaagcccgagagtcccgcaggctggcgcggtgggagtggggcggtggtaactgcgcgctgtgcgaatagagacgtcgaggcaagcgcgacggcctcgagtggctagggaaagaatccaggggcgtgcacccagtgatttccaatctctgaaaccagtgatttccaacttgttcagccaagaaactctcaggcgtgaaatcacgttaccgcctagtgggtaaaagcaaaggcgtggggtacacagataacttgtttggttcaaatccagcctcccgcacgtgctggccgggcggaggcggacaattgctccacctctggaagcgcagagcgcagtccaccaaatggaggcaaataacgtgtccatctcactgcccggcggtgaggatcaggggtgggccaaggccgaaggttggtaaacccagcgctcattttatcagcagacggactccctctctatatatccaaaggtctgcacaaatgttcctgacaagctatggaaaatgtttggaattccaactcctgaatcactagccctttccccacagcttatctttctccctcggttaatgctactactggatccttttctgagaaaccgtgcgactcccaacatgggcccccagttaaaaaatattttacgatgatgcatttctccaatcccaccccaccattttcaacctgcttatcattctcctccattaaaaggtggagctaacccgggtctggtggctcacgcctgtaatcccagcacatcaggaggcccaggtgggaggatggctggaggc

SEQ ID NO: 12062 - DNA, 6000 bp, Homo sapiens
ttttcaaagaaatcatataaaacaatatgtatataattatattcttggaaaaaatgtatactctaaaaattacaaaatattgttgaaagaaattaaagaagatccgactggctcattggcgctgtcatggcaggtgtgctgaagaagaccactggcctcatgggattggctgtatgcaagagtccacacaagacaagcaactaaaatcagtctgctaaaatgtaagaggctaagaatattgtacacaaagatccttgatgttcttaagcaaaccccttaaaaagcagcacatagaaagtatacagaacagattgcagatgagaaattggctatggttaaagcagaaccagatgttaaaaaattagaagaccaacttcaaggtgttcaaataaaagaggtgattcttcaggctgaaaatgaactaagtctggcaagaaaaatgatacagtggaaatgataggagatgttcatggaagagcctcctgccaatcaatggaaatggccaatgtaattaataaatgactggtgggttgatgggaaaaataatataattaaatattctgttatattaagagcatgcccatattattgacattttataatcaagaaaagtaatatagaaaatgtttaagagacttaaaattagtgattatggtagtacagtattgtgaatcaatttttgatttgtaaagtattcacacaaattattacaaagatgatatttcttagaacagagaggtcatggaaagacttgaaaattaattttaaaaaatcctacagatcttcaatgcagaggccatactccaaaagtaaagtttctttagtagtatcttcaatacatcattaatttttttatcattctgaagaagaaaaggtccttaattattattgtctaaacaaatttatagatcactgtttaaagtaaatatagtaagagtgaatattttcaaatgtgataaaatagcacaagtggctggtaataaaatttgaaattatagttaacctccttggctgtgatcttacgtatgtaaagtaaaatgtaaatacataattaggccaggtgcagtggctcacacctgtaatcctagcactttgggaggccgaggcagttggatcatttgagatcagaagtttgagaccagcctagccaacatggtgaaaccccatctctaccaaaaatacacaaaaattacctgggtatgatggtgtgtgcttgtgatcccagctactcgggaggctgaggtgggaggatcacttgagcccaaaaggcagaagttgcagtgagcccaggtcacactactgcaccccagcctgggtatcagagcgaaaccccatctcaaagaaaaaaaattaaaattaaaataggctaaagagcctatttttttctccaaagaagatatacaaatacccaatgagcacttgaaaatatgttcaatgtcattagccattagagaaatgcaaatcaaaatcacaattagataccacttcactcttactatgatggttatatataaatataaattttttttttgagacagggtctcactctgtcacccaggctggagtagggtggtatgaacatggctcacagcagccctcaaccttctgggctcaagctattctcctgcctcaatctcccaagtagcggagactacaggcacatgccaccatgcccggctaatttttgtattttttgtagagacgaggtttcaccatgttgcccgggctggtctcgaactcctggtctcaagtgatctgcccacctcggcctcccaaagtgctgggattacaggcgtgagccaccacacccaaccaagatggctataatttaaaaagcagataataacaattgttggtgaggatgtggagaaattgaaaccctcacatattggggaaatgtaaaatgggaaagtaaaatgatactttccattttggaaactggcagttccccaaaaatatacacatagagtttctatatgacctagaaactccactcctaagaaaatatccaagaaaaatgaaaatatacatccacacaaaaacttgtatgcaaatgttcatagcagcactattcgtaacagtcaaaaagtggaatcaacccaaatgtctatcaactgatgaatgggcacataaaatgtggtatatccatacaactgaatattaattagcaataaaaagaaagtaagtcctgatacatgctacaatatagatgaaccttgaaaacattaagctaagtaagagaaaccagtcacaaagggaaacatattttataatttcatttatgtaaaatgtccagaataggcagctcaaaagagacaaaaagtagattaatggtttcctaagactggaggaggttgaggggaaaaggggagtgatggctaaagggtatgggcttcctttggaagtgataaacatgttctaaaatcaactgtggtgatactcaaaactattgcattgtacactttaaattcacccgttgtacactttaaactcacccatttaaagtgtacaatgcaatagttttgtatttgaattgtacattttaaatgggtgaatttaaatgggcggctgcatggtgtttgaattatagctcaataaagatgctatttttaaaaagaactaaccattgattcacacaacatggatgactctcaaaataatcacgctgagtgaaagaagccagattttaaaaagagtacattctgcataattccctttatgtaaaatgctagaaaatgaaagtaatctacagttacagagagcaaatcagtggctgcctggttggggaagaaaggaatggattaccaaggggcatgagaaaaattgtgggtatattagataagttcattatcttgattgtggtcatggtttcatgactgtatacattaaaactaatcaaattatatgatttaaatatagttgtacatcaaccatccttcaataaagctgcaacaaaaaagcatactaaaaagtcacaagacctatttccatgtatagatatacatatgcaaatggccagaaaagtatctggatagatatacacaaaactaataacaatagttacttttggaaaagtgggagagtgggaagggtgggtgaggctgggtatggaagagtgagggaagggtgaggctgggtatgggagagtgggaagggtgggtgaggctgggtatgggagagtggggggagggtgagtctgggtatgggagagtgggaagggtgggtgaggctgggtatggaagagtcaggggagggggaggctgggtatgggagggtgggggaggacaaggatgggtatgggagagtgggaggggtgggtgaggctgggtacggaagagtggggggacggtgaggctgggtatggaagacttgggggtcctctctgcctaggaagggtttgcactcagcagcctgggagcacacctgtcatcagtgctccctcacatctggcaccacctgacatgtagcaggtcctcagttacttctaggttctgggatgagtaagtgagggtggaataaaagacggaaatggtctcctgcaaggaaggcactgagaggaactgtgctccacccaggcccaggatttggcatcgtgtcccatgggattaatgacaccgtgccagataccctggaacactaaggagaggtgactcatgctcttttgctggtgagaggattgtggcagcacctggggcactgatatccatctagaatggtaaaagaacaagcattgtttgaaacctaatagaagcatacacctgctctgagcatggtataggggtcacactgttgggagggctggattctagcttcacctcaccagagacctgttgtgtgacctcagcatccccatctatacaatgggagatccaacaagttggcctctggtcatgttccatgctaataccctaggagttcatgaagtcaaagcagccctcgctctggcccacagaacataggggtttggagctgggccaaaagctccatcagattttagctgggaaacccacaggaaggcagattgtgaaggtccaatccacacagggtagctaatgaaacaggccctgggcaggggacaggggaacatgcccagcgataggcttcaaggtcagcagccctccaacacacagcacggtgtatgctttgttcatggatactagagtaggcctgaagagacaggtcagaccactgcaggccgaggacattccagacagaaggaatagcaaatgcgatggctcagaggcttccttaaagccaggagaatctccacctgctcagagaccacctagcccactagttcctcaaagtgtggtacctacatcagcagcagaagcatcgcccagacgcaccgagtcagaaactgggtttggggcccaacaatctgttttaacaaactttccaggtgattctggtgcatgttaaagtttgagaactgttgatctagcctactgtttcccagactatgctcatagaacacttatctgcagtaggttaatgggttttctgtaaaaggggatccatgatcaaataagtttggggtacagatgttctacattgctttgcaggagtcatagatcacattagcgtagtaaacgctctgagaagtcctgcagtaaagagctttattttttattaatccaatgttgtctcaaattgatttttcagattgcttactaatgttctcattaacattctctcagggaatgctgatctaaatcaatgctcatttttcacatggataaactgaggcctagagaggataaagggattgcccgacgtcacagacagtgagtgtggcagtgctggaaaagatcctgacagtccacctcgtcccagaaagggctctgtgagcttccccgcaccctgtaccctctctccttccatcccagctgtggaccatctcttcagaactctgcagcatggagccgctcaacagaacagaggtgtccgagttctttctgaaaggattttctggctacccagccctggagcatctgctcttccctctgtgctcagccatgtacctggtgaccctcctggggaacacagccatcatggcggtgagcgtgctagatatccacctgcacacgcccgtgtacttcttcctgggcaacctctctaccctggacatctgctacacgcccacctttgtgcctctgatgctggtccacctcctgtcatcccggaagaccatctcctttgctgtctgtgccatccagatgtgtctgagcctgtccacgggctccacggagtgcctgctactggccatcacggcctatgaccgctacctggccatctgccagccactcaggtaccacgtgctcatgagccaccggctctgcgtgctgctgatgggagctgcctgggtcctctgcctcctcaagtcggtgactgagatggtcatctccatgaggctgcccttctgtggccaccacgtggtcagtcacttcacctgcaagatcctggcagtgctgaagctggcatgcggcaacacgtcggtcagcgaagacttcctgctggcgggctccatcctgctgctgcctgtacccctggcattcatctgcctgtcctacttgctcatcctggccaccatcctgagggtgccctcggccgccaggtgctgcaaagccttctccacctgcttggcacacctggctgtagtgctgcttttctacggcaccatcatcttcatgtacttgaagcccaagagtaaggaagcccacatctctgatgaggtcttcacagtcctctatgccatggtcacgaccatgctgaaccccaccatctacagcctgaggaacaaggaggtgaaggaggccgccaggaaggtgtggggcaggagtcgggcctccaggtgagggagggcggggctctgtacagacgcaggtctcaggttagtagctgaggccatcgtatgccaatgccagtgaagacatggcagggctggggctacaggtctggtatcttcatcccagcaaggcagcaccaagtcccgctgat

SEQ ID NO: 12063 - DNA, 6000 bp, Homo sapiens
aatatcaattcctgcctactcacagtcatgtgtgtttgaaggcagacttcattgtctatcatcccagcgttttcggtaacagttatataataaacaatttctggtcttcagacagagaatattgtagagcaacatgttgacatgttgattgccttaaaaaaaatagatgttgagtgcaagcaaccactagcatcagtattacacatccatctaaatatccatcagttgggaacaatagatactggggactccaatagtggggagtgggggcaggggaaaggggtgaaaaactacctattagttactgtgttcactaatggggtgacaggttcaattaaaggccaaacctcagcatcacaaaatatacccatgtaactaacgtgcacatgtacccactgaatctaaaatttttttaaaaacaatcaatcaatcaatcattatccatcattgctccatcaactctcacctaccaaactagagccaatgggtgggatggggagtagaagtgacggggaagaaggattgaaaacattttagagaacacattgaactcaaactgaaaaaaaaagaacatattggattcagaaaaatgaattagaaaatttggaatcatttacactaacacattcaggagatggacaagcagactcccactgatgactgagctgcttaagagttgatacacgtacaattaaaactaaagtttttctcactgaactctgggtatttggcttaaaaataaaataaaactaaagatgtggtggcttatgcctgtaatcccagtacttcaggaggctgaggcagggggactctatgaggccaggagttcaagaccagcccgggtaatatagtgagaccctgcgtttacaaaatataagaataaaaaaatagctggacatggtggcatgggcttgtagtcctagctatttgggaggctgaggtgggagaactgcttgagcctaggagttcaaggctgcagtgagccataatcacgccattgcactccagcttgagtgacagacactctggctcttaaaaaaaaaaaagttaaaaaacattttattaaataataatacatacagcaaccttgatattggctctttatattttattcttaagaaaaaatattggccacaccctaggaatgtgtcacaactgcagtttgaaaaatgctgacatagagcagcaaaggtacattagtattagtgctttgtgaacttcctcaaggtcctatttttactctatgttacttgttaagttcagagacaatacacttgtgaaagtgaactgcatctttccagccctctatttgcacatttccttggcattctgaattagaaacagggcagtcattctctctaagggggccagtggcaggtgagggcagctcatatatacaagttcttcctaagttatacattcatttgttttgtacttgcttattggttttcactgtcttccaccacaagaaccttcttttcttgcatctcagactaattcttcttggtttcagtatttaaggttagtcaactgaaacttgctaatttaggaataccaggataagtaagaaaaactctttacctgtgagtaactcatagattagaagaaacagacgggtgtaatagagtgagatgttgacagtgttccagcagtagggaaagatggatgtaactgacaagggctggagttgcttcctcagaagagatgtaattgaaaaagaaattacctaattttgcctagggtaagagatggtattcctggaagatggaacagcatgcaccgaggcatggaggcaggaggtagggagaacagaaaattccatttgtctagagttccaggagagtgatggaagatgaggctgctgtgcatatctgtaggcctggggagcgccctcaggtgactctgtgctctcactgttctctggaaggaagcaggaaggggtaggttcagatttcagggtctcagttttacttctttctactagactatagctctaccgaaagtctggaattgtcttattacctgaatcctcactgcctggtacaggggctggtatggacctagtggacattcagagggatatcagacaattagctcacccctgtagccccacacttggtggatatctgaaactcaggtccagtctgcgctctcgtcttcaagatgaataaaataaaattgcagcttttttgaaataacttaggaaaataaatattctcttttattgagaactcttctcaaaactaccccttcctggaaagatgtttccaatgaattaatatcttaaaattattatcattttaccttccagattctacagataaggaaaacagagatgaataaaacatagaagtataaaaatgattgacttgtgatatcccagttttctgtttcttaccagtggctgatgctcaataacaactttaggtttttgattatttttaaataaatttattttggataagtgtgaatgtcatcaaagaaataatgcatgttagagttgggtgatccttttgagcttattctggcttatccctctcatcttatagttaaggaaagtggagcctaaataattttatgcaagctgccccaaattttttctttctttttttttttttttgagacggagtttggctcttgttgcccaggctggagtgcaatggtgtgatcttggctcaccacaacctctgccttccggattcaagcaattctcctgcctcagcctcccgagtagctgggattacaggcatgtgccaccacacccaactaattttgtatttttagtagagatggggtttctccatgttggtcaggctggctggtctcgaactcccaacctcaggtgatctgcccgcctcggcctcccaaagtgctgggattacagacgtgagccactgcacccagcccaaattttctaatgaacaatgaaaatcaaccaaacagccatgactcacagcaagctacctttttgatgtgtgtcccttcagtctcttaaaaatgtgtatgcgtattcttatactaaaatcttatcatactctttatatttttggatcttgcctttttcattcaatatattttgaggattttctccaaatttattcacatgtttactactcgcatatccacatatttaatggctccaaaacatctcattgtatggataaaccatgatttaagtgatctcttccctgttgttaggtatttaggttgtgagtttttgttgttgtattggcaataaaacctttgcatcagtcatgaggcttctttctagttatttcttaagggagaaattactggtttggccgaaggggacggacatgtttaaggcttcagatatatactgccaagctgactagcccaggaaagttgtacagatttgccctaatcaatatgtttcataactgtttttgaaatcttgccaactttaaacctaataggtcagtatcagtaattcccgttaacgtaagagttcaaatttgccctagttttaatcatttaaaaattttttataatttttaaatgataacaattatgatgcaaccatgactttgagaagccaagagatcttattctcaaattgtaaatgaatccgtaagagctaagagagaagaaacaggctattaaatggccaaagatcaaatctgaaatgtccaggagttttcctgtaggggtcactgttactgtcaatttatgcctgcaagaaaactaaaatagtcacacattaaagcatgtatgcacatttttaatgtctgattcctctacatttcttaaactgtaaaataataagaacatgcagccagatagcatcgcgataccaacttctttatataatgacacgtaccattccactcaatgtgctcctcagtttgaatttataaaatatatgctactcaaatgaaaggcacttatgcctgctcttagtagaggaagcgctagctaattgcctaacgccccattagcatatggcctatactgacttgagaaggaaagaacgttcattgctgtggccaataggatcccctctccccaccttcccttttctgcatcaaaatctacacagacaaaagtcagatgttgtaatatgcattttatcgtgtcacttaagtactaagaggtgcttttaaagtttttattaatgctgctcaaacttgaccccgacggtccaggatacaggccaaggtgtcagtgcggacacaatcgcaaggcggctgttaggcttcagggctgggcaggaaacttgccaggtgctactaggaacgtatcagccctttctacaaagcaggtgtctttcccatcataaaatgcaaagcaatcagccgttccctttctccccagccccctcgtccggagaccgagaggatatttaccctgggctcttgcagttctcttataactgaacccagcggcggctccttctccgagctcagagccagcaggctcaggcccagccacactttacaggcaaattgccgagctgaccaagggctttggccaagcccgagctgggccggggcgtccgggaagcggaaggagccagtctaggaaatccgggtgtgcgtggtggtgaagctggtgggcaagcttccacttcaggtccggggctttgtgtcccgcaacagacgcttggcgccgctcctcttccagcctgctgccgccttctccgagcgagtgagttggcgaaactcactcacctgtcggaacccggtgcctggcggccagacgcgcagattacagcaaaccttggccgggacgccccagccagggaggcaagtgtgggagctgctcctagaggtgccagctcccacccccagctccgcgccccctgctcgtcccctttcacttccaggcgccttcggcttggggtgcccagaagggcaagtccagcagacgccagggctgcaggttcaagatgctccgcctcctcctgccacttagagccacaaacgctagcgggaacctttccactcagtcttagtctgcggtcactgctgaggttttcagaactttccaggcaaaggccagccaggtcctttgcctccaacccactccgcgcctacctcccgcctggggacacccctaggcccaggagatcctactctcccccgagcaccgacgttccaactcgtctgcgcccccgactgctgtccggctcctgtgccaaggggcgcgcgcatcttcccggggccagcaacgctcccaacttctcgactcgccctcctcctccccagagcgagagtggggcgggctgagcccggatccggggtgcactcgagcgttcccagcgctcggcattcaccccgcctcagagccgactttcgaagggggattgagcctcggaggtccaggcgtcttactccaaagctcaagtcggcccccgtcttttctttccacacccctgtgcccgtcgcatgctggccgggtgagcggccgggccgaggattcgggtgcccggggccgcgtcgccccgtcgggtactgagctgagcgcaccatggccggctgctgctgcctgtccgcggaggagaaggagtcgcagcgcatcagcgcggagatcgagcgacagcttcgtcgggacaagaaggacgcgcgccgtgagcttaagctgctgctgctgggtgagtggctgcgtctccgactccagtgagccgggcgtttttcttccgagccctcccggcctctccactggcacccgcgcggccctggagcccagcggggtgcagggcggcttcgtccttctccccctcggagctcacggatgccagcaacttggggccttaggtgcctgttctttccatctctggctgggcgacttgcaaaagcaacaccttcccctgccccaaaacaggatagggacctgtaacacttaacctcttgaccgctgtaccttatgtgttccggtgtgcccctctcctcaaaaccccgtccactcctccgcccgcagcacacccagcttggggtctgtggtgacccacatcttgggttcagcgctagctctgacccg

SEQ ID NO: 12064 - DNA, 6000 bp, Homo sapiens
tccaggccagacactctcctccctgataacccaaaagaggacccagattctctttaactcagtggagttccctggttagctcatttcacttctttctggtgtggaccctcagcagtgttctttgtctctttaaggctgtcctattcagttctataaaggcatcttcaaggagaggcaagtagagcggagacaaatgcaggaatttggggtcaggcaggactgggtttgacaggactggtcagacagtactgggtttggacccccttgctgcctctgccaagtatcattaggcacaccatttcatcaagctgtaccttaatctcttaatttgcaaaactgggatcctaacaccaatttttcaggcagatgtgaagattaagatgatgcataccaaggtgtctggcacagagtaggtaggtgtttaataaatggtagctattgttattactcaagctgtgtcaccagaccacatatgatacctgaaacctaattttatggtttaaaaaacatgccttgtgaaaagggatatgcaacttagattcattcagttagtcttttttagagccatcattcataacttaccatttttaaaaaagcaaggaaatgaaaataaataatgcacttcaagaaaaaaaataggctgccaactacttggttgaaagaaacatttccatataaacatgaatgagaaataacatgggagatgtttgcaaagatggcatgtgtgtgcctatgtgtgtgtatgtaaaccatacacacacacacacactctctctctcacacacacacacacaattgcagctccacccttccagtctcaatcctatatattagtttggtacaaaagtaattgcagtttttaccattactttcaatggcaaaaactgcaattacttttgcaccaaccttatatcaactatatatatatagtttgttttgttttaaagaagaaagtgagagaagaccttgctgctgttaggagttagagtagaggcaggcatggataacaatcaaatggggaaaagggtgttaaaaactggacccagttcctggaaggaggcagctctggagggcagatctgagcagccctgggtggcacagggtgtcagcccaataaggaaggagagcagacagcagagaaaggcctggttagcttcccagcatcaggatcctgttcaaagggatggagtgtcatgttgacagggagccagctggaccatggagccccaaaatccccagaaaggaagcgggcaccatctctcaacctctgagctggggtttagagactggcttctgtgtgtaggcagagggtttgtgagaaaagattgctaaggaaacaggattatgcaaacaagataataatttaagccatacagacctgggctaacacggatgtttcattacttcctggaggtgcaacctgagcacgttgctttctaagtctctattacatctcttaaaaggtagatgagttcaagggaatcaagtgttttccacattctgggacttggccaatgcattttattccaattaataagaagcacaatgattagccaattctcatcctctcttctgcttataccctggcctggccaccaaatgtgcttattgtagtagagactcctaacaggtattcctgctcacgctcttttcccctgctaacggttcttcactctacagccagagtgatcctcttaaaatacatcagatcatgtcactgctccacccagtagcctcccacggttgctgtttcatgtgccctcccagtgctgaggccccatacagtcctacctgcctttgaccttggatctgattgctttccctttgcccactctgctctaccacattggcttccacattgttccttgaacatgccaggcacactcctgtctcggagcctctgcccttgctgttcctctgcatggaacactattcgcctgtctctcttacttaccttctttatgtctttgctgaggagtcaccttagtgtgtctttccctgacctccctatttcaaattgcagccccactctgccagtctcaatcctctttcctgcttttttgttcaccatagcacttttcataaatgggcatactaacatatcttcttcttcctatttattgtttctctttctccactagaatgtcaattctacaagggcagggattttgttctggttttttccttcctatatcatcagctcctaggacagtgcctagcaggtagcatgcccttcaaaacactggtcaaaggaatgaatgattattataaagcaagacgctggaccccagctctggaggaacatgcattctaggctggtgactgaggcaggaactcagactcaggaagcacatcagggatgcagttacccaaactgtaataccaggccagagtaagatcttggaaccagagggatgcccaggcattaggagtgggctgtgagatcagagattggcctggagccatgctgatggagagtgagattggtgccccctgggtcagggcagatcccaggtcatgcgtcttggggccaggtcaccccaccataaaagaagacagaggggctgtagggcaggatgccaggtagggccttcaaccccttagtaaatgtcaggcaaagttacccagctttcaacttattcccagatgtaggtgtcagtggacactctatattggcacagcttgcaaggaggacacaaatgactaaaggaaagaattagaaaaaagaaaaaaaccaagtgaaaatgttcattcagaaacctgagctaagggtttgaggaatggcaggtgccagaagactatgactggaggatatttgtgatgtcaagtgagacagcagttgagcgagtatctggggattacactgtcctttggaccatttctttccctccctcccttccttcctcccttcctggaggagatgctcaggtgagttctgttcatgcaaaccctccagcttggggaaaaggaaatgccaagtggagccgggagaggtggagtctatagaagcctggaaagagaagttagggcagagagaatttggcctggtttccctggcgctgtccaaggtactctctagtagttctgctcagcctccactcacatctttgtgcttcctaacaactcagcctggattcagagctgcccttgcctcactccagtagagctggtgtgtggccatcatcatcatcatccggtccaaatccctcaccatatgccggagggaatcgatgtccagagcaactgagtcagggcagtgctcctcctggagaggaaacttgcagtcccacatccctggctcccactgcactgtgcacggagttcctgctggctctgggttccggtccttcagtagctctgtgtgcttccactagctacagaacctctctgagcaccagtgtattcgcctgtaaagtaagggtgagtaacacagtatgcttacagggcagttgtggggattacatcataaggcacacagtaagtactcagcgaaggtcaaacttccattcttgttacaaggtcgtcgatatcttccacagtccctggttcaggctcaagtatgttttgtgatttgatgtcctactgtgttcctcgcattaatcagcccctgggactttatagattaatgatcacgtttcctattcttgaagtatgcagaggcacaaggaacccaaggtcttaggtcagctcactcgggtacatctggctcgggactgctttggctaagattggccagtgcgacctggcagagagagggccaagtccaggggcgcgcggccccgccctggcctgaggatagtgctcccaccccgggagacttctagggcggggcccatcaagaatggggacgcggggaggtcaaatgcctggagggggcggtagcgcacgtaaggttgggaccccagctttgcttggggttggcaaagggcggtcgctccgtctggtggggaggaaaggggtgtcctcagccaaggccctaaaggccgggcagcctggcaccaacgggcgttcgagcacccgtgggcgtcttcagcgacccccgggactcggtcaggggctcgtgggcgccagaaaagaacgggagagcgtaggctgcagatgcctctgggacgccttcgtggaacattctcctgcccagaccttcccggccagacctccgagaagcggttccaaaccaccgtgcaggtgctacaggcagcgctcggcggagcggcggcggccactgcgtgtgccagcgcgcggtcccggttcccagatcgctgtccccgggcgctctggtgcctggaggtcagcggtcggcgggcagcggcagctggcgcagcggagggccgggggcgcgtgtgtgcgtgtgctgggaaggtggccctccccgcggccgccgcagcgccagcgcctccccctcccccggcgcgcacggctcgtccccgtccctggaggcggcccgagccgcccctgagcagcctcgccttcgcctcccgcgtttcctgccgtccgccctcccccggccgagctccaggggctgccgcctagcagctcccggcgggagagcggttcagagcgcgcacgggggcgggcggaggcggcccggtgcggggcggccgcgctggagagaggcgcgcgcggagacgccggcccccctctccgcgtttgctcgcttgctccccgcctcccgcactccgctcgctcccaccccttcccggcgtgattgatccgtcacgggcgccgccgctgccgccgccgccgccgcggccgttctgagccgagccggaaccctagcccgagacggagccggggcccgggccggcgccattgcgcgggcgccgcgggaagaccttggcgcggggcggcgggccgggccaggccatgcgggccgagtgagccggcgcccgcagcccgcggcgcggcatggcttccccgcggagctccgggcagcccgggccgccgccgccgccgccaccgccgcccgcgcgcctgctactgctactgctgctgccgctgctgctgcctctggcgcccggggcctggggctgggcgcggggcgccccccggccgccgcccagcagcccgccgctctccatcatgggcctcatgccgctcaccaaggaggtggccaagggcagcatcgggcgcggtgtgctccccgccgtggaactggccatcgagcagatccgcaacgagtcactcctgcgcccctacttcctcgacctgcggctctatgacacggaggtgagtgtccggctgcccctgccgtcggggcttcggggggcattggggtgggtggtttggacacaggcaacctccggcctttggtcagatccccgattgaccggcccgcgcctgccgagggcagagagggctggtgcccagtgttcacccccgcggtcctgctgggcttggctggcacagctggtaacatttgccaagcaccccctcctctggtcttatgtgtgtatgtgtgtgtggggaggggtgggggtgggatagaagactggggtctcttttgaccagagaaaaaggagtggagaaggtgggggctggacccccaaaggcctacattgattgtccctgtccaggtcccgctcatggggctgcgaggtaccgagtgggaggaacaggcgcattgactgcaaactgggccacccagggccggaggggccgcgggcctgctcacaggcccccagggaagccgagccgcgctttgaggtccggaaggctccggaacccaaggggcttgagcgtgcagcgtggctgggcgcctggtgcgcgccagcagctctgagcccgctccgcgcgggcaagtgtggggccaccggctctgcagcgcttctgcctggacgtgcccggcgctgcctgtggccagagcgatttcaggagacccctgcctcgggttagttgctcagaaagtgccctggcagttctcgtcccggacgtgcagtggtgtccggccgcgccgctgctgttggccgggcggctgcaggcagtttctcacggctcaggctt

SEQ ID NO: 12065 - DNA, 6000 bp, Homo sapiens
ttcattgtcaattttaccagaaatttatctatcttgctattgttctatagaactaggtttttgttttgttgaccctttctatgatttctttgtatccagatccatttttagctttatagttgtatatataacacacatatatttttttccttttccttgtctttcttcactctgttttagatctaagccttttttattttggatgagggagactacagagaaaggatctgctagccttgacctacttctgatgttacccagagtattcatgcagatgtatgtgataagaaaaaggtgaacacagagttactctgtttggggctttcattgcagcctagtccttgcaggaggctgctgcatgcaaacccaaattctctccattcttggaatctccttatgccacctgcactctgaagagtgttattattattactttttactaaattgggctgccccacccacctttgccgctggacttttaaaatagaaaggtttcctaaggagaatgcttttttttcccccctagccaaggggaaaaacactggagaggcacaaataccccatttcaaggaggaagaaaactatgcctggaggcatcatctgcaaaactttccggaaaaggctgagttctctcagggtattgtttcaccaaaatactgtctttgaatcagtctctaccttaatagactggagggaaagtttccaacagatcgttttgctgatagttttgattactctcgaacagaaaatttcaaaagctttttgccagagggaagcgaacagagggaggaagagagaactcttccatgagtgtgccatgactggggaaccttttgaacaaataatagtgccaaaggcagtgacagccaatttttccacccgaaatgcttctcaaattatagtccttggatcactagcttatatcaatagtctgacaaagtctatggtgtccttccagatattaatgtaaaacctgaacttgaaatatccatcacaatgtttcattttgctgaactttttctgagacacagtcttgttctgttgcccaggctggagtgcagtggtgcaatcttggctcactgcaacctctctctcccaagttcaagagattcttatgcctcagcctcccaacagctgggactacaggcatgcaccaccatgccggctaatttttatatttttagtagagacagggttttagtagagacagacatgttggccaggctggtctcaaactcttggcctcaagcgatctgcccaccttggcctcccaaggtgctgggattacaggtgtgagccaccatgcctggcttcattttgctgaacatacatatatatttaaaaattttaaaactttttaagagacagggcctggctgttgcccaggctggagtgcagtggcacaatggcagctcactgcagcttcgaactcctgggctcaagcgctcctctcgcctcagcctcccaaaatgctgggattacaagcatgagccactgtggctaagaatattttttgtcatgtttgacagcgccagctgtctttgggtctttacctctgctgaagtcatttgaagaaacaaatctaaagaaatactgcttggcagaggggaggagagaaaggttaggacagaaagcatcaggatgactctccaagaaagggaatgtctgaatgacaagaggactacagacaggagaaaacattcaagaaaatttatcaaggtattctttgttcctgttgaaacctcatcatcaatgttagtgtcttcagaagcccacccaaatatattattttactttgataaaagacaacttggaaccatataaaagactgcactggtaccattattccattttacagatgagaaaagtagctcatttggaacataatgagctaggttttatggattaatctagatgctgaactgaattctgtattgtatttcattttctctgtccttttctactggatgtacatacctacatttaattttagagttatcgatctaaagctggctgcagaagctgtctcatttagacaggtccacgcttgtcaggaagacaggtctgtccaggcagacctttcagtttgttctatatttcatttcaggccacagcagaccaaataaagaggaaatgaagtgttttatagcaaataacttactgttgaatacacatgtcttgtacggacaggcctcccaatttgatgttagaaggggccacagagtagttaagatagtcaaaacagaagcaactgtattccttaagaaggtaagagacaaaatcaacatattaaaaatattcaagttgagtggtaggtaagaaactccttttactttacctttgatttatggggaaaggctaaacatggaaataattaattttaaaatgtctttatattagatatagaagtattggtgttaagaaatctgatagtaagtacagtgtataggaagaaagagacgggaaaattagctaataagtgattttttgacttgagtagagctatggttaaaaatatatggaaacctctttcgagtatatttttttcttaccaatatatactttttatgatactgagattttatagtgaacatttgcctattcatcccaatataatatttcttatagtttggtatcaacccctatgattatttgtgagataagggagtggtttgtattcatgggtatacatatctatacacatttctgcatgccgtacacaaacataagtagcattgtgcatgaacatattagcactgtgcatgtactaaaatttcaattttttcacatagtaggttataaaataaatcatatattcgtaggaaaggtatagaaagcaaagttatttaaagtggatttttaaaaaagatttgaatgattttttttaaaaaaaagattagaaccattgtttttaaaaggaaacagctttagatagtaaattatttacagccaggactcagccctgagcatcctgtgaaaaccacacgagcttggtcaaggttctaagcagtcaccggtgggagatggtcatggtcccgtcacagcataactcacttgaggcttgaaaagtttccgtccagctacggtttgcagtgacctttctcttctgcaaagcccacggttacctggtggccaccaccaacatagccccgcctcgctgtcctgcgtttctctcaatcagatcagtcctgccgagtccccatgccttactgctggtgtgctgtgtcctctgtgccatttcaaggcgagggctcatgaaacttttactcacacgctgctatttttgatatgcggtggccttagctgtggagcgagaggccgataattgtgatcactccggaaatcctgggaagccagaagtgggagatgggtgttgtgaggtggcgtggctagggagaccccatcgagtgggtgtgttataagacctgggcgaatccctgtggctgccactctcctgagaatgttccctaggccttagtcccgcgccgctcccacccacacctccaggtgtgcagtccccgcccttaattactctcactaaaattgatagtttacacttgcaaagctacactgggaaagcggaagagaaatttataatcgtggatatggagaactaggggagcagacacacttgctttcgtttacagatccagtgaagtgaaaaatcagaactagaaacgtatgcaccttcctagcagcaaagccgcttctgcgttcttcgcagcctccagtgcagggcggcgctgggagaaactttgcgccttctggaaagtttagaaagtgagccacgaaagagaggccacatttccggggttttgcgggccccgcgatgttttccagagcttttcgagtgggaagaggagagcgacaacgtgaaaatgccccgtgccggggcgtccaccggagtcctgccagctgtccggcgctggggtaagcgcaggaggggcgggggtgggacccgagctggcggccacgggtctcccgctgcgggtgtgtcgactcgggggcggggcgggggaggctgctgagataatgaatgggaggctaaggccaccccccagccccggccctgccaccaccgtgggctgtcgagccaatgaatggaggagggggcgcagaggtcaggggcgctgggggcgccacaccaggtaaggggtccagcttgggagcggggagggcggactctgggggttcgggtgttgctgacttgtgctacgtggaacaagcagaaaagaaggaaggcggaggaagagaggaggctggcgtcggcgctgctcctctggccctccctctgcgccccctcctcctgccagcgcgccaaagccgggcagtaggggccgactggcggctgacgctccctgagtggcgactccgtctccagccccgctgcggagcgcgggccggatctggggcggccagggcccggagccgcggagccctccccgccgcccggccgagcacgggaccccggcggggtgggcgcagggggcggccccgctctgggcgactgccgaggggcgggcggagggccgggctcggctggcggtggggcgggggccgccgggactgggcgcgcggcctgaagccagcccgggggcggcaggagagggacgcgcggcggcagcgagcgcaggtaagggggccggcgcggcgtgtggggacggcgccccctgggcgcgaagccagaggccgcggcgactgctcggcccgccacacggcgcgctgggctcacactgtcccgccgcggacgggctttgtggttgggggcgcgcgtgcgagtgccagtgagagtgtgggtgcgcgctgtgggccgcggcgcgggtgggtggccgtgcgttcttgcgagccggcctgcaggaggcgaggctcccctggcctcccgcacccagcggcggaccgagcccctggagggaagttgccgcagccgcccgggccgccggccctcctgtcccgcgccaggtcagtgcgccccggggcccgcccagtgacacgtaggtggcctccggttacctgggtcggggtgggtgcgcgggagggcttgcgaggggccctcgaaattctcccaaaacctcgtcccgctggacttgcacctccgaggggtccctgcgcccctggggctccgcacctctcgcttcccactgacgactcggttgtcccccaccaccgggctgaggacttttaactaagtttctgtccagccgcctaacaaacgtgcttaacaagtaacaggaggttgtaaggcaagggagggacctggctttgaaagttgatggttttgaaatcgacggctcctttgacttgcgtaggactcctttgtggtgaatggatttaaagtttattcttgtttttctttgctgccatttggtctttgcaatgttaagagtgaaggcattcaggacttgctgctgcctgctgtctggggcctgaggttgtggctctccgcttctgctctcctctcttcatttttgttgaaatccgtggattttttcataaatgtgggtgctggcttgtttcactatggacgcgtcgtttcctatggggttagatagatattggtaaacataaatattgaaaatgtgatgatcacatattgatgatcacagcgaaatcctctattccttcaggctctaacagtttgtttttcacgtatttgcataagtgtgtttgctcagctaagcataattggtaagccagaggtctgtgattcagagtctgcagttctggttaaggggagactgtacacttggaaaatgcgaagttttttaagaagttattcccttgccggatagaagagtgggtcccaaggaaaaagggtgtattttagaggtatggttatttgaaccaaactaaacatcattaaaatacacagggaggtagaatgtcacctagttctttctgcccttgatttccatatcccagtaggagcgagtataattgccccaaatgcaaaattatgaataataatcagcattgtaagtatattaaggttgcatttttttc

SEQ ID NO: 12066 - DNA, 6000 bp, Homo sapiens
tatgggccactctagcccattatccccaaaatataatcctaccatttaattagctctattttatattttatattattcaatatagttgttgtttcttcttttcctaagaaggaaacaatttgcctattcatgtggtaggaccaagttcttctgagggtcttctttctggacgtttgccatcagtgatccagagtaaatgaactgtcataaggacacagaaaatatggagaaggcattacttgcaaaaagtatgtggcaataagtgcattttctctccacacacaacttttaaaaaaatatttttaccaatgatttgagggtaagttggagacattttgcccttttaacactaaatgcttcagtgtgtatttcctaagaataagagcattatcttacataaccatagtacagtgatcaagatcaggaaatatgatattgatagaatgctaatatctaatccccagcccattttcaaatgttgtcaattgtcctaataatgtcctttacagaccatttttcctaatctaagattcatgctggggcatgtatcatatttagttgtcctgtctctttcaggtatggaacattttcttggtttttctttttgtttcctgattgtgacactttttttttttaattaggagttttttattttatgatttcttcttttttatttcagtaggtcttgggggaactggtagtgtttggctacatgggtaagttctttagtggtgattcctgagattttggtacacccaccagtgtacattatccccaatacgttgtcttttgttccccagcctcgcatcctttcccctgagtccccagagtccattgtgtcattcttatgcctttgcatcctcatagcttagctcccacttatgagtgagagagcgagaacatagcatgtttgattttccattcctgagttacttcacttagaataatgatctccaattccatctaggttgctgcaaatgcctttattttgtttctttttgtggctgagtagtattccatggtgtgtgtgtgtatgtatatctatctatctcacattttctttatctgctcattgattgttgggcatttgggctgattccatatttttgcaattgcgaattgtgctgctataaacatgtgtgcaagtatcttttttgtatgatgacttcttttcctctgggtagatactcaggagtgggattgctggattaaatggtagatctacttttagttctttaaggagtcttcacactgttttccatagtggttgtactagtttaccttcctaccagcagtgtaaaagtgttcccctttcatcccatccatgccgacatctattattttttgattaaggcccttcttgcaggagtaaggtggtactgcactgtgggtttgatttgcatttccctgataattagtgatgttgaacattttttcatatgttttgtggccatttgtatatccttttttgagaattgtctgtacttttggaaagcataggctgattatgttgcataatatccctaaatttaggtttgtctggtttacactcatggttagattctggtgatttaattttgatgggaatacctcagaagtgatagtgtgttctcagtacctcatattagaaggcacatggagtctatttgtcccaatattggtgattttaacatgattatccttcaggcctccccaccataaagttattattttatctttaaacttactaagtaatttgtggtgagatattttgacaccatgtaaatatactgttcatccaacttttaccttcaaaaacgacactgcctacattaacctaatacaacattttacctgtggtaatctattgcctacaaaacccttaactgtgattgattattttctaacatcattcctctaaatttatattttttggcatcctactgtgaagaagagctttctattcctatttatttatataataacgtacatttttatattattctatgaattatgatcaattattatcatttttattttgatgctccaaataatctgtcctaaatttagcaatgggagcttcatcaagtgggcgtctatgaccctttgctatattcctaccattctttgcatatttcttactttctggtatggtaagatactctaagttaatcttgttctttcttatcctagctctggtattagtcattttcccaaggagccatgtttccttctagttaagaatggtgtttagaaactaatatctggggccgggggtggtggcttacgcctgtaatcccagcactttgggaggctgaggtgagtggattgcttgagctcaggagttcgagaccagtctggccaacatggtgaaaccctgtctctaccaaaaatacaaaaattagcccagcgtggtggcacatgcctgtagtcccagctactcaggaggctgaggcaggagaatcccttgaacctgggaggtggtggttgcagtgagctgagatcgtgctactgcactccagcctgggcgacagagccagactctgtcttaaaaacaaaacaaaacaaagcaaagatctaggatgtgcccattactaccgaggtctcattgccttacaatcctctcaatatgtgtatattaaataacatttctgatcacttgttggggcagtcagtgatttctctgtggctttaaaaagtaaatgttctttccctaatttctgaaaaccagggagtaatttcacaaatgcacaaaatgtattttagtattgtagggacatcttttctctgtattctgttaagtattctacgctgaaatcattcattaaaaagtcttgacatagctaaagattgacaagaagaaagtgaatagaaaactttgttttctgagtttttccaaagtattttggaggaactgtgtggttcactctctatttaactttttaaaagtttgatataattggatctttgggacaatatccctgaaggatctgaaatttcaaacctctatatatcttagctcctgaactttaaattgttcagggacaacagatattcccccaaaacaataaatgatttaaatttacctaatatttcagttgctatcctttggtatttttagttatggtggtaagagttaataatttcaaaagaaatgaatcgcactattgatttgtacataatatttaacattttaaaatatgaattaatttattatttcttggacgtagttaactttatgaagtgcatcataaaacaacgttttatttgaagttgctgatacggaattcagatgggaggaccaattcttcttggctactattaaatacttttgaatatcaaatctcaggtaactgggctgattttttcacttaaaaacttgtgcttgttagtcttaagagtagcacaaaaattaagcttctttgaagtaatgttttataataatctaataaattttttattattagagaaatctattaaatataaaatttggcagagaaattcataagatgaaagcaatttttaagaacatgtatatatgaaaataggaaagactcagtggagaaagaaaacggttgaaggtttattaaaaggcaatatgagtgcagaagcaaggtaagttttttgtaataattttttgttaataatgtgaaatgtaaggaaaaaatatacaactttaagtttctgactgtcctgctagaaactagttttgccctgcagcgacccctctgtgggaatctcattgatcacaagtgaaattctggaagtgctaaagttagtttgctcaagttcactgctcatggatatgatcatgatggtgggtcaacattcttctcttgccaattccaatgtacttatttataactatgtgctctgtaatcttatttttaaagagatcttatggtaatcttccaagggagtttagtttctgcatttcctggatatatgggttttcgtatattgcctggctataatttttagagctctttacaaactcacaaagatatggggctcaacaatgaatgaaattgtacggtggatgtattagtattaaacgtattagtattaaattgtgtgacataaactggctcttaaatataatcacaaattagtatctacaatgcttcaagcattgttgtcctttttgaaaccagtgtacagcccccccaaactgttagctggaaagggcagagttcatttagacccagagcttccgactatgaagttggtttaaatttttttttcttttttttgagacagagtctcactgtcacccaggttggagtgcagtggtgcaatctcggcttactgcaacctctgcctccctgtctcagcttcagcctcctgagtagctgggaccacagatgtgcgccaccacatctggctaatttttgtatttttcgtagagataggatttcaccatcatgttgcccaggctggtcaaactcctgagctcaagcaatccacccgcctcagcctcccaaagtgctgggattacaggcatgagccactgtgcccggcctaaaatttatttgtttctttcaaggttcctcctcttcttttagtgaagatcaatattgctttttattgtacatttgagctttcttttcctcacttatctggattacttttctgatttgagctcaataacttcttcaatgtacattcatatttttcctcattcggtcactttcaaatctttattaaagacctactgtgtgccaaggataggtttaggagctcagtttcaagtattaaatatgtatattcttttttcaaatttgctgttttctaaattttgttgtggaagaatcaacttatgtacatcaacctgctcccccccttacatcaataaacacactatcctgtgatttcttgtagtaaaattgcatttataatagtgaaaataagtttgagagtattttcctaactaaatgaatatcacactttattcatttctttatgtcctcagattaaatgaagggaatagtactggaagaaatatagatgaaagaaagaaaatgcaaggagaaaacttcaccatttggagcatttttttcttggagggattttcccagtacccagggttagaagtggttctcttcgtcttcagccttgtaatgtatctgacaacgctcttgggcaacagcactcttattttgatcactatcctagattcacgccttaaaacccccatgtacttattccttggaaatctctctttcatggatatttgttacacatctgcctctgttcctactttgctggtgaacttgctgtcatcccagaaaaccattatcttttctgggtgtgctgtacagatgtatctgtcccttgccatgggctccacagagtgtgtgctcctggccgtgatggcatatgaccgttatgtggccatttgtaacccgctgagatactccatcatcatgaacaggtgcgtctgtgcacggatggctacggtctcctgggtgacgggttgcctgaccgctctgctggaaaccagttttgccctgcagatacccctctgtgggaatctcatcgatcacttcacgtgtgaaattctggcggtgctaaagttagcttgcacaagttcactgctcatgaacaccatcatgctggtggtcagcattctcctcttgccaattccaatgctcttagtttgcatctcttacatcttcatcctttccactattctgagaatcacctcagcagagggaagaaacaaggctttttctacctgtggtgcccatttgactgtggtgattttgtattatggggctgccctctctatgtacctaaagccttcttcatcaaatgcacaaaaaatagacaaaatcatctcgttgctttacggagtgcttacccctatgttgaaccccataatttacagtttaagaaacaaggaagtcaaagatgctatgaagaaattgctgggcaaaataacattgcatcaaacacacgaacatctctgattgggtccctatggttttaccagagatgtgcccctggcagagctcatca

SEQ ID NO: 12067 - DNA, 6000 bp, Homo sapiens
atatgaaatgtacaaagaacaattcccggtggctcatgcttgtaatcccagaactttgggaagccgaggcaggtagatcacccgaggtcaggagttcaagactagcctgatcaacatggtgaaaccccgtctctattaaaaaatacaaaaattagccaggcacagtggtgggcgcctgtaatcccagctactcaggaggctgaggcaggagaattgcttgaacccaggaggcggaggttgcagtgagctgagattacaccattgcactccagcctgggcaacagagcaagcctccgtcttaaaaaaaaaaaaaaggaacaattcctgaagcttctgatgatttctggctgaccatgaggttggaagtgggaacacattaagggcttaatgatgggacacagtgatgtaaccactgtggagccacaattgaagtgctgagattcagcattggaagacatctctgtcaccaaatgaacacgcctccctaaagagctctggcagtgagtcaaaggcttcatttgggtcaagacagagttattatacaaaaagccaagtttcattctacaaatccacatcggggtcaatattttaaagtgatttcccccaagttctgtgtagagcaagctgacagagaagaaatggctctgagatatctggcaaggtgcagatggactgaccacaagccgcttatccccactgtagctccgggctcccttctgccacagtggccatatctgtgaggttctgccctttccctggggccactgcatcagtcagggctctccagagaaacggaatccacaggaggtatacctatagcatacacaaaggctttattataaggaattggcccatgcaattatggaagctgacacatccaatgtctataggtccaaggtcccagttccagtcctaagaggattctcctagttagagacttctctctaactagggagagtgttggctttttgtcttcaataacagtctactcaggccctcaactaattgggtgaggctcacccacactaggaagggccatctgctctcctcagtctactgactcacttgtcaatctcatccagaaaccccctcacagacacattcagaataatgtttgaccacatatctgggcaccccatgccccagtcaagttcacacatacaattaaccatcataactatctgttagaccccaccttgcagggggcagtcctcctctggaaaccttcaggacttgaagtgtcaagctcatgtgtgcaaactgtgaccaacacacattttcctgagaagaggcctcagacaaacaaaaaaatatcatgcatgcacatttactcagataatgactgtctgttgcagcctttacgctaaacagagctaagagtagagatagtgcagattaactcagacccagaaacttggggaggcaccctgggatcctggaagcagatgctgggagggcagaggggaccgagaaaggaggtgcatttactcagctcttctgagacaattctgctctcctgcggtgcactcgttctgctggagaaagggctcactttgagtttgaatcttaaaactgcatgtcctttaaccacactgtacctgctcaccaggctgtggacactaaattgttgggaaagtgaatatatttcatttttttaattaaaaaagcatgtaaggttatattacataattgtgatatataatacatttattcaaatcatatttaagtttggggccacatgattttcaaaagtatacagatataactcatagtatctttcaattttattcccataagcctagatttgatttaaagtctaagcgcaaaggtagagaaattttttagttgtttagtacctgccattttatttttctccaactttttattatggaaaaagttcaaagatacaaagaaggagaacagattgtacaaccccttccctaaatccaccacgtagaaccaataatcaccaaccttttgtcatatcagcttatgtgcacgtactgtgctgaacaatttaaaataagttttagacatgaagacattttaccctttaatacttcagcagcacctcctaaaattaaagccattctcctaaacaaacattatgccattatcacacctaaaaacattaacaataattctatactatcagtcaatatcccctccaatttgtaatttcctccaaaatgtttttgtgtgcgtgtgtgtgtgctgatttgtccagctgggagtcaatccggatttgtacttattgttatacttcttcttttcagctgttcttataccagaagaatccttcacccctttttcttgacattgattttttttggaagagctcaggactgcagaatgcccacactctggtagtccagtttttcccatggtgtcatttaactcatggctcaaactcttccatttcctgtaaacttgcagtaaagtctagaggctttgcaattgattcaattgaagcatctttggcaagcacacagcaacaatgatgttgtgtgtttcttttgcatcacataatgccaggttgagccagtattagtgacactgagtttgatcttcctgtaaggtacagccagatgtctccataaaaaaatggaaaatggaaaacctttttcttttttttttccaattagcacccgttcgcctgcacactttcacctaagggtttgacacccactagtgcacactgcctgatttaattatttcattaagggttacagaatggggatttcctcattctcgcatttctacgtttatgagctggcattcttctgttaaactgctttcacttgtgaaacaggatgcagaggaggagacttattcaacagaattgtagggagggctgtttctctcaaaaggagtggtgagagaagatggtctctaccggggcatggagggctccttgtcagagtctagtgtctgagctttaaggcccaggaagagggcagcagatgggggtggggcagtgggtgagtgagaggcccgtgtgtggggagacccactgaggacagggatctttaggcaaacggagcctcactgaaagaggaatttcagtgatgccatgggtcagatcctgggtctctcttagggaaacctgccataaagcatgagagccacattactcctcagggcttctgggctccgattccgcagactagttttggaggcatcaccacgcctcaaggttgctctgttatatcagggtaactgactttctctaggaacggagacttgggtgccccttaaaacaaccctcagccagtatcctagcagtaaatttttcatcacgggaagcaactaattgaacagaggtgtgatgaacctactgaccactttggtaatatagacacagtggccacagtatgctgtattgttatcctggttgtgaccaatgccaaaggagcatgtttccttcttttcttgacttgatgctgtaggagtccaacaaagggaagcacattcaggcccacatgaaacttgggacagaagtggcttctcagagccgtgcaccaggcactttgaacaagttggaaggctacagtgccggaagactccacagtagcacaggcgaagtggcttaggcgaaaacgctgggaagtaccccagctcccgggggccagagcctctagggctggcagcctcagcaggcagagtcacttgcctccttcagctcaattgctgagggcttgcgtttctctgcagggaacaggagtgccgccgacttccactcttggtgcccttcaccgctcaaactgcaccccaaataagcgtatgcaccctgctccaagagaaggatgcgctgggctgatcctctggaggcaagagggcaaaagacagaaagtaacgagcggcctttgcacaaactcaactctctgcagcggcccctgcggcccaatcctgccggcccaggaatgcacggtcggataacaggcctctccttgctttttcgtcttcttcctcccgcttctctcctctctccttttcctcctcctcctttttctttaattttctcctttctccccaagcttctacagttgtttctgtgttcgctcaatcatggcctttggcattgattgaaaatttggcagttccttctctcggaattctgtttgaagccttcatatggatttattattattattattatttttgccacacaaaaggggcaaatccgcgtgaggaagggggtcgcatgggggtcggctgagatctgctggctgccggtctaggaggggcgctgctctgtgccggagtgggctctggtgcaccagcagaggctgggggagagtgctgcccccgcctggagcccaagtctctgcgtgcctgggggtagagcgcggagagggaccaggcaggcgccggaggggacccgcgcggaaaaggaagaagcccaaacaaaaacgctgtccggcgccaggcgcccacctgcaagcccaagccggtgctcggccagttacaaaagaaatggtcaggatctggacaacgataatgatagtattaatcctcctattaagaatcggcccaaacaaaccctcgctgtcagggcgacaggcgcccgcccaagcccagacctcggacctggttccaagcctgttcccgctgggtctctgggcgcccggtttctgcacctggagctcgcccgatgaggacaaggtctggaggccggcctgggaacaggggccgaagggcgagccggaccctaggggattggtagggtcggggagaaggggtccaggctaggggcgggcggggcgcacggagaccaggcggcttgagcgggaggtggggagctggaggagtgccgggttcgcgggcgggggacggggagaggggggcggggagaggggcgggagtcgggggcggcgaggggaggggcggagcgcgggtcccgccccggcgggccgctggaaaagtttagtctctgactcgctcgggcagaggccgaggaagccggttccggggacgggcaacagggactcagggaccagaaggcggctgcaggacgcgaccgagcaggaccccaggcccgggaacgacgtcgcgagcgctgagactgccgggcctcccagcccatctggcattcgagcgcaggaccgggcgccccggcaccgccgcgcgccacccgctaggatgccggtggccccagcgccctcagccgacggaggtgagaggcgggcccgggcggggcgcggaaccagggtggggggctgggggccgaaggacccacctttccaacaaaatccccaccgatcccgggcgcgacggggacttgggcgcgccacggcggccggagcgctccacatcagcacccctcccccagagccgctgcaggaacagggaggaggccttttccaccgcacccggagcgtttacaacgggctggagctgaatacctggatgaaagtggagaggctgttcgtggagaagttccatcagtcgttttccttggacaattaacaagttaggcttccacagtgccagggcctggggatgctggacgtgggagagggttgtggtcgttagcctgggaaaatcattcttttaaacaatattcgccggaaaattagttttttcctaacatttctcaaacaaggcaattagggccgtcagaatcggtgctggaagacgaagtccccacagtgcaataatgaggttcccacggaaaatcagtacgttgtgttcgtaactgagataacagctagagaaggggctttgggctttttgagtctcccaatagtcagtctctctctctctctctctctctctcttcctctgactttctggctttggacactcccaatggtatatttctttgtggtgtttttatatttggatataagagaggaacttcttgttggatttttaagggaacacacttcgttttgacccttccaataaggaaaggggagctacaggaacagagagctctttagaaggttacttttaaatggaggcccccccattcatggtacccactcccacttggac

SEQ ID NO: 12068 - DNA, 6000 bp, Homo sapiens
attatttataaaatgtgatgttaacatttaaatattggcaaaggccaaatctagaacctaataactaaattaaatttacttcataaaattatttcagtagaaacctacataattagttgtaaactttagcctcttaattcttttttaattgatatatgatagttgtacatatttcagctttttttttggagacagcatctcttgcccaggccgagtgcagtggcttgatcatggctcactgcagccttgacctcctgggctcacatgatcctcccacctcagcctcctgagtagctgggactacagggactcatgccactatggctggctaattttttgatttatttttatttttattttagtcgggggtcttactatgttgctcaagctgatcttgaactcctgagctcaagggatcctccttttaaagtgctgggattataggcatgagctacagggtctggccttagcttcgtaattattaaaggatttaggatatcctcaacaattgtgtatggaatggatcatgtggtctcagatcagtgtcacagattcctccttcctggtttcattcgggggtggagaaacttctgtcatctgacagtctctcctttataacctcacgaagcacgacatagtggaatgactctggctttataaccggatagaacaaggttgactgggcaggttactttaacctgtgagccttgttttctttcatgtaaagatactatttcagacagttcttagacgataacaagggtaaaatgcctggcatatattaagtgatcaggaaatgtgagttattttgccttcagagggaataacaaagagtctcatttgttaaaaaaaaaaaaagcatggtaacaggagtgtgttttgtgatgattacaaacccattgtttattcttttaatacatattttaatcccttgtgcaaggcacggtgctagagtgaaggagtgatgctccttagggttggaattgtgtattttaaaaagcagctgcctgccctgttgccaccagtgtgcaaggtggagcagccgagatgacgactcaggaaagaaagaaaaactttcagagatgacagaatgatcagcaagttgctagtctaaggcctacatttagtgaagggacattttcaatgtagcaaacagatatgcttagaatggttgctcaaaaagacatctaatagccctaagttctgccgtctcccaaagtctcaaaagtacctgtgaaaatctctccagaaaagccattctgaatctacaaacctgctggtgattctttcagctcctgattcattatttctgggttctaaaaataatgtaataggcaaaaagaagtaaaataatttttatagtacatgatactgtgtcacattagatatagttattaatgtgttttcctactcttaatcattttggaaactatagatggtatatattattgtcattttgatataacattggcagaaatatcttcccattatgtcattatttttatggagaagattgactcacaaacccctttcctggaagaataatccactgttagtagacaggtgataaaatacaagtcagaggagtgaagaactgtagctcctaacagggaaacaaatgaaacatttgtcattacaagggtaatgacatttctagaaagtttcttggaaatgagataagtttgtgcttaaccagggaaaaaaatgtgtgacaaaatttgaaagatattctactggttacccatgcattttagctgtagtgagaaggaaagaagggtactctgtctccatccctcaccttccagagctctggaaatcacagcacatgtgggaaaggcctctggtcctctaggtaaaccttgagttctttgtttgagacggagtcttgttctgtcgcccaggcaggagtgcagtggcgcagtctcactgcaacccccacctcccgggttcaagcgatacttgtgcctcagcctcccaggaatctgggactacaggcatatgccagcacgcccggctaatttttgtattttaaattagccaggcgtggtagaaaccccgaagagacggggtttcaccatgttggccagacttgtcttgaactcctgacctcaagtgatctgcccgccttggcctcccaaagtgctgggattacaggtgtgagccaccgcgtctggcctgaattctcttgaaagctaaaatgaaattcttttccctgctcccactttctgtgatactgggcaagtcacttcactttccttagtggatctgtttcctcatctctgaaattgtagatgcgccgcactatctgatggttcccttcaactttgaagttccatgatgcaaaaataatggatgagaagtcttgtggggaaagtgtggagcatcacacagatggtcagccttcctcaagtacaagtggcgcccggcctgcttatccatggatcacagaccattcctcttgaacggtgcaaagtaacactgaggtgggcggggcagtgggtgtgtagggcatgaaggaggcagacacagcacacccctagacttttcctgctacctcgtggctgatacagtatgacatggctgacgtgtgtcccttcattgagggcaactccaaagccttcatttctaatgattttgaggtaatctcattatttcagctgccattgctgtggagacatcttcacattaacatcttggctactaaacattttcagcagcctaaaggcatgtagcaatgccatggaagtcacttcgttactcctaaaccaaaccccacattattttttactcatctcaagccaagtcttgtttcctaatttctgttttggcattagttctggcccactctctgctacagaaccctttgtcctcttttctttgcatttcataaccaccatgaagtaccactgattttgtcttctaaatttgttccccctcattcctactctaacagtcctacccagggcctcattccagctactcccccaccatcagccatttatcttctcaacttcagttcattttgcacattcatctcagattaatattcccaaaatgccttaccctgtggctatcccactgtttaccataaacttttgtgtgtatgtgaggttttctatgacttctggccctagcaactttgtatctgctattagtcactagagcttcctctatttttaaatttattcactctacatgtgtgcatcgcctccagctgtcctccatactggactgttcttccttctgagccatctgcaagacacgtatctccaaagtccagctctcacgatctatgatgagcctttcctaatccagtatgtatatctttgcactgagttctttgccatatcttttaaatatgaaatcattctattttgtcctattcatcagtctcagaattgattgttgaatgttcccaacatgtactttcatctctttactaagatatatattaatttctttgtggtgaggaaattggccactagagagggctttcaaatgtgcaagtctccctttggcccaggcacagctaatctgagcacgtcaatgccacacatccttgccttcaaagagtaattgggccaggggtgggcccatgacttaataccagccagtgaggttcattatggggatttttgctggaacgattagaaagaaaagaggtactatttttcctgggtttgctagatggggacagtgaaagtgtggtgccttccttcataccactagagaagtccatctaccaccaaggaaaatgaggctaatctcaggaaaagcagaatcaaaacaaggaggatgagagccccaaaattattatttgggtaattgaattcactagtttaaagtccctggacttttcagttacacaagccaatatattaccttttgcaatattcagtttaagtgagttctgacaaatacaatggtgtacaagaataatgacgtattaatgatacatggaaaaaagcaacacaaaaattttaaatatagtaacgatcccagttttgtaaaacacttattaaaaaatgcagtaggcctataatgccagcactttgggaggctgaggtgggaggatcacctgagcccaggagttcaacaccagcctggccaacatcgtgaaaccccgtctctactaaaaatacaaaaattagccgggcgtggtggtgtgtgtctgtagtcccagctactcaggaggctgaggcaggaggatcacctgagcccacgaggtggaggctacaaggagctgtgatcacgccactgcactccaccccgggtgacagagcaagaccctgtctcaaaaaaaaaaaaaaaaaaaaaaaaagcagcagaatagaaacaatgatgacagttaaatggtgagatgagagtgagaaacgctgaatttaattttattctgtatgtttcacaaagatgtcagggtctgggattttatccaatttaccatactccaccaaatcaactggtaggatctccgtgaaacagtaacagggtcatttagaaacctgttgctgcctcatgaaaatcctatgaactctccttggttccccggtgatactgtctggcaaggccccttatctctccaactcatgtcacaccttggctccagttctcatttctcaggggtgcgtgtttgctgccgcccactccatcctcgcgtcccacgccctcgcgattcctgctcatcctaggggcgccagcttcgctggaggacgccgcgctctgcgggtccccgcctcggttccaggcccagctgcaggtgccacccaggtttcaggcgctgaggagcggagagcactgccagctcgctggggtccccgctgtctctggcaagcggctccgcgccgggtgggctggggcggcggggcgggcgcagctgcttccccgccccggggcggcacccgcgctcggggctggcggctcctccccgcccggccgggcccagcagcccctaggagcccagcgccgccgccatgtcctccggggctagcgcgagcgccctgcagcgcttggtagagcagctcaagttggaggctggcgtggagaggatcaaggtgcgggccccgggtacccacgctccggtccttccgcccgcggggcgtgagaagaggaggccggcggcccggaccgggcgccagcgggggactcggtggcggcggcgaggcctcggcggggcgcgggggcggtggggtccgcggtgagggagggcgcggggcaagccgggggcccgggcctgacgggaggaagccgcgcctggggggccccgcggtcgtggtcggtcccggtccctgggggtgcgcccactccagaaggcggccgtggtcagttcctcggagggcgcaagggatgccggcgacgcgcgggccgggagggtggacccagggctggggaggccaccgcagggcggcgaattggtgatggattggtaggatgagagcgagagggaggagagccaggatgctcgggtttctgtcgtcgtgacagggtggacggcgctgccacccgccgaggtagagaggagggggaacaggtttggggaaatgatgagttcggctgcggacctggggactccggggagtcatccgggaggtatttgtcctcatggcctgaagctcagcgcccagggctgaaagaggtcattcaagtgcattggggcgaaaaagcctcttctatgaagagcagagctcagagcctgggacccggggaccagccacaccgatggccggtggccgagagaagaggaaataagagacagcaaggtttccgagcaaggcctagagaagaggaaataagagacagcaaggtttccgagcaaggaagtagggatttccaaaaactgggggctcagtcaacatgtccagcgtttagtcagttggctaaaaggcgtctgttgtagagctgtgtttagctacgagtgcagcattatttgcagaagatctgtaagaaggaacacaaccaggatagtccctgtgcctcagtttctcctttgctgtgtgcctggca

SEQ ID NO: 12069 - DNA, 6000 bp, Homo sapiens
ttcaaacttctccatatgagtgagaacatgcaatatttgtctttctgtgcctggattatttcacttaacacaatatcctccaggctcattcatgttgctgcaaatgacagaatttcattcttttttatggctaaatgatgttccaaattttctttatccatttgtctgttgatggacacttagattgattccatattttggctactgtgagtggtgctgcaataaacatgggaggatagacatctttttgtcatcctgatttcttttattttggatagatacctagcaataagattgctagatcatatgacatttcagtttttagttttttgaggaatttacatatgtttctacaacaaggtttattactagacattctatagaattgcaataattccgataagatgctcttgaaaggacacttgcccagtaatggcatattcaccaatgaaccagtgatgactctagctttgatcctctgaaaccagtgaactctgtttctaagcagcttagatgaatctttccctttttaaccaataaaagcttccctttatgcttccctctttggatgcaccagttcatgcaccgctggttgtaatcctcatttctcatttctgaatgaactcaatgtagttggacatttctttaatgtcagagagatgtcagtactctttaaaaaaatttcaataagtttttgggggaattggtggtgttttgttacatgaatattttctttaatggtgatttctgagattttgatgcatctattacctgaacagtgtacattgtagtcaatgtgtggtctttgctcccttccacccctcccaccctttcccttgagtctccaaagtctattgaattagattggtgcaaaaataattgcgggttttgccattaaaagacgcttttaatggcaaataatggtaaaacccatacttatttttgcaccaacctaatattattcttatgcctttgcatcctcataacttagctcccacttatgagtgacaacatacgatgtttggttttccattcccaagttacttcagttagaataatgatctccaattccatccaagttgctgcaaatgccattatttcattcctttttatggctgagcagtattccatggtatgtatatgtgtgtgtgtgtgtgtatatatatatacacacacacacacatatatacatattatatgggtatttaagtcctcgatgtatatatgtgttcacgtccttgattcatcttgagttgatttttgtataaggtgagagatgaggatctagcttcatttttctacatgtggcttgccaatgatcccagcatgatttgttgaatagggtgtcctttcctcactttatgtttttgtttcctttgtgaaagattggttgactgtaaatatttggctttatttctgggttctctattgtttccttggtctatatgcctgtttttataccagtaccatactgttttggtgactatggccttatagtatagtttgaagtcaggtaatgtaatgcctccagatttgttctttttgcttagctttgctttggctatgtgtgctctttttttggttccatatgaattttaggattgttttatttagttctgtaaagaatgatggtgttattttaatggaaattgcattgaatttgtagattgctttgggcggtatggtcattttcacaatattgattctcatgaacatgggatgtgtttccatttatttgtgccatctatgatttctttcagcagggttttgtagttttcattgtagaggtctttcacgtccttgcttaggtatattcctaagtattttattaatttgtttattttgcagctattgtaaaagaggttgagttcttgatttgattctcagctggtccctcttggtgtataacagggctactgatttatgtacattaattttccatcctgaaactttgctaaatttatttaccagttctaggagcttttttgatgggtctttagggttttctaggtatacaatcatatcatcagcaaacagtgatagtttgacttcctctttactgatttggatgccctttatttctttctcttgtctgattgctctggctaggacttccagtactatgttgaatagaagtggtgaaagtgggcatccttgttttgttccagttctcaggtggaatgctttcagctttgccccattccgtgtaatgttggttgtgggtttgtcttagatgacttttattaccttaaggtatgtcccttgtgttttgattttgctgaggttttaatcataaagggatactagatttttgtcaaatgctttttgtacatctattgagataatcatgttattatcctatcttttgtatttttttttgtttcaatttcatttagttctgctctgatcttggttatttcttttcttctgctgggtttgggtttggattgttattgtttctccagttacatgaggtgtgaccttagattgcctatttgtgctcttttagactttctgatgtaggcatttaatgctataaacgctccttttgtcactgctttgctgtttccctgagggtttgatagattttgtcatattatcatttagttcaaagaatttttaaatttccaccttgatttcattgttgacccaatgatcattcaggagtgggttatttaattaccatgtatttgcatggttttgaggatttcttttggagttgatttccaattttattccactgtggtttgagagagtacttgttataatttcagttttcttaaatctactgagacttgttttgtggtctatcatatggtctttcttggagaatgttccatatgctgatgaatagaatatatattctgcagttattgggtagaatgttctgtaaatatgtgttaagtccatttgttctagggtatagtttaagtccattgtttttttgctaactttctgtcttgatgacctgtctagtgctgccagtagagtgttaaattcccccactattactgtgttgccatctatctaattccttaggtctagtagtaattgttttatacatttgggagctctagtgttaggtgcatatatatgtggaattgtcatatttcctgttggattagtccttttatcattatataatgtccttctttgcctttttaactgttgttgctttaaagtttgttttatttgacataaaaataactactcttgcttgcttttggtgtccatttgcatggaatagctttttccatcccttgaccttaagtgtatgtgagtccttatgtgacggatgagtctcttgaagacagaagatacttggctggtgaattcctatccgttctgccattctgtatcttttaagtggaacatttagactatttacattcaacattagtattgagatgtgagatgctattctattcatcattctatttgttgcatgaaatccttgtttttgtttttcattgttttgttgtttaataggtcctgtgagatttatgctttaaggagattctattctggtgtatttttataatttgttttaagatttgagctacttttagtagttcttgtagtgttggcttggtagtggtgaattctcttagcatttgtttgtttgaaaaagactgtatttttccttcatttatgaatcttagtttcactggatacaaaattcttggctgataattgttttgtttatggaggctaaaaataggaccccaaactcttctagcttgtagggtttcttctgagaaatctgctctgtttgtctgataggttttcctttatagattacatgatgcttttgcctcgcagctcttaagattctttccttcatcttgaccttagataacttcatgactatgtaccaaggcaatgatctttttgcaatgcatttcccagtgttctttgagcttcttgtatttagatgtctagatctctagcaaagctggggaatttttcctcaattattctctcaaatatattttccaaacttttagatttctcttctgtcttgggaacaccaattattcttagctttggctatttaacataaccccaaacttcttggaggctttgttcattttttaaattcttttttctttgtctttgtaggagtgggtttattcaaaacccttgtctttgagctctgattttctttcttctacttatttgattgtattgctgagaatttccagtgcattttgcatttctcttaagtgtgtccttcattttcagaagttatgattattttttatttatgctatctatttcactagagatttttccattcatatcctgtatctttttttgatttctttaagttggactgcatctttctctggtgcctccctgattggcttaatagctgatcttctgaattctttttctggcacttcagagatttcaccttggtttggatccattgctggtgagctagtgtgatcttttgggggtgttaaagaaccttgttttgtcatattgccagcactgtttttctggttccttctcatttgggtagactatgtcagagggaagtttggaactcaagggctgctgttcagattcctttgtcccacagggttgctcccttgatgtggtgctctctcctttccccctgagatagagcctcctgagagccaaactgcagtgactgttgtttctcttctcaatctagccacccagtgaagctactgggctctgggctggtataggggagtgtctgcagaatcctgtgatgtgatccctcttcaggtctctccgccacagataaccagcacctgctccaatggaggtagcaggggagtgaagtggactctgtgagggtccttggttgtatttttgttaagtgtgctggttttgtgtggacctccagccaggaggtggcgctttcaagagcacatgagctacattagcacatcagcacatcagtatagggaagattaggcagggggtggggccatagggctctcaagggattatgtcctttgtctttggctaccaggtcagctagagaaagaccatcaggtaggggcagggttaggcatgtctgagctcaggctcgcctttggtgaggcttgctgtggctgctgtgggggctgggagtgtggttcccaggccaatggagttatgttcccaggggaattatggttgcttctgctgtgtcacacaggtcactagggaagtgggggaaagccggcagtcacaggtctcacccagatcccatgcagcccacagcctgaaaggctggtctcactcccaaggtgctcccccgcccccaccgcccgccagcagcagcgagtttatttctaggtagccggtgagcagggctgagaatgttctgcaggctccaagcctctcagctgagaaagcaagcaaactcacagttcctcagttgtcccacagagcctgcagcagcaatccacctccctcaaagggtctgtggattctttcagctttcctggtatgttcttgtggcagttcttagagcaaaagttcatggtgtgtgtctacacatgccactctgtccgacctagtgggggctgcaagttagttttgcctcctatccgccattttccctctattggaagtacacttgaagtgagagtacctttggaaaagattggtgactcttggaactgggtgaggaactgggtaggtaaccacaattgagcccttggcaatctaagcttccatggatcatctttcttctgcccaggtaaatcatctctcagattgcgttccctccctttggtagcagctccctattgacttattcaggatctgattgggttaagatgccttgcatcctttttgggactatataagactttttgtcttttttggaaagttatttcttttagaaagacagtttgtctttctggtcctggtaagtgcacttttggtttcagttttgttctgacttgtttgtgtatgcttatactttcatttgctgcttgattcttttcttcctctatttctaaacatcttttg

SEQ ID NO: 12070 - DNA, 6000 bp, Homo sapiens
ggaacttccttacagagtttgtcatatgtagctttgtcaaacaagacaaggtattgagcttgtccctaactttgcctttggaccatttcttctttttggccttgcccccgggtttgttcactgggtctttgtctttcttggctgactttccagtgtctgtcttcttcttgtagtccttgggtggcatcgtgaagctcggagagcagtggcgaacactgcagccttgctaagatgtcagacaaaaagtgaagctcatttttaccaaataataagtggtagttgacactaatgcccagaggtgaagcttaggaatttgaagaactgagataatttatcatctacaagtagttaagtctctgaataggttgggagaaaaagaaatataatttgaacaggtcttttcctttttttgttacatttcatttctcgttctgcttttctttttaagcctgtcattttgttattttaattattttggcttttaaagttgttttaatttcattaggttgaaccatatagaaattggcgtgtttgcaggtcagaaagtatttagctagcaatgaaatggttaagtatcggtaagttcgtaattatattcttgttctgtaagaggttttaactgacattttgggagtccattttgagttagattgagtaccaaagactgtctgaaggaatgttgctctgatggcataagaacaagtggaacagagccccatgaagtagacaacttcaacccagcatcattctatcttgctaaatcaatatggttctgagagtatatagaaattggaaaattcagaaaatatagaaagctataaagaagaaagattttttaatgaatgttatcccaccatccaataatagtgttgatttttaatgtatttccttttagtcatatatatatagaaagttactcagccttcaaagtaaatatagagagaatatatcatgagactgcattattttattttttattgtattttttaatcagcatataacatacatacttatgaggtatataaggatgttttgatacatatagtatatactgatcagatcatggtaattgtgcacatacccatcatctctaacatttatcaacatttatcatttctctgtgttgggaacattcagtaacctccttctagctatttgaaactacatagtattaactatagtcttcctagagtggtatggaacactagaatgagtctatgttatggttaaagaccaaatgtacatgtggatttctgtaaggatacaaatttatagagcctccccaagttgttaataaattgtgtcttttgaagaaaatgtttttctttaatccaaagcaaaacatttaattcctgattgattcagttaaatgtggctattagtcttttttttttaaagtttcttaaatgaatattttgattttagctcctagagtggtttcactaaaatagaaacaaagttgaaagaactgttactgtactaatggcagtaatgtaacagcttgtagttttgttgcaattttataaattttgaattctttcaaattttcagccattgtattgtctgtttttatcagcgtaactgtcttgttttatacatgggaaaccacagagagaataagtttcatgcccaaattcacaagtagtagtagaaaagcctagacttttgactttggtgaacactttttctgtttattgaaatacagcagtaactctcaaaaatcactcctttattccgtatttattaaggtgctcagtaaatatggtttaaaaataaagtctatggcaagtgtatagaagtaatctgatttggctggagggcaggttatttgggggaagtaaaacagttgagatcagactagaaaggcagtaaaggagccattgactcttgaacaatggggtacaataataaaatgtacattttggatatttaaccagacagaaaagaaaaaattagaaaaatgaacaaaactgtaagtttaggtggtaatcatcttctatggtaagtgtattaaaaattgaaaggaggaaatgcatttgagaactattgtggaaatacattttcaggacttggtgactcagaactaagtgctttgagggagagagtggtcaaggtgattgattcctaagtttcataccggagtgcctgggaaaatgttggaaaaatacagaggcttatttggtgggaaaaaggtttttgattttagacatgctgtggttgaaatctctacaggacatctacaggacatcttccatctactggtggaaaatgtgtgactagcaggcaaattgtagatggaaaagggagcttaggagtgaagtcagggctggagacctaggcagagaaattatttatgttgagggaataattgacgccatgtcatcattccttcttttcagctaccttcagtgctttgtatatgcatagcctcaatgtatttgagtaatgtgtgacagcactgtattcagatagctgttgtatgacctagaactgtatagcctcagtaagagcaggcccttcaggattcagaggagcccagccttaagcatttcaacatgatgggcaggaaaacactggctcttaaggaaggctactttagttgtaggagcagaaagtgagtaaagttatataccccctctgtgctaggtgttggtaagccttttttatatactttatttctcaacaaccctgtgaagtaaggagtgttgttctcattttacagatgatgaaacagaggcttaagagaggataagtaatattagagcaagaatttgaacctgattattgttccttcgatgctattggtctttttactgtgccacacacttcgctctgtttcccaataagacctgtcaaatattactatcaggattacggttaaataggttttttattttggggctatggccgcgtctgggactggccagacaactgctgctgcttcagatttaaaatgtaattcatcgcattctgattatgggtggccatttgtctgtaattagaaagcatgtgtataaaatgaataaaaatgaaagttggatcacatgtttttactcagttgcctacctcttggaatgctttcaaatgccggcatttgtttattgtcttttattctgctggatactttcaattaatccttctaaataaagatactaaaattacacattttcatagcacccaactctgttagctgaaaattgtcatcatttatgacattaccaggaaaaccacaatataatatgatacagtttgcattgttttaaataggcagaagcaagattgtatattctaagatacaaaggcttatttgtaccatgaaacttcctgtaatatccatgcctgagtagaagaaggtacatttacttttctatcttctgtttgtattcttgtttactgctcagcaaattagaagcaagaaatgcatctcaaaattatagcgtagtgtcaaatatgggaacagtgtaatttatctgtgctatttgtgtagtattcagaatgggagatactttatttttctcttgaaaaagtgatcttaaagtttcttggccaatattcagtgaatcatgagagacaaaattaatggtgaatagccttctagctagaacttcttgtgcagctgaattatgattctcagttgccatacgccatacacttaaaggaagttaacatacttcctttctttaatattgctctttgttctttgggaaaatgccgtgagaaaatagaaattacccctctggtagtgtgtttcagtctaattcctgacaccctgttctgttactaccccttctccttgctagcaccctgaattctgcttatctactaaaagggggattccagacagacgaggaaacagccttcaaatggtgcactgcaggcatagcaagccattcccacactgtgcagtctggaaatcggggcacctctctgacgatgaattccaattagttgctaaagatgccagagtgtgtgcacgtacaggctttttctttcccctccccctttcttccttttcccaagccccctcttctccctgtttcccctcctactcctttatctcctccctccgtgtcttagttctgcagtacgcgggttgaagcacattcctgctttgcaaggctttctgctaaggatgtattgtggcttttgtttggattgcagcatgcagaattacaggtaacattctgaaattgaactaaacagtaaattctgttgaaatgttttcaaagaggcaaaatattatattggaatcaatgaagaaagtaaattatcttggctaattttattagtggtaattgtagtgaaaggttttcctaaatattataagcaaattccttttctcccccgtctcaaatgaaaggaaatgggggtaaattaatctgactgtgattggttttgttttatgctgatcttgaaagcttgatgttgctgctgctcctctatacagtacagatcagttgtgtggggtgctattgagggtagccgtgaatagtggtgccagtaggggtggagcgggagggatgatgccagcctgagctagccaggttctttgattagggcattggatgtgaaatgtaaaatgctctctccttttcttctatcagctgttcagaggagactcattacaactcctgctgaagctcctaatcttcttcccttctcttctaccctttccccctaccctcacttggcctgaagacgttctccccagagtttaccttgctcccctggtgctatgtgtatggtgaacctggcactatggccgcgtctgggactggccagacaactgctgctggctctccttattccaggaaggatttaaaggggaattgcactgcaggcaatgcaccagagcagcagcatcaggagcttggggagtaaggctcctctggcattattacacacatgcaaagctgaccgcaatgacagcagctgcttctttgaactgttggcagcagccaagcggcagcatgaagtgacagatcactcctgagctcaagatgaactccaccttggatggtaatcagagcagccaccctttttgcctcttggcatttggctatttggaaactgtcaatttttgccttttggaagtattgattattgtctttctaactgtattgattatttctggcaacatcattgtgatttttgtatttcactgtgcacctttgttgaaccatcacactacaagttattttatccagactatggcatatgctgacctttttgttggggtgagctgcgtggtcccttctttatcactcctccatcacccccttccagtagaggagtccttgacttgccagatatttggttttgtagtatcagttctgaagagcgtctccatggcttctctggcctgtatcagcattgatagatacattgccattactaaacctttaacctataatactctggttacaccctggagactacgcctgtgtattttcctgatttggctatactcgaccctggtcttcctgccttcctttttccactggggcaaacctggatatcatggagatgtgtttcagtggtgtgcggagtcctggcacaccgactcctacttcaccctgttcatcgtgatgatgttatatgccccagcagcccttattgtctgcttcacctatttcaacatcttccgcatctgccaacagcacacaaaggatatcagcgaaaggcaagcccgcttcagcagccagagtggggagactggggaagtgcaggcctgtcctgataagcgctatgccatggtcctgtttcgaatcactagtgtattttacatcctctggttgccatatatcatctacttcttgttggaaagctccactggccacagcaaccgcttcgcatccttcttgaccacctggcttgctattagtaacagtttctgcaactgtgtaatttatagtctctccaacagtgtattccaaagaggactaaagcgcctctcaggggctatgtgtacttcttgtgcaagtcagactacagccaacg

SEQ ID NO: 12071 - DNA, 6000 bp, Homo sapiens
cagcctcaaactcccgggctcaagcaatcctcccatctcatcctcccaaattgctgggattataggcatgagccaccacacccccctgaaaatatttttaagttttaagaaaagagatgaaagagatgggttggacggggctgcatgaggaaagcagaggagacttcggctgtgccatggccttgctatgtggccacaggtcccttcccttctcttctcttctctggttcttggttttctcctcctaatacaaataggtatgtatgtatgtattcattttgagactgagccttgttctgtcacccaggctggagtgtgatggcatgatcttggctcactgcaacctccgcctcccaggttctcctgcctcagcctccccagcagctgggattacaggcacgcgccaccacaaccagctaatttttgtatttttagtagagacagggttccgccatgttggccaggatggtctcaaacacgtgacctcaggtgatccatccacctcggcctcccaaagtgatggggttacagacgtgagtcatcgcgcccggccaaatatgtatttactgagcacctgctgtgtgccaggctccaggccaggcatgtcacagatcatctgaaaccaagagcagagatgtgacttattcaggtccctatgctggttgttggcagagaagggcctggaatgggggatgggggtaggcagaggttctgactgccagctcaaggccactgcaccagctgcgtccacgttttacttccggagctgccccagtgacaagtggggacaggtggggacaggtgggggtgggcgggaggggcatctcttttctcccaggctgaggaggggcctgccgcaggtaggcactaaatagttgtttcgccctccagtggccacaagcagcagtgcaggtgtctggccttgggggtccatgaggcagagtcccttcccactgtccccagcaccaccaccctcaaacacacacgcaaggcatctgtccgggtatggtatgactaggtctgttggagcattccaaagcgcttactttgtcaggtgtaacctgggtgctgggggcaggcgggtggacaagttcctgacatttgtggagatcagggaactcctgagccaatttaagtggaggtcagggaaagcatcctagaaacctgaaggataagtggaaatgaaccagaaaagacctgggggcaggtctgcctattcctaagcagagggaatggtgcacgcagaggcctggggatttcactctggctagaaggtaaggggaagaggcacagtgagggaggagccacggctggggtagattgggtgagccgtgagaggaagggtggactttctcctggaggcactagggatccacagagggattttgagcagaggagagacaaaatcagacagaaatgttgttattattattattattattattattattattattattattattttaatgtaagctcaatagacggaaattttaggaagatcagcctgactgctgtgtgggagagggcttggatcaggccagagaggaggctgtgccagtgctggttctgggcccatcctggatactcgaggcccaaagtttgtaggggtatgagagaggggaagggatcccactttgtctacagagctcaagacaggcaccctcagagagtaattacagtgaccccaacactcacaaatctctctcacagccatgctttatgtccctgagagaaagaggtgattctcaacattctgtagaagaagaaacagagtggagagagctgcctgggtcacataaaagctggctgatggccaagcctcgattctggggggatcagggtgacccaaaagtgaaaacatcccagtggctggttcttccttccaaaattcctggccctgggctatgagggggttggctgaggggccaggagtgaggacccaatgtcctcaggccaccctcgaggctcccttgggtcctggcagacctcaggctccccaccccctgtacccaggcaatgagcccgaggtccgcagtggctatcgcctacccacagcctgcaggctttgtccttggaaacaagcagcctgtcaaagctgcccgctgtaaagtggatagatggctcttggctgccaactggacaatgcccaggctctgtggaggggagattaggccagccgtggcccaaaccagtcccaactgctccggggcctcaaatcagggtccatggatgccctgcccctccatggtacttgaccatcttcaggagtgactcctggaaactgtgatcccctggaagggagagagttgggctgtgggcgccagggcaggggcatcgccaaagataggaaggtcgttgcttaagatacagagagagatttggggtaggacaggaagggcacggtgaggagggccagaaggtacacaagaagactggtagtgttggcattcggaggctgacctgcagcccaccccttccttgcttcgtgaccttgggccagtcctttctcctcactgggcgcagtttacacatgcgtaaaatgggctcctaagaatccctgccttgagtgagatggtgcaagtgtgggaaggcccagccagggccaagcagagcgaggcttcatcttgggcctctccttcctgcacttctcactggctctggaaactgggactggttgggaagtgggcaggtcgcaaacaggagagaaccaagtcctgcccacgttttgctggaccaagaacccgggaaatgctccgagctctgacccaggcagaggcctcttgtctcccaatttttaatttgaaaattatcaaacccagagaaaagctgaaagaatagcacatggaacaccaatatatcttcctttgatatatattgattcccccccttcttaaaataaaccatcataagaccaagaccctgtctctctctatatatatataataaaagtaaaataaaaattgttgccagcaggctttttttaggggggaggacagagtctcgctgtgtcacccaggctggaatgcagtgggatggtcatggctcactgcattctcaactttccaggctcaagcgatcctcacactgcagcctcccaagtagctgggactccaggtgtgcaccaccacacccagctaatttttaaatttttgtacagacagagcagggtctcccagtgttgcccaggttggtctcaaactcctggcctcaaactatcctcccatctcagcctcccaaagtgctatgactacaggcatgagccattgcacccggcctggcaggctaccttttaagtgagttttgacaagaatgctaagtggactgtgtgccaggcaccatgtattagctacgggcttggtacatgttaagtcaaagtcacttaaatctcacagcaactccatgagttatgcactattcatcatccacacattacagatgaggaaactggcttggagaaattaggtgtcatgccttaggtcagagtcaacatgaacttggatgaacttggatggatctatctgcccccaaagcctgagccctggggtcattcagtctaacctccctcctaaccaggcatccctgctactgagaccaggaaggtatgcccacagtccctactccacacttgcatggaggatctttgcctctgcatccccccaacccctcagcctccctctgcagccctggccctggctctgcccctattcccttcccccagacaggccctctctgccatccctgcagtacctttagaatggcctggatgaagatccagaaagccaggttcaaggcccggctctgcctccggccactggcctaacccggggtgagagccttcagttctcctctggaaaatgggtacgcctgcccccagcccttcctcgcagcaggtggaaggtacaggagaagcgtcctgtagggagccggctcagggcaggcagtaggccaggcactgagcgctccctcctccacgaccatcccggcctccgagaggcctgggaagccccaagacccttcagcttccgctagtttgctttggatccaagtctcacaggtggccccttctaatcgggtgactttaaccaatgtgtttgggggaggtagtgacaacaggcccggggcgagggactgaaggtctcctcccacccacctggaggcaggtctctgtctggctgggccgggtggggggcccaagagggcggggtggggagcggaaaggggcgtggccgaggggcggggtctcccgggccgaggggcgggatctcctggtatctgccagagcccgccgctgcctccccgacttcagtccccgcagatgcctcgcagacggtgaacggccacaggcgccaggccagccatagcgggtgaggaactggagctgggaacaggggagggaccagcggatgaaggggaggcccctgactcaggcccattggcgcctcgcggaggagggacgcgcagtggtgggcaaacttcgcatctccctctcgggcctcaacgagtgtttggagagcaagaaaagtgggcgccagggggcttgagggcgcgaatccaggcagacgtgaacgagggagtgcttttcagaatccaaaacgcgggagcctcccagtcctccggtgaggggcgtgttggattttcgtgctgtctggaaaagggaaaaggggtgaatgatcactggtgatggctcagatgccgtcaccaggtggcatgaggccaggtgtcaggacaccgtgttttctcaggcacatttgtgtaaagccagggctggagcagagacccaggaggctcttccctgcctgcagagccccccaggttgacgggagtgaccccagatcacccagggttagggtatccccgctgagcacagcgtctggctgtggcacacccaccagccggaaccacaagctgaacctggaggtggtactactgagagactgggaggcagtccaggcaggagggatggcatggtcacaggtccagaggagggaaactcagaaatggacgcaccttggggagcaggggaaaggtggctgcacggagcagcggtggacaggtgaggccagagaactcggcagaggcctgatgaagcagaaccttggcggagaacctcaaggaacacaaagcccacctggacctgagcttcccccacccgctgcagggaccctgagctctgtttcgcccctctctggccagcgactgctgctgcctccccctctcccagctctccagggcgacagtgtttccctgcttcggtcctgaaggggctcctggagaccatcttttgtgcaagtaaatgtcgtccctactaggtgggccaccccatcctgggcttccagcccactggttggttcccagctcagtggggtctgggagtcaaacaaagggcaaacggaccctgcagaagtccaagggcgaagcaaggcaggatgcccagctgctttcctgcgacttttttttcctcagtccaagttggcctgcctgtgacccctgctgtctgtcacctgctccgttggatccaggatggcaccgtggtgctactgtttcctctgcctcctggtaccttcacttctgggagggcagtgcctgggaggaagtcaaggggactcacagcttcaagggttccaagtggccatccttacctcataaggtcactgcaaatgttatccaagataagtcctggcacagacggaataaaagcactcactaagggtgacccctcttactcatcagcctgtttactcctcacacagggaaaaggctcagggcagcaaagggccctcccgagatcacactctgagtggtgggatttgaatccaggtctgactgcagagtctgcagcttccactgaatgcccccctcccacccacccccagagtaggcattcaacaactgcaagtgtgaggggagggttgtcccagcccccacctgtcttcttctctcccagatcaggagtctctctgggaccccctccaactccccaggtgaatcaaggaaccc

SEQ ID NO: 12072 - DNA, 6000 bp, Homo sapiens
atggtctcatctcctgacctcgtgatccgcccgcctcggcctcccaaagtgctgggattacaggcatgagccaccactcccggccagtttcctcttctttaaaatgtaaatatggccatgcacagtggctcatgcctgtaatcccaacactttgggaggccaagccaggcagatcgcttgagaccaggcattcaagaccagtttgagcaacatggaaaaacctggtgtccacaaaaaataaaaaaatttgccaagcacagtggtgcacaactgtaatcccagctacccgggaggctgaggtgggacgattgcttgagcctggtaaattgaggctgcagtgagccttgatcatgccactgcactcctgagagcgagaccctgtctcaaaaatcaaaaaataaaatagaaataatgctacttcaaaggttattgtaaaggttgaaagaaaggtggcttatgcctataatcccagcactttgggaggtgaaggttggaggactgtttgagcccaggagatttagaccagcctgggcaacatggcgaaaccgtctccacaaaaaaatacaaaaattagcccggcacggttgtgcttagctacttgggggcttgaggcagtaggatcgcttgagcctgggagttggaagctgcagtgagccgtgattgcaccaccgcactccagcccgggaaacaaagtaagactctgtctcaaaaaaaaataaaaataaaaataaaaattaaaagaaagaatacgtataaaatgtttagcacataatatacacacaagtatcagttccctttcctttcctcctgttttctggaggatttttacttattgtagaaaataaagcaatcctttcagcattttctttttttgtgtgtgttttgtgttttgtttttgtttttagagaggtcttgctctgttgcccagactggagtgcagtggcatgatcatagctcactgcagccttgaattcctggattcaaaccatcttccccagtagctgggaatacaggcctttaaacatttctgatgcagcaggaccgcctgcctgaacttacagttgattggttgtctactggtgaagaactacttctaatgaaattctcaggattttttcttcttcaaaattacttgtttttagcttaaaatttccaacttcttttgcattcgaactacttactagggactcaagaaagcaatcaactggaaaaagtggagtaggataaaaccaggaactccatggtgagtgaaatgctaaaactgcaatgaatttttacaacgaataatccaattcccctgtaaagatgtacataaaatcaagaaagactgcctgtcctgtggctgagcaagttatacactagggtcgtcaggttgaggagtaattttgaagtttctctccaatccacaggactcaaagtgtgtcagagcctggcttttccatgatcactttctacaaaaagatgcacttggaggcattcccgacaccccaagaaatgcatgaaaactttagctgcaatcctggaagaaatggtgtttcaagccaaagaatgaaaagtagcatttgacttctgaatgtattgctaggccccaatttgaccactagtttcctatactgtcttaacagaggcttttggtttgcaatatcaatcaactctttttttttttttatttgacagggtcttgctctgtcacccaagctggataaaagtgtcatggcttactccagtgttgactcctgggctcaagcaatcctaccacctctctgcctcctgagtagctgggactacaggtgcgtgtcaccatgcccgctaatttttgtgttttttttttgtttttttgtttttgtttttgagacagagtcttgctctgtcgcacaggctggagtgaattggtgcaatcatgctcgctaattttttttttttttgagacagaatctcgctctgtcacacaggctggagtgcaatggtacaatctgggctcactgtaacctccgcttcccaagttcaagcgattctcctgtctcagcctcctgagtagctgggattacaggcatgcgccaccatgcctggctaatttttgtatttttagtagagatggggttttgccatgttagctaggctggtctcagactcctggcctcaggtgatccactgacctcagcctcccaaagtgctgagattacaggcctgagccaccgcccctggcctaatttttgtattttttgtagagaaggtgtttcaccatgttgcccaggctggtggcaaactcctgggctcaagttatccaccagccttggcctcccaaagtgctgggattacaggcatgagacaccagccaggcctatcaagtcttttgataagaaaaacaaatggcaattatactttcttaaactggagactattaacacattaattacttaaaagagttctgaaaatgtccaaaccgatatcaaataattatttaataataatagcactagattcaacactacacattctagtagcaaccttaagctgatcctgaaaagttagagaaaatagtccaggcagggtggcttacgcctgtaatccagcaatttggtaagccgaggtgagcagatcacttgaggccaggagttcaagaccagcctggccaacatggtgaaaccccatctctagcaaaaatacaaaaattagctgagcatactggcgcacacctgtggtcccagctagggaggctgaggcatgagaatcccttgaacctgggaggtggagactacagtgaacagatgtcacaccactgcactcagtcctgggcaacagtgtctctgtctcaaaaaaaaaaggagagaaaatagaaaaataaaatgtacttgactaagagagtaaggctaaaagccaagcttaggagatcagtctttccagcccctgcaggctttttcagtcaataccttaaagtgtaatgtccctttgaaaatgttgccaggagaagcaggcataacttgttctgttactcagcctgtttgtttccagttacagcatcatgattatgcaaataatcttttcttgaaactatgaaatcacatggctaaatgtaattgtcaaggcagcagttttctagaatttaagaagtaactgtagagaaaatgctcaacaatgtctttgtagtcagttttccctcattcttattcctctcaattccaaaataatgactggcacaatacagctttcaaatatgtgaaagaagaagatatcctcttaaacccctggacagacagcactggtatgaccctatgtaggtcacatgataatacccaagtatagagaagcaaggaatgctatgaacccagttttaagcccttataaaactgttgtccagaaactaagacaaaagtctcctatttaaaactattttaatgtttcatcactattgtattataaaatgggattaagattcttacctgattttttttttattgagacagagtctcactctgtcacccaggctggagtgcagtggcatgatcttggcttactgaaacctctgcctcccaggttcaagtgcttctcctgcctcagcctccccagtagctgggactacaggcgcgcggccgtgatgccccgctaatttttgtatttttagtagagacgaggttttgccatgttgcccaggctggtcccgaacaactgactttcaagtgatccgcccgcctcggcgttccaaagtgctgggattcaggcgcgaatcaccaccctgccaggcctcatttcgtttttagtacagtattatattcaaatttaaaaccagagattttcaaagatgccacttaactttaaaagataaaaagtactccaaagcaggttgggcgcagtgactcacgcctgtaatcccagcactttgggaggccgaggcgggaggataacttgaggtcaggagttcgagaccagcctggccaacatgggagaaaccccgtgtctactaaaaatacaaaaattagccgggcgtggtggcgcaggcctgtaattctagttactccagaggctgaggcaggagaatcgcttgaacccagaaggcggaggttgcagtgagctgagatcgtgccattgcactccagcctgggtgacaagagctagactccgtctcaaaaaaaagaagttcctataatttctgaaagaagcaaagaaagtttccatacagaattaagagaaaaatgttaagacccagacttggggttggatgaaatagcatgaggcaacagaacacaggagttaagagcttccgtgtgattcccagctcaacctggagcaaatgacttatttctcagagcctcagtttgcttacctgtaaagtaggaataatgataatacgtacctcctagctcatcaaattgttccaaaaattaaatacaacaaaaggcctaacaaattgcctcataagggctcaatcaatcgtattattgcaaccatttcgcttgtatttgagtgtgaagcgcctagaaaaccacaggacccctacggcgagccgggaatttttagatattttcctccgagtcaacgctcagtgaaatcagttcaatcagtggcccgacaccgtgcggctgacacagcttatcccccgaccctgagatcaggggtccccggagcccaaggtcgcttccaaagctcagcgaggcggaggtgcggcccgggctggtctggttcggccaccgttgttatggcaaccgccaataggttggcttcatctctaactgaaagtctgcacaggagcggccgatcgaagggccccgaggtgggcagcacaggctcctcgacgacttcctaggtcgcaatctccaggaaaacgaccacagggtcagcggagctagccgccgagccccgctccccgggcccttccggcggctgcgccctttcaccccggacgtgggcgggagaggaagcggctggtgatgctggaacaaacatggccgctctggcgcccgtcggctcccccgcctcccgcggtcctaggctggccgcgggcctccggctgctcccaatgctgggtttgctgcagttgctggccgagcctggcctgggccgcgtccatcacctggcactcaaggtaaagcttggcaaggccgggccggggggcggaggccgaggccactccccgggttttagggcaactttggcccattggggacctctgagccactggaccacctctttgcccctggctgcggcctttcactgacaggtggcggggtctgtggggaaggcgggtctgggcggcgctggggtcttcgggctgaccggcacggggcgggaagactcgagctgagggaggggaaggggctgaactgtggcgttgcccccacggactcgggaggctgctcttaaatccctgctggcttccctgaattcctcactcagggcagcccgatcgcctttcttctttctcccctccagcttttatgctggctttccttgtccgcggtctccgctcttctgtgcccttgtactgtaccggcggtttgaaggtacttggaaccttagcctcagtttcccatttcggtttagggcgctctctggagcgagactctagagaaggaatttcaaatcttgcttaaaacacgtgactgagaatgtaaagccagcattaaggtgtgtctctaatcaaagggcctgctttttcttcctctatccagccattgtctagggaagagagatttttgataaacctagaatgatactctggatcttgctttgtaactagcagagaaaagacctctaaggctgaaacgcaccctaaggtggttcagcagtttactatatctgggaaattgtccaggtgctgtggctcatgcctgtaatcccaacactgggaggcctatgcaggaggattgtttgagcccaggagttcgagaccagcctagtcaacgtgctaaggaccccctccccaaacctgtctctacaaaaaattaaaaattaaccaggtgtggtggcaaacgcctgcagcttctggggaggctgaggctggag

SEQ ID NO: 12073 - DNA, 6000 bp, Homo sapiens
catataaaaatgtaaaagcaataagcacagtttcttcagtatcctgggccttgaaaagggaggatggggtaggggaacgagagagaaggaagaagttggggtcaagggagtactttttctttcttgaataggaaacctagcatgtttatattctgaggactgggaaatgaggagagaacaaaactgaagccacagaagagagaataattgaatgaagtaaactgcagtgcaaaacaagatgtggccaattgaagactaggatgaatgggagagatatcttgcaaagtcattgttagccaaaattggtgacggtgactatcactggaggatcaagacatgcatttcacaaatgtttatgagcacaaagaactatggcagctgtgtactgggtgaaggatggagccttgattatgccctcatggaatgattagtttttcttaagtctgagttgttgggatgaacttcattgaaatagttaatgtgactttgacactactaagagtatgaatattacatgttagttggaatagtggtccaagacatatgcaaataaattcagttatttctgagttatgaattctgagcccaattatttttaccattatatttttgtttctgtgagccatataaatctgagatacagctggaggtttgggggaataattcctaggatatgtggctgcaccatctccccttaactcccacaaagaatggtttggttttcatggtccggctccttgggatggtggaggaggaagcttctgacctggccacactgcattggctcatgggtgactgccctttctgtgattgcagccaccactttttagtccctgatccccaaataatagttcactgtacttatcttaccctccccaaagagaaggagattttccttccaaataagaaaactctttagggcatcctcagggatgcctatgtgtttgtaacacttttagcacccaacatagccctttctcttttgatttgtggttcactctattaagcaaattacattcattgtccctagagaatgggttctaagtagatttgtgtgccaccctgctggtctcactcttgcgggcttttacttgagatgcgagggtgcatgtgttgactctgtcttaccgtggagtgttctggcttgcctactaaactccagggatagggacagccataatcctgccttctctgtttgtgactgaatctctgtggtttaaatactttatataaaacttacacatttcagctgattaataacagctatgcaggaacattcaattctgaggcaattttaatgtagtcgttgataaaatacaaactatcataataaaactgtttaatttacagttgattccacaggatcaggggatttccatttcaaatgggctcctgatgatctgcctggattcccagaatttctcatctgggtatacaaattaggtttcttgtaaccaacacttcatattttatttatttattttttttgtagagatggggtctcaccatgtggaccaggctggtctcaaactcctggcctcaagcaattctcctgcctcaggcccacagactgccgggattacaagtgtgagccaccatgcctggctcccttcatattttaaagagaagttacacctacagcgctttcgacttttgatggacacatctttctagagcatagttcttgcattcctcttttactgaaagttgttaattgctttgttccattagccttagcaggaaaaatcctatctctggagttttaggtcccttggtttatcttaatttcgattaggaataagagaatacctacctattcagctctcaaacagcaatgaatattgcactgtgttcatcctcattacctcccattattagtttacattctgggacactttttctatctttaatgataagttcattcagaaatatgttcccacattgagccatacttctggttttgtgtgattaactttggcaccccatgagtagtgtctgttaaaattaaatgcttgttttgcctcaagagagctagaatacatacacatattaccgtgatttactgttaagtgtgcagattgaggtggtttagaagtttaaaattggtttccgaagggaaatttacaagaaaagtataacagatgaatatgtgattagaactgcattccttttttaagtaaattaaacagttttattatgatagcttgtattttatcaatgactacattaaaattgcctctggaattgaatgttcctgcgtagttgttattaatcagctgaaacatgtaagtgttatataaagtaaaaagagctataaaccaaggagaaagtctgaagatagaactttaaaaaaccactgttatttccaggtaaaatatttaatttccaaagaaggttagcatatgttaaaagctaaatcttgttctgcatttgttggctacatttatatgaatttttatatggaagttcctatccagggtatttattagtcattttggaagtttttatccagggtattgattagttggcatcttatatgttctttcagaagctgtatgtattatttttaaaaatagaattctaattgagcttttaatctgtctgctgaatcaggaacattacatgactttctttggaggggaaggaagccagtggttagttttaggtataaaagagatcttcaagcacggtctttttaacttcttgtttctgtattatttcaggaaatagaggcagctttccctacattagattgttagcacagaataacagtagaagggttcagaaatgaagctaaaaggaaataagagaccagcatgatgctggagttcccctaggccagtcaaattatgttcaggcctttagtccatctggatgttagttctatgtatgatatgaagttggggtgtctgattaggtatatttttccttttgccttagaaccatttttttttccagtccctttatgtccccactgtaatgtcatgtgtatcatttatgtaagactgttttgaaactttgtgtacctctgaatgtctagcctggaacaattgtcacattaccttcattacatggcttttaatatgtcttactcattggtaggtcaagtcctctacttctattctcttaatttgtcttggctattttggtccttagcatttcactggaaatttaggagcaggtttatctatagacttccttggactttgaatttaaataatcattttgattgcaaataagggcagttttgactctttcactccttacatgttatttattgttgtcttgtttcattgaattaactaggctgtctagaactgtgttgaatagtaggagtaatagtgagattcttgttattcctgatattgaagaaaatgcttctaaagagaaccctattcctttttgaggagtattatttaaaacagctcagcatttccatgtgtttgattttagcatattaaaacataggaaacatgcagtgaacaaaaggggttattatgagcttagtgtaccagctgtcttaaggttttcattgttttagaggcatttagttagatttaattctgactccaaaatgaccgacctctctggagactgtattttgtaggagagaataagagtatttccattttaatggaaaagtggcaaagcttccttccacttcgtaatttttgtggacagtattccagcattgtccaacagatttttgtgataatggaaaatgtatttctgcactgtgcacgtaggagagcaactatcatattggacagtgtgggcctagactttggagttctaaccatgccccatttactagctgcacaggttcctgcctggtttcagaaggcttattcttttgggctagcacagctcacactgaggcacgtggctgggggagtagagcagtccttgctggattgcagccatggctctccttttagcctgatgcctttgtgcaagtgagcagctggcaccattgacaagggtgatcctggtgactacctctggaggctctggaccctgactgctgaaacaggagaaaaccctggccccatgcccctaagaagtcacccgatcaaagtggagcctgttgtttccctagtcacaagtcaatactaagagatttggctagtgacaaggaaatttttcatgttagaattcttgtacccagctctttttagaactggactactgttctcccatattcaggaggccatgaaccaaccagtagattgtttattgtgcttgctgatttatgaaaaaacttctttgtacagagcttctgaaaggggtaagagaaagggagaatagcagtgttatggactgaagaatgtgtctccctgaaattcatatgttgaaatctcagtccccaaggcgatggtattaggaggtgattaggtcataagggctccgccctcatgaatgagattaggggccttataaaagagaccctacagtcggtgtgttgactcacacctgtaatcccagcactctgggaggctgaggcagaagatttgcttgagctcaggagtttgagaccaacctgggcaacacagcaagaccctgtgtctactattaataaatattttaaaaaattagcctggtgtggtggcgtgtgcgtgtagtttcagcttcttgggaggcttaggtggcagaatcacttgagcctaggagtttaagtctatagtgaggtagatcgcgccactccagcctgggtgacagcaagaccctgtcctaacatgctcttaggagtttcataaatgtgaccccagaagagctctctagccctgtttccacttatgaggctaaattgagaagatcgcagaccacaaccccgaagaggcctcatcagagcccaactttgttgtcaccctggtcttcgacttccagccttcagatctgtaagaaagaaatgtttgttgtttaagccacccagtctgtggtagctttcatagcagcctgaactgactaagacaagtggatagctgtctggttgttttagaaagcagggctgcatggtgtggggatgctgctgctactcattcctgctcattccagtgttctggaaaatgaggtagggtgggggaggtctgaaccttctaatttatttctagctgttcttttttagcaattaaagcattcgttggacaccagttgcttttaattcagttccatctgcactgtacttaatagatattactcccaggttcttataaatggctggttgttattcttggtttcagagctattttgagtttttgtcttcatttgtattttgactggaaattgggtgtggacatattggggagttggggctgacatcatctttattcagaagtcactttatgaccatgtgcgggatatattaatttcactacagcttttgatcttaataaaatgtctctgggttgagctgactgatcacgaagattttaaactttaatgtttcctaagaggattgatacagccatccagagaataacatagtatataggagttatcttttgacagatcaagttccatttccaaatgatataaaacccacctgtgtccacatccttatgccttcttttgaatctatgatttgataacttaagaaatctatctatgcattagatattgcctttccggtagagctatggtgtgatcttatgctcatgaacagaaaatgaatttaagaatcctcagacctattgtccagttcttttctttaagaagaacttgctattgactttgtcaaaactaaatctgttgccttgggcgacaccctccaaaattcagattcagatggattacactaatagctttatgctacagatcaagtcatataatgtgaaggtacaattgcagctcccttattgttgtagacgcttgccgggatgaagttctcaaacttaacatgctcttaggagtttcattaaacatgtgtgtgtatttttaatgtccaggatttataaatggtaacacctgccctcagttcttttttgcactggtccacggtgt

SEQ ID NO: 12074 - DNA, 6000 bp, Homo sapiens
tatataatggttgaaaaaggaaaggaagtcatcacttgcccaaggtggtggtgaattcccattctgttaccagccaagggaagggattaggggaaaatatttcacccagaaaagtgctgtgttgtttgagttcgccttttggttattaagggtactaatatatttttcatcaacaatgacttaaggcccctagaagttcatgaacctggtgtgggtgtgtgtttcccactcagatgtgctgtgtaacttgcacctgagggtaacacgaactctccctgggcaagatgtaaccagggaaagaaaggagaaggcagagctcagagcaagcagaaagccaagcaggagaccaaaagaggcctcagaggccatgtttgcatcttccacagagggacagacacattctctgcctctccagtaaacacaaacatgcaaacatgcacacacagagacatgcacacacacggaccatacacaccacaccacacacacacacacacaactacttatgtttctgaatattacaaacatcattacaaaatatgaaatgtacaaagaacaattcccggtggctcatgcttgtaatcccagaactttgggaagccgaggcaggtagatcacccgaggtcaggagttcaagactagcctgatcaacatggtgaaaccccgtctctattaaaaaatacaaaaattagccaggcacagtggtgggcgcctgtaatcccagctactcaggaggctgaggcaggagaattgcttgaacccaggaggcggaggttgcagtgagctgagattacaccattgcactccagcctgggcaacagagcaagcctccgtcttaaaaaaaaaaaaaaggaacaattcctgaagcttctgatgatttctggctgaccatgaggttggaagtgggaacacattaagggcttaatgatgggacacagtgatgtaaccactgtggagccacaattgaagtgctgagattcagcattggaagacatctctgtcaccaaatgaacacgcctccctaaagagctctggcagtgagtcaaaggcttcatttgggtcaagacagagttattatacaaaaagccaagtttcattctacaaatccacatcggggtcaatattttaaagtgatttcccccaagttctgtgtagagcaagctgacagagaagaaatggctctgagatatctggcaaggtgcagatggactgaccacaagccgcttatccccactgtagctccgggctcccttctgccacagtggccatatctgtgaggttctgccctttccctggggccactgcatcagtcagggctctccagagaaacggaatccacaggaggtatacctatagcatacacaaaggctttattataaggaattggcccatgcaattatggaagctgacacatccaatgtctataggtccaaggtcccagttccagtcctaagaggattctcctagttagagacttctctctaactagggagagtgttggctttttgtcttcaataacagtctactcaggccctcaactaattgggtgaggctcacccacactaggaagggccatctgctctcctcagtctactgactcacttgtcaatctcatccagaaaccccctcacagacacattcagaataatgtttgaccacatatctgggcaccccatgccccagtcaagttcacacatacaattaaccatcataactatctgttagaccccaccttgcagggggcagtcctcctctggaaaccttcaggacttgaagtgtcaagctcatgtgtgcaaactgtgaccaacacacattttcctgagaagaggcctcagacaaacaaaaaaatatcatgcatgcacatttactcagataatgactgtctgttgcagcctttacgctaaacagagctaagagtagagatagtgcagattaactcagacccagaaacttggggaggcaccctgggatcctggaagcagatgctgggagggcagaggggaccgagaaaggaggtgcatttactcagctcttctgagacaattctgctctcctgcggtgcactcgttctgctggagaaagggctcactttgagtttgaatcttaaaactgcatgtcctttaaccacactgtacctgctcaccaggctgtggacactaaattgttgggaaagtgaatatatttcatttttttaattaaaaaagcatgtaaggttatattacataattgtgatatataatacatttattcaaatcatatttaagtttggggccacatgattttcaaaagtatacagatataactcatagtatctttcaattttattcccataagcctagatttgatttaaagtctaagcgcaaaggtagagaaattttttagttgtttagtacctgccattttatttttctccaactttttattatggaaaaagttcaaagatacaaagaaggagaacagattgtacaaccccttccctaaatccaccacgtagaaccaataatcaccaaccttttgtcatatcagcttatgtgcacgtactgtgctgaacaatttaaaataagttttagacatgaagacattttaccctttaatacttcagcagcacctcctaaaattaaagccattctcctaaacaaacattatgccattatcacacctaaaaacattaacaataattctatactatcagtcaatatcccctccaatttgtaatttcctccaaaatgtttttgtgtgcgtgtgtgtgtgctgatttgtccagctgggagtcaatccggatttgtacttattgttatacttcttcttttcagctgttcttataccagaagaatccttcacccctttttcttgacattgattttttttggaagagctcaggactgcagaatgcccacactctggtagtccagtttttcccatggtgtcatttaactcatggctcaaactcttccatttcctgtaaacttgcagtaaagtctagaggctttgcaattgattcaattgaagcatctttggcaagcacacagcaacaatgatgttgtgtgtttcttttgcatcacataatgccaggttgagccagtattagtgacactgagtttgatcttcctgtaaggtacagccagatgtctccataaaaaaatggaaaatggaaaacctttttcttttttttttccaattagcacccgttcgcctgcacactttcacctaagggtttgacacccactagtgcacactgcctgatttaattatttcattaagggttacagaatggggatttcctcattctcgcatttctacgtttatgagctggcattcttctgttaaactgctttcacttgtgaaacaggatgcagaggaggagacttattcaacagaattgtagggagggctgtttctctcaaaaggagtggtgagagaagatggtctctaccggggcatggagggctccttgtcagagtctagtgtctgagctttaaggcccaggaagagggcagcagatgggggtggggcagtgggtgagtgagaggcccgtgtgtggggagacccactgaggacagggatctttaggcaaacggagcctcactgaaagaggaatttcagtgatgccatgggtcagatcctgggtctctcttagggaaacctgccataaagcatgagagccacattactcctcagggcttctgggctccgattccgcagactagttttggaggcatcaccacgcctcaaggttgctctgttatatcagggtaactgactttctctaggaacggagacttgggtgccccttaaaacaaccctcagccagtatcctagcagtaaatttttcatcacgggaagcaactaattgaacagaggtgtgatgaacctactgaccactttggtaatatagacacagtggccacagtatgctgtattgttatcctggttgtgaccaatgccaaaggagcatgtttccttcttttcttgacttgatgctgtaggagtccaacaaagggaagcacattcaggcccacatgaaacttgggacagaagtggcttctcagagccgtgcaccaggcactttgaacaagttggaaggctacagtgccggaagactccacagtagcacaggcgaagtggcttaggcgaaaacgctgggaagtaccccagctcccgggggccagagcctctagggctggcagcctcagcaggcagagtcacttgcctccttcagctcaattgctgagggcttgcgtttctctgcagggaacaggagtgccgccgacttccactcttggtgcccttcaccgctcaaactgcaccccaaataagcgtatgcaccctgctccaagagaaggatgcgctgggctgatcctctggaggcaagagggcaaaagacagaaagtaacgagcggcctttgcacaaactcaactctctgcagcggcccctgcggcccaatcctgccggcccaggaatgcacggtcggataacaggcctctccttgctttttcgtcttcttcctcccgcttctctcctctctccttttcctcctcctcctttttctttaattttctcctttctccccaagcttctacagttgtttctgtgttcgctcaatcatggcctttggcattgattgaaaatttggcagttccttctctcggaattctgtttgaagccttcatatggatttattattattattattatttttgccacacaaaaggggcaaatccgcgtgaggaagggggtcgcatgggggtcggctgagatctgctggctgccggtctaggaggggcgctgctctgtgccggagtgggctctggtgcaccagcagaggctgggggagagtgctgcccccgcctggagcccaagtctctgcgtgcctgggggtagagcgcggagagggaccaggcaggcgccggaggggacccgcgcggaaaaggaagaagcccaaacaaaaacgctgtccggcgccaggcgcccacctgcaagcccaagccggtgctcggccagttacaaaagaaatggtcaggatctggacaacgataatgatagtattaatcctcctattaagaatcggcccaaacaaaccctcgctgtcagggcgacaggcgcccgcccaagcccagacctcggacctggttccaagcctgttcccgctgggtctctgggcgcccggtttctgcacctggagctcgcccgatgaggacaaggtctggaggccggcctgggaacaggggccgaagggcgagccggaccctaggggattggtagggtcggggagaaggggtccaggctaggggcgggcggggcgcacggagaccaggcggcttgagcgggaggtggggagctggaggagtgccgggttcgcgggcgggggacggggagaggggggcggggagaggggcgggagtcgggggcggcgaggggaggggcggagcgcgggtcccgccccggcgggccgctggaaaagtttagtctctgactcgctcgggcagaggccgaggaagccggttccggggacgggcaacagggactcagggaccagaaggcggctgcaggacgcgaccgagcaggaccccaggcccgggaacgacgtcgcgagcgctgagactgccgggcctcccagcccatctggcattcgagcgcaggaccgggcgccccggcaccgccgcgcgccacccgctaggatgccggtggccccagcgccctcagccgacggaggtgagaggcgggcccgggcggggcgcggaaccagggtggggggctgggggccgaaggacccacctttccaacaaaatccccaccgatcccgggcgcgacggggacttgggcgcgccacggcggccggagcgctccacatcagcacccctcccccagagccgctgcaggaacagggaggaggccttttccaccgcacccggagcgtttacaacgggctggagctgaatacctggatgaaagtggagaggctgttcgtggagaagttccatcagtcgttttccttggac

SEQ ID NO: 12075 - DNA, 6000 bp, Homo sapiens
taactcggcaggctgaggcaggagaatcgcttgaaccgggaggcggaggttgcagtgagccaagatcgtgccattgcactccagcctgggtgacaaaagcaaaacatcatctcaaaaaaattaaataaataaagaatgcagagagcagctaattactcctaaagtggagggaaaagtaaacaaatatggaacttagaactcagagaaagctcttccctgatctgagatttttaaaaattgtgataaaatacacataacatagaatatactgttttaaccattttaaaatatacattttaaaggatatccagtacctgtcaagcatgcatttactacttcttttgctctgaggggagagtatggttgccctaggagcatgctgcctgctttcgtggggaagaaactggcctctgttgagagctaacagctgccaccaacctggtgacaaagtaactgactcaagctgcattagtgtcctagggctgttgtaacaaacaaagtaccacacactagatggcttaaagcagctagaaatttattttctcacagttctgggggtgggaagtctaaaatcaaggtattagcagggttggatccttctggggcctctgagggaggaggggttccacgcctctccccaggctcctggtggttgccagcaatccttggcattctccggtttgtggtagcataaccccagcctctgcctctgtcttctgtggtcatcttctcttgtgcctctgttttctcttcttttgatgacatgaggccgggcggtggctcacgcctgtaaacccagcactttgggaggccgaggcaggcgaatcacctgaggtcaggagtttgagaccagcctggccaacatggtaaaaccccgtctccactgaaaatacaaacattagctggtgtggtggtgcatgcctgtaatcccaattagtcaggagcctgaggcagaatgatcacttgaacccaggaggcagaggttgcactgagcagagattgcaccactgcactccggcctgggcaacacagcaagacttgtctaaaaaaaaaaaaaaaaaagacaccgtcattggattagggtccaccctaagccagagtgacttcactaatttacatttacaaagaccctatttccaaataaggtcatattcacaggcaccaggatttaggacttgaacatatatttttggggggacataattcaacccacaacaagagccatccccaatgtggcagcaaataaactggtgctgaacagggaaacctgcacatcgatctgtttgctttgagaagaaaatatccctttctttttccacgtttgtagtgtccttcaagtaccctctactggcagagtttaacatccagccagctggcaaaggggaatggactttgcatcgttccctggggcaaggaaggatgggttcaaagctcagaggcaataaattaataactgccatatcaggggaccaaagttctctctgctttgaagtgagcttcagctagcctcattcgatcttcttcattttattttattgtggtcacaacacttaacatgagatctaccctccgaacacatttattttttttcttttctatggctgaaatagaactcgttgttgttgtttgagacagtgttttgctctgtcgcggaggctggagttccctggtgcaaacttagctcactgcaacctccacctctcgggttcaagtgattctcccacctcagcctttcggatagctgggattacaggcgcccaccaccacgcccagctaatttttgtatttttagtggagatggggtttcaccatgttggccaggctggtctcgaactcctgacctcaagtgatctgcctgcctcggcctcccaaagtgctgggagttgttttgagaccaggtctcactttgtcacccaagctggagtgcagtggcctaatcatatctctgcagcttcaaactcccaggattaagcaatcctcccacctcggcctcccaagcagttgggactacaggtgcaagccagtgcacccagtaaattttaaaatttattgtagaagccgggcgcggtggctcatgcctgtaatcccagcaggcacatccattcaaaccatagcactcaggggtttgaactctaatctaatctgaggggaaagttgagtaaaagttacatcgccaaatttgcaatatgggaaatttcctctatctgaaggcagcgtgggaacttcttcaatttgggaagaagagccctgaacaagtagcagtgagcatctataagaggagcttgcatggaggaaatggactgggtaagctgcatatctgaaaggcctcacgggaggcaagggtcaatgagaatcctcaaaggtttcaaatttggaaacgacatgatccaatgtggagatggttggcatctacaacacaacatgtttcaagcaaatgccccattctactccataagtctactttacttctgtgttccctgtttccagagtggtacctggttgcccaaactgggaacctgggcattatcatgactcactcatctccttcactcttccagagccaacgactaaatactgtccattttgctgcataaatatattttaacttttttctatttcttttcctttcccagagccactacctagaaatagacctgtagcatctgttacttggacttttttttttttttttcctttgagacagagtcttgctctgtcgcccaggctggagtgcaatggtgtgatctcggctcactgcaacctctgcctcctgggttcaagcaattctcccaggctcagcctcctgagtagctgggattacaggtgcctgccaccatgcctggctaatttttgtgtttttagtagagatggggtttcaccatgttggctaggctggtcttgaactcctgacctcagatgatccacccacttcggcctcccaaagtgctgggattacaggctacttggactcataactgtctcctaatggtcttcctgatacatcccaactcattttcccaggcagagtaatggttctgaaatgtcaatccgaaggtgtcactttttgctcaaagaccccatattggcctttccattgctcttaagataaggaacaacttctttgacatgggataaaatgaccctttgcaacttggctttctccagtttcatctcctacactccttacctctactcctagtcatataggttgtctttcattttttgaaaagctttattattatttttttcttgcccatggctcgtttctcttcttggtacttatttcacactcccttgtccccaaactcctctctaattcacatccttcaagccattctctattcgtcctccaaagtcagtttagctgtcagctcctactggaattgatgcttgtaattgatcccgatcctaataatttcaggagaccctcccatgtgtttccattcattttatctttctcattatatatatatataagcatatatataagccatatataagcatatataaacatatatgagatacaaatgtaaataagcatatatgatacacaaaattgttattatatatataacttttgtatctcattacatatacatgtatctctctcattacatatataactgtatatgttgctatatagtcccatgcaatatttagtgggctgaggtgaaaaatagacacatatatgttatatatgtaatgacagagacatatatgtgtaatgagattatatatattatatatgtaatgagggagatatatgtaatgagagatatatatttattcaatgagaaatacaaaattataatgtatattcattatgtattataagtatataatgctatgtatcagtatttgatttcactttattaaaagagttgattatatctgaacgtttatttatttgttactgactgtcatcctccatcagaatatatgctctctgaagttgagcttcttgtttactttgctcaccactgtatccccagtgcctaagtaacagtgcccggctcagagtagagactcaataaacatttaccagatgaatgatagaaacagattttttgaggcaaagtttttcatgttgccatatagtcccatgcaatattttggacatacttatactaaaaaattattatctgaaattcaaatgtaggccgggcacggtggctcacgcctgtaatcctagcattttggaaggatcgcttgatccttccagcaggttgtcccgggaacgcgcagcccaaggtggacgcacagacccgcgtacagagattttttattgtcatgactgggggtggtggcactactggcatttagtgtggagaggccagatatgctgctaaacatcttacaatgcaaagggcagcccctcaaaggcaaagaattatctggtctaaaatgtcaatagcgtggaggctgagaaaaactgaactagatggctatgaactttcagggtccctacctagtacacaggcagcgcctagaattgctaagttcatcttccgtttggaaaggcagcatggggttagtgagaggaaggcgcccggggctggtggctggctttaaaggcctacgtgcaaatcttcttgacgctgataacgggatgcgagagagccaggtaggttacctattgcagcaggtcaagtgatgatgtcgaaaaggatgcgtgtgccggacactgtggaaggtaaagcgctccgcacagcccgcctaagtgcgcccgggacagagccatcccccaggtgctaccaaacaaatcctccagctgctggtacggggaaggtgttcagtgacacaccggaagcagcctagtggctgaggcgtccttctccctaccaacgggttgcgaaggaagtagttgctgtagccgcgccctgtgcgcctgcgcggaggcgtcggctgctgacgtgtagctggggccagacgggactagccgggcgcgcggctgagtgctgcagaatcgctggggtggcagagccgccagcgaggctggggatgggggcgccgctgctctctcccggctggggagccggggctgccggccggcgctggtggatgctgctggcgcccctgctgccggcgctgctgctggtgcggcccgcgggggccctggtggaggggctctactgcggcacgcgggactgctacgaggtgctgggcgtgagccgctcggcgggcaaggcggagatcgcgcgggcctaccgccagctggcccggcgctaccaccctgaccgctaccggccccagcccggagacgagggccccgggcggacgccgcagagcgccgaggaggctttcctgctggtggcaaccgcctacgagacactcaaggtgaggcctgcgggcgtggaggggcttcgaagactggccgcgggaagcccacggcgccttccgaccccggtccgcggagcgtgggcctctgtgaccccgaaactgagcacagccaccaccgcgacctttaagatactcacgtttcccacgtggccctgtgaaagagccgagtcggccccacggggccttggggggcacagctagcctccttgccctcttcctttttgtgacattgttatgcaaaactttggccatcttacgatttcgtgaaaatattttaataacgtgcatttcacattcgaaaagcagggtgatcattattagtaggatctggggtagcccacaacagggaaagtctcgaatatcaagtgacaactgtgatcgcatcagtttgatatgacagaaaattggtttctggaaatagtgttaatggtgacgcttagtttgggtttaaggaactaagaaaacactgagaagaacaatgaacaccagtcaaaaggctggatgtgagtctttgctgtgacacccctgtatgaccttggatagtgacttattatgttgaaatagctgtttcttcatatgcaaaattaaggccatgatacctcctctcagagttattatggggattaaatgataagtgtgcgaaccgcccccctttccata

SEQ ID NO: 12076 - DNA, 6000 bp, Homo sapiens
ataagtggtaaatttcccttatgctctgtggcatctcagtttagccagtggaaagactttttataaagacttatgctaagagcctaataacgggcctgagtacagagcttaatagtgggcctgagtatatgaggctgtagggctggaatcagccatgctcaccctctggtctctgaaaacacagttccattgtctggcacttagatgagttattgtcactgagcaccatggcctgaaaagtatgggcattgtggctaaatagggtgttaagtgccacctatccagcagtccagcacctgagtgactccactgggtttggggtacctgaaaagcaaagtgtccctgttatctactgctgcataacaaatcaccccaaaactcagcgacttaaaacgacaataacccgtcattctctctctcagtttctgtgggttaggaattcaagagtggctagctgggtaggtctgacttgggtcttgtggtcatagtcacaccatggctgggagcatcttgaagtctccactcgcatctgtcttctgggctgagaagcttgctcaggtggggactgggacagccggggctcctgggggggcctttccatctctgcatggtctgtacagcagggtagtttcagggtagccagacttcttacaagaaggcttagggctccaaaggtcccaagagagctgggtggaagctttatctaccttggaaatcacacagcagtacttccatcttactgtattagagcaattacggcctgtgcagattcaggggggtggcatagagactctccttgatagcggagtggcagagttctggaagagcacgtgggactggaaagaatgctgtggtcgcagatcgtgggtctggaggccaaggtgtacaccccacattggggctgctagcatcataacagtccacccatgctttggggcctcagcaacttctcatgtctgtaggtcctggcaaatgtagcctacatcatcatagagtccaccgaggagggcacgactgaatatggcttgtggaaggactctctatttctggtcgacctgttgtgttgtggtgccatcctcttcccagtggtgtggtgagtagctcacagggagggaggccacatgacagcttggctgtcaagcccaatagctgaactggccattcccaaactgatctcagtcacatgggacgtgtgtttaaaagtacagctttctgagtcccagactgacctgaatcagcctccaggggcagaaccctgtgtctttttccagttactcggggtattctggcagagctaatccgtcaccatgagctggcatttaacagagttctaagacaatagagaggaattgggaaatgagaacttggtagtaacttaaagtagcagcctgaatttgtggtggtggtagggagttggagaaatcccataaacagccagttcttgccaacttaggtggaaaatgaggaagttcattaacataaaactagtgatagttctcagcacacaaacatttttgatgttttcagaatggattgctccattcctggaaatggcagtgtttagatgcacagattgtgcattgggtctgtgtaaagaagtgttagtgtcaagtcagtggttgatgagaaaatatccttattaaatcacatgcagagtggtagaaattcagaaggctagcagcaataaaacactttacccttagtgatataattccatggctattggaatgcaattcttttgaaataaattttaaagaaaatagattcaccccggccttccattacaagtgcttcttttttttttttttaacccgagatggagtttcgctcttgttgcccagggtggagtgcaatggctcaatctcggcccactgcaacctctgcctcctgggttcaagtgattctcctgcctcagcctcctgagtagctgggattacaggtgcgtgtcaccatgcctggctaattttttttgtatttttagtagagacagggtttcgccattttggccaggctggtctcaaactcctgacctccggtgatccacttgccttgtcctcccaaagtgctgggattataggcatgagtcaccgcagctggctgaggtgcttcttattgcaatgccccatccagtaaattaatatttttgaggatcctggggtttgtcagttactctcattatttataacatggtgcaaatggagagtacttctcattccagccagttagattcactcttcaccctcattccatcatacatcacacatgatctcgtatcagttcagcagacagctaccagcatagaagagagtatgaatgatgctcccacctcagcctcctgggtagctgggaccacaggcacacactaccatacccagccaattttttgtagacagggttttgccatgttgcccaggctggtctcaaactcctgggttcaagtgatcttcccacctcagcctcccaaagtgctgggattataggcatgagccaccgcacccagtggaatatgaatgactcttcctcctcactgcagcctcctgccgtcctgcacaggaattagtcactcgggtatctaacataggatgtccagcattgtttccagatcgaaaagagcacctcattagggaacagaggttcacaccctacttttacacatgccactatcagaatagtcaaatataaggaaccccaacaagctgtcgaggtgtaagcagccatttcctgccccttgttaattacaacactaatgagcagattccaaatggcaaaattccttaaggtaaatatcctaaaaattactgtaaaatgaaaaaagtcagtaagtactggagaggtgattcaagattaataatatttttaggctgggcgcggtggttcacgcctgtaatcccagcactttgggaggctgaggtgggcggatcacgaggtcaagagatcgagaccatcctggccaacatggcaaaaccccatcttaactaaaaatataaaaattagctgggcgtggtagcatgtgcctgtagtcccagctactcgggaggctgaggcaggagaattgcttgaacccaggaggcggaggttgcagtgagccaagatcatgccactgcactccagcctggcgacagaacaagactctgtctcaaaataaataaataaataaataaataataataataataataatacttgtaaatatcccgattcagccagcattgcttcagggccagcagtgtactggttagctttcgtgtggtgttccattcagttctcaagcagatagcccctctcacaggtgggcaaattacggaggatttaggaagagtaattgatttgctgacaagagtgagtgacagtgtcagaccacagccgccttccctcacacagcctgtctgcctgtgccctgttcagccctcagggaagtctctctgttggtggcttttcatggtgcctccacctctcacctgcggctcctgtaataatgttaatgttcctctgcctgaaatgtaatgatggtcattaggtaccagcacatcacagccccagacagtgtccctggaggctggcatttttcagcagtgttaaaaatctccactcgataagtttgcatggtgctgtatgttcacagctcttagacctagactctagaagtcagctggtgactttcttctagggtttattctctcctggtggcaggtgagcccagtgatgctccattgtcatgggagtgttgggtagggggtggttgtgggagtgagagattaacaggagcattaaatgatggagttttgttttctcctcacgctctggtccctgctagacttattgccacagatttggccagcagagggcgactttacctcagacgtgttgatatcaaccatttccccccctctacccgttttagggagagtgctctaaagtgatgtagtccaacctttcagcatgtaattgagaaattcagcctcaagttactagagctggaaatagagaggagtgcagatttgtcagctaactttttgttctctaaatgtttatttttaggtcaatcagacatttacaagaagcatcagcaacagatggaaaaggcaagttctctcgtgctcattttgtgttgctcagcttgctctgaacccacgtgctgcggcactgcggaggagtggaggcagcctatggtgtcaagatgctgtcttcctgggaggagagctaggggaggcctggggcccacttcgtgagagcagccaggggtagtttggagaaggaggtgttgagtcagttgtataaggaggaggttgggggtgactgctgcttattaagatgattcatttcatttccactcgtggttgtgattttcaccttctcaaaactgagtcagcaagagaaaatcttgtcttagaagggccagataacacttcgctgtgagaacaggagggataatggattggagatggctatgtgtaaagcagccctgcctgctgatttaacacactttcaaaatagatgtgtcagtattcatttaaagcaagactctgatgacagaaggaaccttgaaaactacctgatattgaaatggttgtgccctttatagcccttttgcatctccttgactttccagtcatgcctcctaaatcagaagaaaagctgcaaagaaaatgttttgtgtggttctgggcttatttgaataatgttcatgaccacaggctgccatagcacaagtgagaatttcagaccacaagggtttaaggagcagtgctctcttctctcaaagctcagaacggtctctggatccatggtatcgtacacccagtgtggatattaacattctttaatgcaggttatgaataataaataaaacaggtttttgttaataaagttttgttgctgactctatttctgattataaagccaatgtagattcattttagaaaattcggaaaatgcatagtagctgtaaatcttctttcacaaacctggtatataactaataacgcattatttctttaagttaaattaaacatgactttgaggcttcacgccagggtcagccctaggttgttatttagagcacagtattctggaggatctcgccagtttgggcctggaacagatagtatggcattcctgctgtccaggttcacgtaactcttgctcctaggcagcctgtgtgcaagtcatacccaggcttggagccttggtcagtggtcagaggccagcctcccaaggcccactcagcttctgcgacctgcaccagcttttgttttctttctagtcctgggaatagcccttctcccgttttctcatttttttcccctcaaagataccaggttcccttcttttccctctggagtgtcctcttgtgataggttcttttcagtggctttaagcaggttcttttcagtggctttaagcaggagtcacagagcttttgcttctagccgggctacatagcctttcttggagcccagtaaagcaccctgccatcattagaaaaacccaaggtaggaagtacaaatccacctctaggaataattggggatattcttttttttttttttttttttttttgagacggagttttgctctttttgcccaggctagagtgcaatggcatgatctcggcttactgcaacctccacctcctgggttcaagcaattcttctgcctcagcctcccaagtagctgggattacaggcgcctgccagcacgcctggctaatttggggatattcttcttttttaagacagagctttgctctgtcacccaagctagaatgcagtggcacgatctctgctctctgtagcctctgccttctgggttcaagcgattctccttcctcagcctcccaagtagctgggattacaggtgcctgctaccacgctcagctaatttttgtgtttttagtacagatgaggtttcaccaccttggccaggctggtctcgaactcctgacctcaagtgatctgcctgcctcggcctcccaaagtgctgggattacagatgtgaacc

SEQ ID NO: 12077 - DNA, 6000 bp, Homo sapiens
actgcttggcagaggggaggagagaaaggttaggacagaaagcatcaggatgactctccaagaaagggaatgtctgaatgacaagaggactacagacaggagaaaacattcaagaaaatttatcaaggtattctttgttcctgttgaaacctcatcatcaatgttagtgtcttcagaagcccacccaaatatattattttactttgataaaagacaacttggaaccatataaaagactgcactggtaccattattccattttacagatgagaaaagtagctcatttggaacataatgagctaggttttatggattaatctagatgctgaactgaattctgtattgtatttcattttctctgtccttttctactggatgtacatacctacatttaattttagagttatcgatctaaagctggctgcagaagctgtctcatttagacaggtccacgcttgtcaggaagacaggtctgtccaggcagacctttcagtttgttctatatttcatttcaggccacagcagaccaaataaagaggaaatgaagtgttttatagcaaataacttactgttgaatacacatgtcttgtacggacaggcctcccaatttgatgttagaaggggccacagagtagttaagatagtcaaaacagaagcaactgtattccttaagaaggtaagagacaaaatcaacatattaaaaatattcaagttgagtggtaggtaagaaactccttttactttacctttgatttatggggaaaggctaaacatggaaataattaattttaaaatgtctttatattagatatagaagtattggtgttaagaaatctgatagtaagtacagtgtataggaagaaagagacgggaaaattagctaataagtgattttttgacttgagtagagctatggttaaaaatatatggaaacctctttcgagtatatttttttcttaccaatatatactttttatgatactgagattttatagtgaacatttgcctattcatcccaatataatatttcttatagtttggtatcaacccctatgattatttgtgagataagggagtggtttgtattcatgggtatacatatctatacacatttctgcatgccgtacacaaacataagtagcattgtgcatgaacatattagcactgtgcatgtactaaaatttcaattttttcacatagtaggttataaaataaatcatatattcgtaggaaaggtatagaaagcaaagttatttaaagtggatttttaaaaaagatttgaatgattttttttaaaaaaaagattagaaccattgtttttaaaaggaaacagctttagatagtaaattatttacagccaggactcagccctgagcatcctgtgaaaaccacacgagcttggtcaaggttctaagcagtcaccggtgggagatggtcatggtcccgtcacagcataactcacttgaggcttgaaaagtttccgtccagctacggtttgcagtgacctttctcttctgcaaagcccacggttacctggtggccaccaccaacatagccccgcctcgctgtcctgcgtttctctcaatcagatcagtcctgccgagtccccatgccttactgctggtgtgctgtgtcctctgtgccatttcaaggcgagggctcatgaaacttttactcacacgctgctatttttgatatgcggtggccttagctgtggagcgagaggccgataattgtgatcactccggaaatcctgggaagccagaagtgggagatgggtgttgtgaggtggcgtggctagggagaccccatcgagtgggtgtgttataagacctgggcgaatccctgtggctgccactctcctgagaatgttccctaggccttagtcccgcgccgctcccacccacacctccaggtgtgcagtccccgcccttaattactctcactaaaattgatagtttacacttgcaaagctacactgggaaagcggaagagaaatttataatcgtggatatggagaactaggggagcagacacacttgctttcgtttacagatccagtgaagtgaaaaatcagaactagaaacgtatgcaccttcctagcagcaaagccgcttctgcgttcttcgcagcctccagtgcagggcggcgctgggagaaactttgcgccttctggaaagtttagaaagtgagccacgaaagagaggccacatttccggggttttgcgggccccgcgatgttttccagagcttttcgagtgggaagaggagagcgacaacgtgaaaatgccccgtgccggggcgtccaccggagtcctgccagctgtccggcgctggggtaagcgcaggaggggcgggggtgggacccgagctggcggccacgggtctcccgctgcgggtgtgtcgactcgggggcggggcgggggaggctgctgagataatgaatgggaggctaaggccaccccccagccccggccctgccaccaccgtgggctgtcgagccaatgaatggaggagggggcgcagaggtcaggggcgctgggggcgccacaccaggtaaggggtccagcttgggagcggggagggcggactctgggggttcgggtgttgctgacttgtgctacgtggaacaagcagaaaagaaggaaggcggaggaagagaggaggctggcgtcggcgctgctcctctggccctccctctgcgccccctcctcctgccagcgcgccaaagccgggcagtaggggccgactggcggctgacgctccctgagtggcgactccgtctccagccccgctgcggagcgcgggccggatctggggcggccagggcccggagccgcggagccctccccgccgcccggccgagcacgggaccccggcggggtgggcgcagggggcggccccgctctgggcgactgccgaggggcgggcggagggccgggctcggctggcggtggggcgggggccgccgggactgggcgcgcggcctgaagccagcccgggggcggcaggagagggacgcgcggcggcagcgagcgcaggtaagggggccggcgcggcgtgtggggacggcgccccctgggcgcgaagccagaggccgcggcgactgctcggcccgccacacggcgcgctgggctcacactgtcccgccgcggacgggctttgtggttgggggcgcgcgtgcgagtgccagtgagagtgtgggtgcgcgctgtgggccgcggcgcgggtgggtggccgtgcgttcttgcgagccggcctgcaggaggcgaggctcccctggcctcccgcacccagcggcggaccgagcccctggagggaagttgccgcagccgcccgggccgccggccctcctgtcccgcgccaggtcagtgcgccccggggcccgcccagtgacacgtaggtggcctccggttacctgggtcggggtgggtgcgcgggagggcttgcgaggggccctcgaaattctcccaaaacctcgtcccgctggacttgcacctccgaggggtccctgcgcccctggggctccgcacctctcgcttcccactgacgactcggttgtcccccaccaccgggctgaggacttttaactaagtttctgtccagccgcctaacaaacgtgcttaacaagtaacaggaggttgtaaggcaagggagggacctggctttgaaagttgatggttttgaaatcgacggctcctttgacttgcgtaggactcctttgtggtgaatggatttaaagtttattcttgtttttctttgctgccatttggtctttgcaatgttaagagtgaaggcattcaggacttgctgctgcctgctgtctggggcctgaggttgtggctctccgcttctgctctcctctcttcatttttgttgaaatccgtggattttttcataaatgtgggtgctggcttgtttcactatggacgcgtcgtttcctatggggttagatagatattggtaaacataaatattgaaaatgtgatgatcacatattgatgatcacagcgaaatcctctattccttcaggctctaacagtttgtttttcacgtatttgcataagtgtgtttgctcagctaagcataattggtaagccagaggtctgtgattcagagtctgcagttctggttaaggggagactgtacacttggaaaatgcgaagttttttaagaagttattcccttgccggatagaagagtgggtcccaaggaaaaagggtgtattttagaggtatggttatttgaaccaaactaaacatcattaaaatacacagggaggtagaatgtcacctagttctttctgcccttgatttccatatcccagtaggagcgagtataattgccccaaatgcaaaattatgaataataatcagcattgtaagtatattaaggttgcatttttttcttgatacttgtctgatttgaggataaaaacaccaagtggcaagagaaggaggtagcttgaggcaggaaggcacgggcgaggagcgaggagggaaggctgggttgtcatcatccgagcccgcaaggtacaccacgtcccctagcggcgcgacctcagccagtcgggtcagctcagatcctggtctccgtctccccatccggaaaatggaaggggttggtgatcgttgctgttccttccagcttcccaaatagcgagaaaccggtgggaggttatcttattgtgttagagcagtaggaaaaggtaggagggggaagtgagaggtccagagggccaggaagatggaagaaaacaagcaacagaggatgcttggaggagaaaaattcttgagctgggagctcatttcctcttttttttttttttttcctttcctcaagggactcaataatacttcccccacctcagatcaatctcttgttacctttattatttaaagcttgtgagtttgcttagctaatgcactagggtgaggtcaaggtgatccttgcagtctgacttctactaggcatcacttgactcatttgcatcattgtctctcaagggaacagctcctgcccaggtctgtgggcactcagcatggatttcagtctccctgtgagtgatgggaaagaactaacagaggtaagaatgtaagtggcagccctttcgaaacttctatttttgttcaaacctaatattttccaaaaagtgatttgatttttttgttgtttcaaattataccgtaggctgcaaggttttactgaatctattccattagtgacctactggaacgttcaaagaataaaaatctcacttgctcagtgtttttgatacacagtgacattcagtctgaagtaagtgatatttagggccaagaatcatttcaaatgcttagtatggaaagttgcaatctgggcagaatacactgtatcattttcactgggaagctccaagtattcagcagataacagaactttcagaatttagtttgaggtcaagattttaatgtctgtgtttgatgtgtggcctgtcttccttttctttgatgttttggtatcaatatgcctacacccttgaggaacattatttattgtaaaagctgaactgtgatgtaataaaaacttaaacataagctcttggtttaaagtccaatagtcttctctggccttaagtcagcatcatactactgtttggtttcttatttttacatatcatgttaccctcttatttaaatatcccgggccaggtgtggtggcttatgcctgtaatctcaacactttgggaggctgaggcaggacgatcgcttgaagccaggagtttgagaccaacctgggcaacatagtgagactctgtctctataaaaaaaatagaaacattagctgggtatggtggcatgtgcgtgtagtctcagctacttgggaggcggaggagggaggatggcttcagcccaggattcaaggctgcagtgagctgtgattgtgccattgcactacagcctgggtgacagagagactctgtctcttaaaaaaaaaaatcttagggaaaactattatgga

SEQ ID NO: 12078 - DNA, 6000 bp, Homo sapiens
ataaatttcagattccccacctccctcatctttagaagcaacctcttgtcaggttttaatgtagaatcacagactattcacagtaatctgaaaaggcctacatctatctgtatggggccagattttcttcatatattttcaccaaatactccctcacagcaagttgaatgctgattgaatcaaatatgagaacccagctgcatgttattaagctagacattaaagagaattacaaaaataattctggtcttctcattcttttttttttttttttttttcattttttttttttagaaaagaggttttttattttggggccaggcacagtggcttatgcctgtaatcccagcactttgggaggcggaggcaaacggatcagttgaggtcaggagttcgagaccagcctggccaacatggtaaaaccctgtctctactaaaaatacaaaaattagctgagcgtggtagcgcacacctgtaatcccagctactcgagaagctgaggtagaaggattgcttgaacccgggaggcggagtttgcagtgaattgagattgtgccactgcactccagcctgggccgcagagtaagactccgtctcgaaaaaatatatacatatattattaattaattttagagacagggtcctgtgtcacgcaggctggagtgcagtggtgtgatcatagttcattgtaacctcaaactcctaggctcatgtgatcgtctcatcttagtctcccaagtagctggaattacaggcatgcactaccatgcctcactaatttttaaaattttttttgtggagatagagtctcaccattttgcccaggctgatcttgaactcctggcctctagctgtcctcctgcctcagtctcccaaagggctgggattacaggtgtgagccactggacccatcctgttttactttctgatccatatttgtagatataatcatactaaccgaaaaacttggggtctttaggaatttttaaaagtgtgaaaaggtcttcagaccaaaaggtggagaactgctgtgttagagatgaggcttgttgagtctctcatggacatggggatgtgaagatgagtgaaagcctgtctggttcttctcttcctttgcctattaagcttattccagacttagctggccagatgcttgtggttgtttaagatgtctgttagtccagggcagcttatgccaaagaactctgttgtatctgggtgtgttcatataaacagacctaacaaaaaacctactagggaagacaagaggagaaataatcactgagtgcatcatggctgcaactcatgtttatatatttaattcttatttttcatccttgctttccttgattggtggtttttatccctttggggaataatagacctatttgagaatctagtgagagatatagacttcccatgtctacataaagttttccatgtaatatcatggattcatggaccccagatttaataacctcttctttagattaatttaaatcatcttattacccttctacagtgatttggataggaacacaccagccgcatgatgtgagacttcccagaaggactcattcccagaagagatcctcccccttttttccgctcatttttttcttgctttctcttttctatcacttccactggaatggacctcaaagagcagttctgctctggtcctttttgttttcttttaaaaaaaaaaataggccaggcacggtggctctcacctgtaatcccagcacttcgggaagacgaggtaggtgggttgcttgaggccaggagatcgagaccatcctggctaacacggcgaaaccccatctctactaaaaatacaaaaaattagctggcgtggtggtgggtgcctgtagtgccagctactcgggaggctgaggcaggagaatggtgtgaaaccgggagacagcttgcagtgagctgagatcgcaccactgcactccagcctgggcgacagagcaagactccgtctcaaaaaaaaaaaaaaaaaaaaaaattagccagccgtgatggtgcacatctgtaaccccagctacttgggaggctcaagtgatctgcctgcctcggcctctcaaagtgctgggattacaggcatgagccaccgtgcccagccaatgtgtgttttttattaagctgatttaatacagtgattttaaatttctttaatcaccaaaactctcttgtcattacttttccttagcagattgcactctattcctgtaatgccatcaactgagtcgcagcttctgatgaacattatgaaataatccattaaccagtgataccactctcagttcatttaagctacatccaaaagcagaggtctctcatatcatccggctgagaagcagtcttgtcttggacacattgccaggcttttttaggcctttaaagtgttgggaatctagaacttcagggggcccacagccacccagagggcctggttagtggtccgtggtggcagaccctccctggacctgcctgggcctggttcttctgcctactggtgttaacatgcatgtgctttctgtgtgtcttgagacattgttgagaaccaactcttctcaactgatgactgcagtatttagggaaggtcagattctcttgctgagaaggttttgcctgctattaaccagcctttgtcatcaagcattgggaagtctgaccttcatccttgcctagctcgctgctgtgactgtgtgcagtggacaggaggggttgggggtaatgtgcgcctcagcccagctgcagggttgcgtcccaagtctcactggcatagctcacagcattgcggctgcaggctgcggctggcagagaaacaggagagactgacgggagctgagtctgagatcagcgtggccctttgcacaccaccttctcgggtgcctttggtgcattatggctctagaatcgaaggtaaataggagctggaaacctaacaggcttggcaacagaagtctttgtcagagctagctttcctggtattgtgtggtctttagtgctactctgaggagctgtttctgctgcttttgttgatgctttttatttatcatttaagatataatttcgtttacaataatatgcacagtccttaactgttcagtttgatgacttttcatatctcctgggtcattgcttcaaatgtatatttgaaatgtatttttttttttttttgagacagagtttcgctcttattgcccaggctggagtgcaatggtgcgatctcagctcactgcaacctctgcctcctgggttcaagcgattctcctgcctcagtctcctgagtagctgggattacaggcatgcaccaccacgcctggttaatttttgtatttttagtagagatgaggttttaccatgttggccaggctggtctcaaattcctgacctcaggtgatcggcgctcctcagccacccatagtgctgagattacaggtgtgagccaccatgcctggccagaaatgtattttcgattcattttcacatgactcaacattttgaagatcaaagaattttattctgtgtgtagttgttcttgaccactcgtagcctttcccatacttgctcctgatatggtctttgagtgggattagtgggatcttttcttagtggaggccagagggcagctcgtgaactaaaccctccccagaagggacatttcaggccagtgtggtctcaggtcagcccgtggcctgcgtcctttggtgcctttctggtgactgagagaagctgttcgccagactttcaggcctgtatctgaccacaaacgggggagctcctctgtcccccatgctgagtgagctggagcccaggacttaagcagattgtggaaatgccgagactcagcgtaagtcagaggtactcttaacgccagccaggctgtccatcgtctttatttctttaatttttgtgtttgactcaaaattccctctgaagcccagcagagaggaagcaggcaacaaggatgaagagtaggtgggggtgttttaggctctgaggctgtccttacactcagggaaggattgttttagaaatttttcacgctttaagtggctgttgtgggcctttgcttctgtgtgccgcataaatcatgtggtgtaaactccttagaaaggattactgcctgctcttgggcatcacccagccttttgagtcatgattgcatcgtcctgaactaatcgtcctgacctgtgtcgtcctaaagtcactagtggactttaaggttatgaactgcctttcccttagcatgaagcgtaggtgttaagagcttggtccttggagggaggtggacttgggtttgcgtattggcttctccacttacaagctgggtaactttggtcatttactaaacttctccaggcctgagtgtgtcaggcctgcttcccccacagaggccatcgtgagatgaagcatgagaggtgcccagcccagcttctggcacatggtgatgactcagttgatggcaacgaccagtgctgttgtttttgtccttgttacagttccaggatcctcttgggaagtcagctgggaaggaggggataatctgtctccttgctggccttcttagttcctctttcactcagagaggacaggggaccacctagggcaggggcagcacctcctgtgcactgtggggggcgttgctcttctgctgagtcatggagagtattgacttgggcatttgcaggggctgtggtatttcctgcctcagtgggcacttgtcctgttctcatcagtaagaaggacttaccagaatcgagtgtcatggttattttcctcagagtgagttggaggtagaggagcccacaggacaggaggtcagccttacaggacccccaagaccaggtggacatgacaccctccccaacccccgtctcctccttttctctcccctgcagaggtttcagcatcttcatagccgggcctgattccctaagatgggcaggggcaggggcagcctgggcatctatacttaaagctcttccgatgattctgttgctcacccccattaagaaccattgctataaaggaattctcctccacatgaggaggtcgatgcctggagacagaggcagcaggccaagggcaggcacacccagctgagatggggcagggctggaaggcaggcctcctggatcctgcctggggccttgtctctctccccacactcattctttcaccgtatttgctgctcctcatggtgaggtcagaaatagcccgcccagccttggtgagccttcgctcccacaggagcccaacacccagcccgccacagtccggtgagcagcaggctgtcggtgttcctaagtcagggaaatctttggaagaacaatggagggagtcgtgggaccccaggctgcgacctgctgcctggctgctcactgcatcatgctggtttcaccctgctcagagcgggctccacccctgctcggcatcctgactcatcctatgcatatggcagcgctgcttgcaggagagcccaggcgccctggcagcccccaggtccccatttgttccagttttactcactggattcttgccagaggtggcagccgctgtgacacagtatatgctacatttggtattgggctaatcctatatgacactaacactgtcatggcaagtagccaactgctcactgcgagccagctgctttctgtgtactatcccattaattccccagcaaccctaagggcgggcatcgttacttctgccttaacaggtgaagaaaccgaggctcagagagggttagctgacttatcggaggccacacagccagtgagcagcagagttggaatttgaacccaggatgttcagtcgtgcagggcccagacttttaacccccctgctctcctttttcttactccacgagtaagctcagtccctgcctctgctgcttcagctgtgactggagctccagtgtagggcttgagagcctcacccccgccaactgctgtctgataaaggaatgtcttatgcgtg

SEQ ID NO: 12079 - DNA, 6000 bp, Homo sapiens
ctgctgaccctggggcgggaatcgcctgtgcaagccaactccagctcatggggctcactggggctgtgctgctcccacattttttcctggtgattggaggagagaccgcccagcggacttgattccagatagatggatgtgcctctgagtggtcctcatctgcattagaggtggcctcttgactgagaaggtatctgaatgaggcttacttttaaaaatgagaagttaacgagctcttcattttgttctttcttctctctagctgctattaacttagcaaagctgaaacttttcagacattattacgtcttggtaagtaaaaaaaaaaaaaatcctcaatctataaataaaatcaattcaaggagtagagcaaatgaacttccaaaggattggtgaaagcacaagatgtgccacctggagctgagcagtgtggcttgctttttttttttttttttttttttctggagacgacgtctagctctgtcacccaggctggagtgcagtggcacgatcttcgctcactgcaatctccacttcccgggttcaagctttccgagtagctgggattacaggcacctgccattacacccagctaatttttgtatttttagtagagacagggtttcgcaaagttggccaggctagtctcaaactcctgacctcaggtgatccacccgcctcggcctcccagagtgcggggattacagcgtgagtcactgcgcctggccagtgtggcttgcttttttgctttttttttttttttaagactgggtctctctatgctaccttaagatggactccaactcctgggttcagagctcaaaagatcctcccgcctcagtcacctgagtagctgggactgcaggtgtaggccaccatgcctggctttcattttataaaatctagctgtgtctttcaaaatgggaaattaaatatctgagttccttttttttttttttttttttttgagacggagtctcgctctgtcgcccaggctggagtgcagtagtgcgatcccggccactatttttactcatttagaaaaatgggatcacactgtcatgttcttctgcagccatttttgttttattcatttaaaaaattattggagtatcagctgggtgcggtggctcatgcctataatcccagcactttgggagaccgaggcgggcagatcacgaggtcaggagatcgagaccatcctgtccaacatggtgaaaccccatctctactaaaaataaaaaataaaaaaattagctgggcatggtggcgtgtgcttgtagtcccagctacttggcaggctgaggcaggagaatcgcttgaacccaggaggctgaggttgcagtaagccgagatagagtgccactgcactccagcctgggcgacagagcgagactctgtctcaaaaaaaaaaaaaaaattggagtatctacctctctcttctttcaaatttccctgcagaaaactagttacatgttgtggtaataaattttccttaagaacagaaaagttaagacagtttttttaaaacctaaaacaggactctgatggacatgaaaagttctatcagctagcaccaaaagacagagcttgctagaaattattaggatcataatttcttggaatatataaggtataggcctcccagagttagtttgcttcctgagtcttgaaagaacgtttccaagtcttttttttttttttttttttgagacggagtttcgctcttgtctcccaggctggagtgcaatggcgtgatctcggctcactgcaacctccgcctcttgggttcaagcgattctcttgcctcagcctcccgagtagctgggattacagtcatgcgccaccatgccacgcctggctaattttgtatttttagtagagacgggttttctccgtgttggtcaggctggtctcgaactcctgacctcaggtgatccacccacctcggcctcccaaagtgctgggattataggcgtgagccatcgcgcccggccctgtttccaagtctttcatctgttcgtttggcattgtcacttcagacagttcctttgctcaagcaaacatcagacttcagtggtagagagagatgcaagagcagacactccacttggggttgattttttttttctttctttgttttattttttctttcccatggattttatgtcatccaccaaataggcacaggtcatcacagaacctctcttgttgcatgcagtgataatgagtggtccttgaccagcaggccagctgagcttagtccccttgcacaggccatgctctagtggccagcacattgagtctttgtcactgcaaggagaaatgaaggcatcctgtcttgctagagaacttggtagtatttgtacttctgtgagtgtggacctcgaatgcttgcagcatctgccagagaagaggacagaagtcagtaatttccctgtgtggctttattttgctattactactggtaaatattcctcaaagcctgagcataagaaataaaatctttggagattgaaatcaagggcttatgtctgtggatagggtgaggaagggttaagaacaacctgactaaagtgtcttgtgctcccggtgggtgtggctgttagcaatatcttggtcacctggagagagagaagaaattcaagtgtaactagcagagtagccatgtctctccgctgcacgtattaattcacactgtaagtgtcacatacttttctttgagtgattctgttttctgtttcctagttcatttgtgaaagcaaattgttaaagtggtgtcctaattttaatgttgatctgatttcctgtttctttcctcctcatgcagattgtgtgttacatatacttcactaggatcattgcatttctcctcaaactcgctgttccattccagtggaagtggctctaccaggtacgctgctcacagggcagaatgccagagaatttatgcctgaggataaagtcttgaagtgtaacttaacagttgttactaatttatctgggaatgaccactaagaccttccatctcttcttttttttaactaaaaattttttttttagtttttgagacagggtctcactctgtcacccaggctggagtgcagtggcgcaatctcagctcactgcaacctccacctcccgggttcaagcgattctcctgcctcagcctcctgagtagctgggattatagggatgcaccaccatgcccagttaatttttgtttttttagtagagatggggctttgcagtgttggccaggctggtctcaaacacctgatctcaagtgatccgcccaccttggcctcccagtgttctgggattacaggtgtgagccaccacacttggcctccttccatctcttctggcctataattgagatgatctgtttgtccagaaatgctgctggattctatgaggaatctgaaaataattgcattcttgattttagttttcagtcttaaaagtcaagagaaaagcttcaggtagagaaagatttgccctgaatcattagaacttagatgagatgtggtcctttcctttagttacagggctgagtagttagaattcaggctgcccttcttctttgcccattttattatttcgataataagtatctttgcgacaaactagaactagcttaactactagaggaagccaccaaatgacttttttcttgaataactcactgggtgctgtaggcactgtgggaggaagtgggtatgtggtgagctcttaaaagctacccatgaagactggtgaaagcacagcagagcacagcctcggaaatgtcagccctgggcaggacactcctcgtttaggcctcggcaagtctaaggaaaatgccctgtagcaggaagtggcatctgagtaaagaaccatcgagtggtgggttgtggggaaatatgtcagtttgttgaattccactgctttctgaagaacagtgttgctaatctctttattttggggtggtttttaaacttgcagctcctggatgaaacggccacactggtcttctttgttctaacggggtataaattccgtccggcttcagataacccctacctacaactttctcaggaagaagaagacttggaaatggagtccgtgtaagaaatctttcttccctcttccttagccctgacccctttgcctaacacaaagcagcacagtgtgaatcgggtcggctgctctcagcatttcgtggctgcaggggtggttcctctatttttagcagaaggaagcggacactggagccccaggctgtctgatctggtttgaagtacagtatctgccaaacctagctgggtcttgtcagggaagatggaacttgccgttccactaagcatcattggagcctgctttcaagaactcagtggcaagaacttaggaatatacgtggccagttcacgagggagaacagggggccgactttctgtcaggcccgccatcaggcgcttacgtctgaaaatggaatcttctgagtcatctctaagtctgctaatgatcctcagacatcctctatcgtcagataactgcgtggcttttcacagcacaatgactttgacctatatctgagcactaataggggcttttctgagtcacacagtgaatgactctagggtcctattttctgggaaagggccatcattgtctagaaaaatgagtagtgattaagcatatttgcttgttaactgaaatttgataagccaggtcaatgctgtgtttgatgattagcctaaggcagagttttcccttcttggttcactggtatcaagtgttctgcccccagccctggcagcctttgaattcttcccaattcagaggctgagactcggcccatgctaagctctgcttggctgtcagcgggtcaggcagcatgggacagctctctctgctcagctccacggcaacagtaaaggaaggcaggtcctgccagcgggcgccaaacagcatctccccatgcagaggaagaaacacctccttctaaacagtggagaggagtgcaggaggcccatcagctgtgcctttcccagaagtggcaggatctgagcaagtgtctgttggttgaagaggcacacatgtcaggctggcaaccagcagcatcaggaaataacctaagacgcggtgtgtttatcattcccctgctgggagcctttggcttggtccgtccgcataacacggggttctttgggtaggcagctagaagccgagcggccgggtcgcagcatcgtctcctttactgcattgtactccacagtcgtaatgggaggttcccgcttcccacatcctttccctcagccgttacatcttggagcctggatgcattatgaaggtatttttgtttcgtggcaacaatttttttaaaattttgttttggtgcttctttgacaacgcggcccacgcagctgccctctgtgcagccattaccccaccaggcctgacacagcttctctctctgggcctgggtatgagggcacagtccaaagtaacactgactttctctctctttccccttctgtttctttgaccatctctctttaggcctaccagttttggcaacagaagttaccggtcaataatcagcaagttaaaaagtatcggatgcgatttcaattatcagacttggtagctgcctcctaggctgtgggtatcctcaatgatctgaattacttctgtcatcttgaggagtgagagtggaaggaaatgtttggtgtgggttcctgggccaggaggttttctccctggggttcccattccagaacgctgtcctcattcatggttgctgttcacctttcaccactccctgcattatttcatgtgggcgaggaacgtgtgtggaaatggggattggggactaatagacttgtctcttcaccaggtctccccacacttccagaccagaaaacactttttagttatagaaatggatatatcggctgggtgcagtggctcatgcctataatcccagcactttaggaggccgaggcaggcagatca

SEQ ID NO: 12080 - DNA, 6000 bp, Homo sapiens
acttatagcatctatgggatctggccacataccttgtcccaactttgccataagtacaaataacctgtgagtctaaaggactcgtttgagaaaggttccggcttgggggattctttgagcctgggcatggtagcaccataatggcaagaatgaagagatgaagaagagggggaagttttcttcccttaccccatacaaacatttacttaccatgaggtccagctgcatgcactctagatgggtcacatatacggccactgtgttgccatttgtaggggaaggggttaggtagttggcagagggatgggttgggtccttggaaagagcctgttgagttgattgattgaatttattttactgatgaggaaatttcttttggtccaccatgggggagcataaatcctcattgtttcctcgcttgcagggaagatgctgggccaagcggcttttgacacccagtatctctgcctagttctgctactcacagagccacccagttccctcatagaccagctcaccttctgtgaggcaagagattatcctcttgagaaggtggggcccgtgcatgtgattccttctaatggaaagggctgccttgctcagctcctcatgccctgcgagaccagcgatcttccatttttaatccttgatttcaacgaatggctccatggggcctcctcagagccaggcaccaacagacagagccccgggagctcacagagtggaggcagaggccatgcgctgaggcacagccacatggcccagccccagctagcagaaagcagccagttctctgtctatagtggccaaagaatctttgatcctggaaggttcctctaaacctgtggttctgtcccctggctcagaaatgatccattgtggctgcttattaaaaatgtctggttggctaattagctttcttttctgaatgtccattaagagtcagatttcagtctcataagcgtaactatcacatatctgtgcgccacaaaaattccgcaagctgtgacaaaaagattcatgatgattgtgataacgatagctggtgtttattgattaggcactctggagaatctcatttttcctcatgacagttctggaaagtgagaattacttaagcacagagagttcaagtgacttggccaaggttacacagctagtaaggaacgaaccaggaatcacacttagattttgtctgtttcaaaaaccaacacccatcatcagtcctaatcaccgtgctgtggcagagatggccttttactaagagactgtgagatgttcctaattgttttttctttccttgttcagtgtgacaacatctggggtgatggaaagtatgaagaaagtcaagaaggtgaccaacggctccgtggagccccagggcgagtgggaaggcgccgtgtgacagagccgaccctgaggatggcactgtccaaggaaactgttaacttattcatagtcctattggacagcaggagcagctcctacagtgaactattggcaccaccgacagtgacaccagggcacatggctggagcacagtgccgcggaaacctgattttgtactctcttttatggaaacgatctgtggctgtttagaggcagctggatcctctttcaggcgggaatgggagggcgggcacagggaggaggagaggaagagaaaaggaagaattcatttttaatttaggtttctttttttcttcttcatttcggagctctaaggtgtatgcagttgtgaccccatgtgtggggaagtgtagcaaggacggctggtggagggggaaggagggtgcgaggtgtctgtctgatgctttaggaaatgtctactgaggaccctgggacttaagaagaagggcggggagagtgccattgcctgtttgggagacaaaaatgaacgaaaacaggtgactttggaaagcaaagtcaaaacccagtttaggatgtagcacctgccccaggattcctgccctcggctttgccccagacccttattccagatgctgagagtgaccaggacagcagctcctgaggcccagtggtcttctttccaacaggaaaagaaggctgtgatgtcgctgtcaggatcatgccctgtggcacagcacaggtggtgggaggtggttttctgactgagatgttgcctgatggatggaaagaaatgtatttttaagttcaaaaagcattatcctgtggcgttgcctggacatccactccctgacagcccagagcagcactgtctggcttcccttcatgcttgtggctttgttgtgtttgatcagaattttgggggaaatggaaagttttcctcaaggagcagctgggggcagaataggtagtatttaagcaaatacttaagtccaagcaaatcatccccattaaaaagcttttcctgtaggctagtaggatttctaaatagatgaattcaacagacttggtccccatagtccaagagtatgtatgtgaagaaagtgagcatgattcaacagtttcactctcagggattttaggatggcaaaatacttcacagaaactcaatgattaagttcccttccacacttccagagcttgaatgaacacaggtagccacctaaattgagcagtattgcaactcagagagaaaatcatctgaatagtaggacaagctcagaaggtacattgtgactgagggcttaaaaggagaccaaaacatggccccatcagggaagcttcttaatgcttggggggccagctaggtagggttgcttccaaaagctggagcccacccctgcctaggggttgtcagagagccacacctgcaggggaacaggtacctccgagggtgagagtcgtggtctctgggagttgttttctcacctctggcttagaagggtcaggcagaaaccacaggatgtggggtcacactcactgtcccaagtttgggaacctgaaaaagtctccattcagaacatggttgttctccctgtcccatgctatcttatcttcctaaatgactaatgaggaagcgggtgttctttttctgcactttgattcgccatctgggttctgtagggtgctctgaaggtgtgatctgccttctggctgatgtggaggaagagcaagcgccttcccaggccacagctgctcacctctcggcagatattttaggcaagcatccgtgtgtcttcccatcttcaggagaaaggtaaatgcaccctaagtgttcacttctggacctttttcaagttcacttgggactgtgtgacagaagggagttggagggaggatgggaatatttttaacactttgttttcctgtgcagaaacataataccagttttcgcagaaatgtgtctcaatctgtgactaccaaagccctcctcagtccttccctcagagggacacatttgctgtttctcccgcaagcagatgttgtggatgaggcgatagactccttggcaagaacgaaaggtgtgatgaaacctccctgctcggaagggtctccgtggaggtgtcctcatttcacatgctgggttttgcaagcgaggaagccaggcagtggaggaactagagagaggcaggcgtgtgtgtggacaagcgctggagccgcagccctcagactggcacgggaacgccagcgttgggtgttcagattccacgcgtatgtctgggctcactcacagcatggccgagtgtctgcagtgctggtcctgacccttccagagcagcagtggacagatgagataagactgtttcagaaacaaagatggccacagccttcctaacaagcaggtcatctggccatgtctgtattgtaactggtaaaaggcttcaagtcagattgatgatcaagaaaagtcaaaaccccagcccaagattgggaaagcaggtggtggttccaagcttttaaaaaattattgaagctctccatcctgttctgtgagtgtgtcttctctttctccttcacgtcatagccgtgacccaccgttcatctctgctcttgcgtaaagatgaccgatggagtccaaagccaagtggcttcaccagctgacaagccaccctcctgcagcctgagtttcacagtccactgggttcgttgtcatgcggtgtttgaatggttaagcccttgcagtatttcagatcgggcaaaaaatatcggatgcacatagcagaaccattggtggtatttatagctttgctttgtactcctcactgtttctgcctacgcaaaatatccatgtttcctctgagaaatctgttgtggactgaaagcgctgctggctgtgaaatttaataaagtgtgtatgctttgctagaaaattatttcttggacaataggaacagtcattgatctgtaaatcctggctcttaacagtgagtggccaaggacttgatcagcccatttcttggtccctcagtgctttaaaatttaagtagcactgcattttgtaatgttgaatatgactctagtgacttgtaggaggcacttgtgaggagatgcttgcttcagtgtaaaagatgctcatggcctgagtcagttgagttttctttcaagaaaccacttcagagtgaaatatccagggtttccccgccctggacatgtccagcctgcccaggcagcacacagccctgtaagtccacctcgtgtgggtgagatttcctcctgcgtgatgacctcatcgccatctctgctgtctcattccacagcctccctccctcttctctcctcctctgccctcgcccttcccccttccccatcccctccccctcctcctctgccctcgcccttacccctcccccttccccttccgctcctcctccctcctccacctctttctcctcctccttccctcctcctccctcctcttcccttctctgccatctttctccccgtgcctattgatcccacataggctcattctgggtacaccggctaaaggctttggtgcattgcagcgttttctcccagcagctgtgtgaaagatgcattttctaagctaaggagaattttctcaagagtggcatactcatgccaaatattattgctctgggccatataggctggtcttcctccacactaaaatgggtgtcttgttttggtacttaaaacagtctactccaggcatccagtccttacagaccaaggaagagcatagcgatgcctgttggaattgcagatgcattctggccttctcccccgtcctgaaacattttctttgaggaaggctcttagaacattagatagtctgctgaggttgttggcccagctccatacacccagtagaacagtggaacaactcatgcttcatgctgccaagctgctgtacttcaaaggaaacagatctagcacactgctgcacccctgcttccacactccacacttcaccccgctgcttttctctgacccgcccctggccttgtaagactcacgtaagctaagtccaggatgcctgtggcctgcggcttgattcttccctttaggattcagcaagttaatggcttcctcgctatagaagtgagactttgacttgatgcctcttggtatatcaaaaagatattcatccagaaagtaccaaatgttctgaaagacccgctcttcactccagttttccctagggtgtttctggcagggcgtttttaaaaggcatctacctgagttgacgctaatacttgtcaccacctggaacgtagttatcggtcggcaggctgaacatactccagattccccagaggccacttctgtagcccagcgatgcatctgagcctctctgcgtggtttatgcttgaaaaatagataatgcttttagatggttcactgccaggccatgggccccacacatctcaggccctgtgtgagggagcacactgagatggtgcaggagtgaatgggcatggcttggcctcgctacctcggggacctgttggagttctggcagcagggtgtctgcaggtgggacggcgttctgggcagagtcagaatggtcagaatgaaacagaacagccaactcacccacaggacagc

SEQ ID NO: 12081 - DNA, 6000 bp, Homo sapiens
aaattagctgggcgtggtggcaggcacctgtaatcccagctactcgggaggctgaagcaggagaatctcttgaaatcggaaggcggaggttgcagtgtgctgagatcacgccactgcactcgagcctgggcgatgagagtgaaactccgtctcaaaaaagaaaaaaaaaaaaaaaacgcatgaatccgtggaccacttaggcccaagccacatttgattgcagtcttgtgtggcagaaggaacctgtgtcccatttggcacttttggttgcaaacacagagacttggggctttgcaaggaaagggggttactgtttagatgtcaaggaaagaacgcttatctgcggcggtcggatgttggcccttcagctgttcggtcccttaagtgtttgcaccaaaactaggacacctagtgaggtggctgcgaagctgctgaagccccaccgccgtatgttcctgccagggaggcttttgggtgttcatctgacccaggtctctcttctcactgctgcagagcctgagcttccaggaccgttgcgggcgccctgtctgcagggggctagccaggtttcctcacatcgtgggggccccaggtgtcccttcagcttcccagaggtttgctgggggaacaggatgtagcgcctaccccaccctgggcatctgccatcaggtttcttcctctccttgagttcacttctgccactcccagtcctggccacacactgaagctccctgtcacccgccctgcctgtgacaacctcctgcgctaccacacacccttactcccgttctccctcttcgcactcccaggactcacccaagcccagggttgcccctgctaccccctcactgcccccggcccctcctgaatgccaggtccccctgtcctcctgctccgcgtcacctcagccttgaagccacagtcttcctgcatcacaccaagctcgcccctccccattgttccctataggccttggtgacacggacatccacccagtctcctgcagccatggctgaaccacgtccctcttcctcagcccgtgcagagcgtcctgtaggccttactttgtgcctctcacccccagccccaccccgcctcttgctctcgtgcctgggctttgtggtggctgacctcttcactcccgatcctctccccttcctgtccatccttctattcccctgcagacagggtctcactctgtcacccaggctggagtgcagtggcactatcacagctcactgcaggcttgagctccccgggctcaggcaatcctttcacctcagcctccttaatagctgggaccacagatgaatgccaccatgcccagctaatgtttttgtatttttttgtagagatagggttttgccatgttgcccaggctggtctcaaattgctgggcttaagcagtcctcccgcctcagccgcccaaagtgctgggaatgcaggcgtgagctgccctgggaatacaggtgtgcccagcccttcctgtccattctcccgggctctagaatcacctgtagagtgtttttgcagtgccagtttcctggccgcacccctggagactctgattctcaccccttgggctcaggatctgtgcttttctcactccccagggcagcctgagcaggaggcagggctgagaactgccagagtaggaatcaaggccatccttgggtgaccaggcagactgggccctcgacaaccctgccgtcctgtgtccaccctggttctctccctgccactctccttcccagactggctggatgtattaaaatatatttgccgtaggccaggtgcagtggctcacgcctgtaatcccagcactttgggaggccgaggcaggtggatcacctgaggtcaggagtttgagaccagtctcgccaacatggtgaaaccacatctctaccaaaaatacaaaagttagctgggcatggggacatgtacctataatccaggtacttgggaggttgaggcacgagaatcacttgaacccaggagacggaggttgcagtgagtcgagatggcgccactgcactccagcctgggtgacagagcgagacttcatctcaaaaaatcaaataaaaaaaaaatatatatatatttttatatatttatatatatatacacatatacaatccacacactgcaagtacttagcactccctcactgccctgggaaatgtcctgggtttttccttcatgctttttgcctgttatatttcttctttttggaaactcccctgacctcccacccatcttgtgggccagatcctctgcatctcatgacgggcttcctggcttccccgattccccggcagagggattcttctcagcccgagccatcaccgaacccggttcccagcactcctgtctctgttggaagtggctttgcagggttgctgtggaagaccatctcttctcctgggctgtgggctccgaagagcaataagaccacttctttttccttgatgacctagcatgaggcctgtcttgaagaataaaagttgttttctcacttggcccaccatgtggaaaggagtattttcttagagaaagaaagggagaaaatgtttttcccaagtctgccgtcaggcccatatccgggtcacagtgaatgcgctttgcctcttagaatcaacgtgcattgaactctttgtccttttttaacaagatgcagtaaccataggacagctgtgtgattactggagtgtttctggaagacgtggggtcgcatttctttgtggtctcagtcactgtggagaggcacgggggctgctacgtggctcggggcaggggcttctctggctcatgcaaaggccctacctcctgcatccccgtctagagaaggtcccttcaggagcagccctgtgcacatggatccctcctggggcaagtgtcttcctaaagaggccaggcctgagacacaagccagctggccagaagtgacgctgggcggcttcagctgaggcattttcgtcttaggggatgcttttagagtcacttatagcatctatgggatctggccacataccttgtcccaactttgccataagtacaaataacctgtgagtctaaaggactcgtttgagaaaggttccggcttgggggattctttgagcctgggcatggtagcaccataatggcaagaatgaagagatgaagaagagggggaagttttcttcccttaccccatacaaacatttacttaccatgaggtccagctgcatgcactctagatgggtcacatatacggccactgtgttgccatttgtaggggaaggggttaggtagttggcagagggatgggttgggtccttggaaagagcctgttgagttgattgattgaatttattttactgatgaggaaatttcttttggtccaccatgggggagcataaatcctcattgtttcctcgcttgcagggaagatgctgggccaagcggcttttgacacccagtatctctgcctagttctgctactcacagagccacccagttccctcatagaccagctcaccttctgtgaggcaagagattatcctcttgagaaggtggggcccgtgcatgtgattccttctaatggaaagggctgccttgctcagctcctcatgccctgcgagaccagcgatcttccatttttaatccttgatttcaacgaatggctccatggggcctcctcagagccaggcaccaacagacagagccccgggagctcacagagtggaggcagaggccatgcgctgaggcacagccacatggcccagccccagctagcagaaagcagccagttctctgtctatagtggccaaagaatctttgatcctggaaggttcctctaaacctgtggttctgtcccctggctcagaaatgatccattgtggctgcttattaaaaatgtctggttggctaattagctttcttttctgaatgtccattaagagtcagatttcagtctcataagcgtaactatcacatatctgtgcgccacaaaaattccgcaagctgtgacaaaaagattcatgatgattgtgataacgatagctggtgtttattgattaggcactctggagaatctcatttttcctcatgacagttctggaaagtgagaattacttaagcacagagagttcaagtgacttggccaaggttacacagctagtaaggaacgaaccaggaatcacacttagattttgtctgtttcaaaaaccaacacccatcatcagtcctaatcaccgtgctgtggcagagatggccttttactaagagactgtgagatgttcctaattgttttttctttccttgttcagtgtgacaacatctggggtgatggaaagtatgaagaaagtcaagaaggtgaccaacggctccgtggagccccagggcgagtgggaaggcgccgtgtgacagagccgaccctgaggatggcactgtccaaggaaactgttaacttattcatagtcctattggacagcaggagcagctcctacagtgaactattggcaccaccgacagtgacaccagggcacatggctggagcacagtgccgcggaaacctgattttgtactctcttttatggaaacgatctgtggctgtttagaggcagctggatcctctttcaggcgggaatgggagggcgggcacagggaggaggagaggaagagaaaaggaagaattcatttttaatttaggtttctttttttcttcttcatttcggagctctaaggtgtatgcagttgtgaccccatgtgtggggaagtgtagcaaggacggctggtggagggggaaggagggtgcgaggtgtctgtctgatgctttaggaaatgtctactgaggaccctgggacttaagaagaagggcggggagagtgccattgcctgtttgggagacaaaaatgaacgaaaacaggtgactttggaaagcaaagtcaaaacccagtttaggatgtagcacctgccccaggattcctgccctcggctttgccccagacccttattccagatgctgagagtgaccaggacagcagctcctgaggcccagtggtcttctttccaacaggaaaagaaggctgtgatgtcgctgtcaggatcatgccctgtggcacagcacaggtggtgggaggtggttttctgactgagatgttgcctgatggatggaaagaaatgtatttttaagttcaaaaagcattatcctgtggcgttgcctggacatccactccctgacagcccagagcagcactgtctggcttcccttcatgcttgtggctttgttgtgtttgatcagaattttgggggaaatggaaagttttcctcaaggagcagctgggggcagaataggtagtatttaagcaaatacttaagtccaagcaaatcatccccattaaaaagcttttcctgtaggctagtaggatttctaaatagatgaattcaacagacttggtccccatagtccaagagtatgtatgtgaagaaagtgagcatgattcaacagtttcactctcagggattttaggatggcaaaatacttcacagaaactcaatgattaagttcccttccacacttccagagcttgaatgaacacaggtagccacctaaattgagcagtattgcaactcagagagaaaatcatctgaatagtaggacaagctcagaaggtacattgtgactgagggcttaaaaggagaccaaaacatggccccatcagggaagcttcttaatgcttggggggccagctaggtagggttgcttccaaaagctggagcccacccctgcctaggggttgtcagagagccacacctgcaggggaacaggtacctccgagggtgagagtcgtggtctctgggagttgttttctcacctctggcttagaagggtcaggcagaaaccacaggatgtggggtcacactcactgtcccaagtttgggaacctgaaaaagtctccattcagaacatggttgttctccctgtcccatgctatcttatcttcctaaatgactaatgag

SEQ ID NO: 12082 - DNA, 6000 bp, Homo sapiens
tacataaagaactcaaaactcatgagaaaacaactcagttaaaaaaaatggacaaaagatttgaacagaaatttccccaaagaagatatatggatggaaaataaatcaatgaaaagatgttcagcatcaatagtaattgcaaattaaaaccagaagttgatatcagtacatactgattagaatgtctaaattaaaaagactgatcttacaacgtgttgaagaggatgtagaacaattggaactctcaaagctgacaagagtgaaaaaaatggtacactccctttagaaaactattaggtagttttttagaactatatacacctaatccagccatcctgttttaggaatttacccaagacaaatgaaagcattatgtccataagatttgtacatgggtattcacagcagctttatctgtgatagtttcacacgggaaataacctaaatgtccattaatataggtgaatggataaacattgtggtatattcattcagtagaataccactcagtaataaaagggaatgaactgttgatacaagcaacaacatggatttatcacaaaataattatgatgagtaaagaagccagagaaaaaagaatacatactgtatgagtctacttattatataaattctagaaacttatctataatgataggaagctgataacttgttgcctgaggaggagaaataatgagggaggaacaagaaaattttgatgttgatggatatgtttctttctttttttttttgagatggaattttgctcttgttgcccaggctggagtgcaatggtgcgatctcggctcaccgcaacctccgcctaccgggttcaagcgattctcctgcctcagactcctgagtagctgggattacaggcatgcgccaccgcacccagctaattttgtatatttagtagagatgggatttctccatgttgatcaggctggtctcaaactcccaacctcaggtgttgcaccctcctcggccttccaaagtgctgggattacaggcgtgagccaccgtgcccggcctggatatgtttcactatcttgattgtggtaatggttttattggttgttgtttcttatgctctatctggtatttttagatataaaagatttaatgattcctgagcttacttattttacatggtatttatggaaagtttaattcttataaagcacaagagttctaactggattgttgagaaactgctttaatgatatttattactgttaccttaatttttctgatcttggatcttgactgatgatgcactcaatttatttaaatgtggagtttagctctaagactcctgtaacttaaaagagaatgatattttgaatgatctgaatattgttcattaagtacattttgctcaaaggaaaataccgtagtccacctctgacagtttagtattattatttttttgagatggagtcttgctctgttgtccaggctggagtgcagtggcacgatcctggctcactgcaaacctctgccccccaggttcaagcgattctcctgcctcagcctcccgagtagctgggattacaggtgcccaccaccacacctggctaatttttgtatttttagtagagacagggtttcaccatgttagccaggctggtgtcaaattcctgacctcaagtgatccacccgcctcggcctcccaaagtgcagggattacaggtgtgagccaccaggcccggccttttttttttttttctttctcttttttttttttgagacagagtctcactctgtcttccaggctggagtgcagtggcgcaatttgggctcactgaaacctccgccttccggggtcgagcgattctcatgccccagcctcccgagtagctgggactgacaggcgcacaccaccacgcctggctaatgtttattttcatttttatttattttttgagatggagtttctctctttcacccaggctgaggtgaagtggagcaatctccgctcactgcagcttctgccccctgggttcaagcgattctcctgcctcagcctcccgggtagctgggattataggcgccccccaccaggctcagctaaatttttgtatttttgtagagatggggttttgccgtggtggctaggctgttctcgagctcctgacctcaggtgatccacccacctccacctcccatagtgctaagattacaggtgtgagccaccatgcccagcctaatatttatatttttagtagagacagggtttcaccaggttgggcacactggtcgcgaacttaagacctcaggtgatccacttgccttggccccccaaagtgctaggattacaggcatgagccatcgcgcccggccccagtttaattatccttaatagaatatgagaagattatagttgtattacagatgaattgatgctgttaacttgtacttttgcttttaccaactgacaagatgataaaagcaggcttcttctcagaatggcaatttgattataaatctagctgggaagtgtgctagttgatgattgttaactcaaggatatattaatttttgtcaggataaagtattttattttattggtatctttcccctccctcttctagaaaatacagtagcagccatgatagaagacaaaggaccaagagtgacagactactttgtcgtagctggtctcactgacacatctactcttttggatcaagaaataaatcgtttagatactaagtcaactggacctaaagctccaattacagacattgccattattatcaaatcagctggagaaacagtacctgaaggttacacctgtgtagaagccactccatcagctctccaagcaaacttgaactatggaagtctgaaaagcccagaacttttcctctgttataagagagggagagataaaccaccgcttacagatattgggtatggtgacttcttttctttgctatagtgaaggagtaaaatttatttaagggccatggaagtaggaatttgaaatccttgatagttttattattactgatagtttattattattgatagttttatggttacttcaggattcattatagtaatatattacatgccagtatccacccttactgaatttctttgcattgccttgaattgttagatcatttgctttcaaaagaatattgaaatgaagacatttgaccctaaagtgtcattttgtttctgttgtacttatcaaataagattattaattaaacacaatagaatgagaagctataataaagacactatcattttaaggagttgcttgggttatgtaatgagtttttgtgaagacctgtacttgtttaactaaagagcagtcctattttaaatacagttgtaacgtgtggctttcaatgctgggaggagggtgtttacagataagtgctacagttttcatgaagtatctagtatctagtctaccagtgaaggacattcttttttgtaaatgcctacaaaggtccaccctttccccaaatggctaccttgactcttctgtaaaaaggatgtgcttttagaatacctataacactttaccatatatacatgtgatgtattggggtgttttgtttattatcattaccattactaaaatatagatatttgggaacatcctggcaagtattttaggatcagcttatctatttatacaaaatgtgtagtaggaattttgatagagattacattaactttagattaatctgcagagtattgtcatctttacaatattaaacgattcagcttgtgaacgtggaatgttttccattggtttaggtcttctttaatttctttcagcaacattgtgtattttttaaatctgattaattttatttctaggtattttattcttttggattctattataaatagtgttgttttcttaatttttggattgtttgttgctggtgtatagaaatagctgatttttgtgtgctaatcttgcactctgcaactttgccgaatttattagttctaataacttgtgggttcttcgggatttttttaaatatataggatcatgtcatctgcaaatagaaatagttttactccttcctttgcagtttggatgctttgtgtgtgtgtgtgtgtgtgtaattactctggctagaacttttagtatgttgaatagcagtggtgaaagcaggcatcttgtctcattcctgattttaggtggaaagctttcagtcttttactattgagtatgatgttaactgtaaatattccttaaataccatttatcatgttgaggaaatgttcttctattcctagttttctgagagattttatcaggaaagtgtgttaaattttgtcagatgccttttgtcaattgagatgatcatgtattttttcttcctttgttctcttagtgtcatgtattacattgattttcttttgttgaatctttcttttaatataactatgataccataccttaaaaaatgattaattccttaatattatcacatatccaaatttttctaattcatgaagccttttttttcttttttttttttttttgaacacttggttgctggttgttctctttttgttgttgtggttgttttttgtttgtttgtttttgagacagagtctggcttcgttgcccaggctggagtgcagtggcgcaatcttggctcactgcaacctccgcctcccgggttcaagtgattctcctgcctcagcctcttgagtagctaggattacaggcgtgcaccactatgcctggctaatttttgtatttttagtagcagagacagggtttcaccatattggcaaagctggtcttgaactcctgaccttaggggatctgcctcccaaagtgctggggttacaagcgtgagttaccacacctggccactgattgttctctttatagttgttcaggtattaaggggtagccatttgaccaccacttgttacgctcatcacccactcttgttgcattagagctctggcgaaattgttataaagatcctcatactccatggaagtcggaatccacgaaggagtgtgtaacaactcaggctgaaaaagagaaaaaagtttaaaaagtcctcattttcaaatttttaaaaccaaaggatgatttgtctttatcttacttgacctttatgcagcattcgtttaactcctttagtattgtccatcctatttagctactgtagttttccttcaagtcagtatagttaggatggtgatctttcagctttatagggtcattgagcatatgagccaggttagaaagacagggttcagaaatgactgggaattggattaataaaggccccctccactctgcccccccagaagcttgactttaagggaaggggaagatagttaagggcctaactattcaaattgtagcccatggaccagtattgtccaaaagacctggaagcttgttagaaactcagaaacttaggcactattccagacctactgaatcacaatctgtattctggtccagtgtggtggcttacactgtaatcccagctaacctgtaatcccagcactttgggaggccgaggcaagcggatcacaaggtcaagggatcaagaccatcctggccaacatgatgaaaccccatctctactaaaaatacaaaaattagctgggtgtggcagtgtgcgcctgtagtcccagctactcaggaggctgaggcaggagaatcacttgaacccgggaggcggaggttgcagtgaaccaagatcacaccactgcactccagcctccctaatcccaacgctttgggaggctgaggtgggaggaggattgcttgaggccaggagttcacaaaaaataaaaataaaaatgagcaagggcccggtgtggtggttcacgcctgtaatcccagcactttgggaggcggaggcaagccgatcacttgtggtcaggagttcaagaccagcctgtccaacatggtgaaaccccctctttactaaaaaaatacaaaaattagttgggcatggtggcgagcacctgtagttc

SEQ ID NO: 12083 - DNA, 6000 bp, Homo sapiens
gatagatataactaacgtatttttttaagctgtatagttcttcatcaaatggaaatcggcaaccactgaaaataacattaaaaattagtgtgggcatgaagtatggaattttaaacatcagtttactatgctgattaagtcaacatttatattttcatcagaacttaataatcccataaataaatagagctctcagttatttaaaaaaatcaagggataacatatgtatttagacatattagcagcgtaaagatgtatgcttcaacacacttattggggaaacgtctgaaaatattactacactgaattcaagggtatccaaaggaacctgacatagaagttctctagaataacatcatttcagggaatttcaaaaaagaaaaggggtcaaataggaaatagcctcaaattaattgacaaagttcagtgtttgccccaactagattattctctctctccactgcaaaaagaaagtctcaggatgagtgaatcacttagacgaaagttcatctagtggaataaatggagaagccgcttgggcaggtgacacaggagagtcggtggtagtgctgactttcgctggtgagttacaagaagatccggcactgctgctgtttccatcaagggtatccgaagatacacacacaccaggatctgacagctgtgcaacgtcagaagaaagcatgttggtgatgccctggaaaaatctctttggctgatattcagtttccatttcacattttcttttcaatggtccaagaacacttggtctaatgcaattgatggggctctggcttctccgggtggtaaatcgggtcgttgggctgggaatagggcttggaggcaatccgttgctacttacaaaactttgcaaggatggcgaaaaacactgcttcccaattccccgagtgggtgacggtgctggtgacacaggaatgaaatcgatgcgcttgggggaggcggatttctccacgtcgttgtcactcaggctgaaactttcctcccaggagtggcttatctgcattgcggtctgcacctcccgttcgtggaccgtctctcggttgatcaagtccatgccctcttcttgtttgatctggtgcaagcggctgctgtgcatgcggacaggggaggccggcagcagcaggccgtggcggctcgggaacgttgtgctgttccgcctggcgctcggcgcctcggcctggaacaccggcgaagtgtcactgaggccgtggatcaggggggcgctgttagacctcctgaggcccccgccgccgccgctgccaccgccctccgccgggctcccgcccgtacccggaggcagctccaggtctagctccatcttctcctgagccatgtcgggggcagggaggcgggggaggtgctcagtcagggacctaggattcccattccccgcagtccagggccgccgccgctgccgccgccaccgagaatctgtcagcgggctggcccctctgcgcatgcgtagcccttcgcgcaggcgctcgcgatgtccgtactcgcggcgcctgcttaatgcgtaatatgtgcgcggcagtggtaggggaggggcgaggagtggtcgggccgctagtccgtatattccttcggcaaatagctattgagcgcaagctcgcgttgacgcatgtcaataagattgtcatattctggattgcatactcataaaacaaagccctgaaagagaggcccatggtgatgtggggctgtatgacgtggagtggcgcttggcctaatcagggagggcttcctcgaggaaggaacaatctcctgaaatctgaagaagtgggcgaaatgggtgcgatgtagaactttgcaggaagcgggaagcaacggctacccagccagttggcaggcgggaaccaggaggggaggagaaagtgtggcctggagtggagagtgagggctggcctgacgtgaggtggtggaccagaccacattctggtctttatcttgagaacaatgaaaacttaaagggttttcaagcatgggtgtaacagcaactgaaaagctcactggcctgcagtctggagaatacatattgggagattaaaaccttacagaaaaaaggccagagaggatggtcatttgcactaaggtgacagtgtggcagtggagatggagagaaaagtaaatctgagaactatttaggttaggggaagaagccaaaacagaggatggtattgctattgatttacagtcatagttccagcacaagcatatgtgtgaagtatgaaggattaaaccagtaggtcctcacattttaaaaatgaaaccacaattcttggctcatgtaattaatataaaaccttgatatctcattaaaagtgagtttatttgttcatttattcagtcagtcaaggtttttttttttcagcatacttactatgtgccaaacactgctaggaaatgggccctagtatgaacttttaattcttactgaggggaaaatagagaaacgcaggctattttcagatagtggtaagccttaggaaaagtaagatggtgtgatggagcactactgatagaagtcaggggacaattagagttgagatctaaatgacaagaagcagtaagtcacgtggacatctggggaatgagtattccaagcagagagaatagcaagtgctaaggccggaggcagccatgagtttgatgagttagcagaaaaagaaaaaagggcagtgccgctgaagcataagagcgggagtgttaggagagggtaagagttggatctcattctgaatatgatgaaacgccactggagggttttaagcaggggactgatattatctggtttatgttttaaatatcacttaggctctgtggaaaacaggctgaaagaagaccagagtggaggcagaaggatgaattcaggacctatggcaacagtacagataagattcttggactagggttgtagcagtgtcaatggggagaagcagagagactgaggatatgtgttgagttagaacaaataggatttgcagatggattaaatttagattgtgaaagaaatagattattcgaaggggactcatagctttttttatttaaactggtgagatggtagtattatttactgagagaggaaaatagcacatttagagttgtagaaattaagagatctgaagcagaagaacacaaggtggaaagaaccaacattttctaagtgcctactccctgctaggcactttaaacactccataatcccacttaatcctcactgcatagatattgttatactcattttacgaaggaacgattgaggttcaaaaattgcaaaaggcactacagccagtacacggaagaacaaagatctgaaccaatttgaatcaaggactcatttcaaaaacctgtattgttttttctgaatttcacatggattaaagagagaatttcgcatgaattagagaaggatggctaattctgagacgaaacaaaggtctaaaaccaaagttgggaaaggcagaaggagatggatttgggagacaaggcaacaacagaacctaatagcatgctgtgcagaggatgaacaggagacacaaatgactgaagttcaactgtaagtggctgaaagaatgctacaaattattcaataaaaacaggagagaggaggaaatgtctacaaaaaaattaatattaggtaagtagaaaagaacattaaatatagaactcaatttataatacccacagcatattactgttaacttcatattactacattattatcaatgtggctcaaatgtaccagatattgttcgtccatgtctggataaacataataattacctttactaataaaacacaaggatggtgatgagcccacaaaataaaacatatatgctatttggttcttgcctgaacacacctattagagatcttagctggtttcccagtttctacccttgtccttgtagagctggggacagagaattgactgagtcatgtatgattcagtgctttcaggtcctggcacaaatattaatactgatggagaggctttcataactgttccttataaaaagcaattgcagttctcaacaccaagtctacatttgcatgccccttactctgtttttattgtcctccggagtaccacatgacatatatgtatacattttcttgcctgtttctttgctgagaaagtaagctctacaagggaaagacctttgttttgttctctgttatatgcttaatatctagaacagggcctggcacattgtactgagtaagtacttgttgaatcattgtgtgaatgcatgataatgaatgaaaggatggattaatatagctttgtctaaaagggaagagaactctattatttgaaaatccagtctaacaggcttttctacactgattctaagagctctataccttgatatattttttaaagatcaggaatattattattatttagagtgccctccagcccatgcaggtgtgttactggaactacccattatgtgacctaagaaactgaagccctaggttttctttctttttcaacgatatgctaataaaaatttgatagaattaaaatgttcagcactgaggattctaggcagtgtttaatatattgagttactacttcctttcgaaggaatcaaggacaaatgagagaaaatagcagccataaaatgcaatgtagccagctgcaaatgaataatgccagaggcaggatccaaggaacctccctggctcatttcccccttccggtttcactcccatgaattaaataccacacttagtcaagattcattctcactgtgaagccacaaaaccagacatctattccacagttaaactttattgtgattaatattagatttttaaaatattacttatattttaaaaaatattacttatttttaggttaaaaataaatagtttagggccaggcgtggtggctcacgcctgtaatcccagcactttgggaggctgaggtggaagcattgttgagtccaggagttcatgaccagcctgggcaagagagagacctcatcttataaaattaaaataaataaatagcttaaaaatgaccataacaatatctagaattgggacagagtcccaatctgatatctaatttataagatctcaatgaggaataagtggaactagaatgtttaaagtgactagcagggagtaggcacttagaacaatattattattagatagttttcttttaatttctgagggcaatttttcactattaaatttccaaatatatgacaaggcaaatttctacctctgaatccaaattgaatgaatgtaaaatacaaaaatgtgtgtatgtatataatctaagatgggctggcaaatacctcaatgttccacgttaattagcatcaacaacctacagtaaaaatactgcagaaaaaactgtgctttaaaaccataggaacttagggttaactgttacaaccacttaggaaaaatattttgctgtacctattaaaagaaaatatatttatagcccacgactaaggaatcctgctcctgacaatataaccaagagaaatgagggcatctgtctactaaaagacatgcacaagaatgtttcttgcattattattattatgtgtaatagctccagactcaaacaaccataaacagtttaattatacaatggaactctttacccaacaacatggatgagttacaatataatgttgaatgaaagaaattaagtacaaaagaatacatacactatgacttcagtgttatgaagtccccaaacagccaaaaccaacttagaagtcaaaataagtagtcccctcctacccacagttttggttaacctgtggccaacgttggtccaaaaatattaaatggaaaattccagaaataaacaattcatgagttttaaattacatgctgctgtgagtgagtgccatgatgaaatctggtgccgtcgcactccatctgacctgggacatgaatcatccctacaaccagtgcatccatgctgtctatgctccc

SEQ ID NO: 12084 - DNA, 6000 bp, Homo sapiens
aatcattcttatctaccataaccagcagttatgcaaatctgccaatggcactaattaagtgacttctaaaagcatttatcataaataaggaacaaaaacattcaggggcttattttattctctccagcagccatagccccatctgattaatgccatatggggagagtctattctggagggcaggctggagtttggttcattgttggcagatatttcagttacgtgtttgtgcaacactgtatgcttaccaggtagcagctttggtgggataggccaccttcacacttacccatcatcacttgagatttcaagcctcaatttgaccccatgtggcaggaagagtatatgccatgtacagaaaaactttacgtctgttaccgtttatgatcttcccaacagctctgtgatgttcgttattatccctgcattgcagataaagaaacctatacttctgtgctataaaatagagttgaccaaaatttttgcaaagccagagagtgaatatttctggctttgcaccctatcatgtaaggtctccatcatgactgttcaactctgccattgtagtacaaaatcagagatgtatgctgaataaatgaaaacgcatggctgtgttcaagtcaagctttatttataaaaacaggtgatgggccatagctttctgacctctactataaagcactgaaattatttggggggggcggggggtggtgaagtacctttggtaaatagaaagccttaatgagtgggtttgctatggactcaataaatattattgagcatccactctgtgtctggcactgtaaggaatacacaggtaaatcaaagtgctcatgggggttgtagaaatatctatatgaattcacatcactataatgtaaataaagcccaaagtgctcagggctattagaagaggcagatgagacccagaattcagagcatctgaggcatcatgaagccttcctggaggagattatgtcttagctgggctttgaagaacaatgaggaatgaacaggaagccttgcacatgaggctgcgggagccgtatttattggaaggtcagtgtaatagcatttctcctcattctgcttcaccaaccagtagaggtcagaggcttttgccaagcaaaagcccatgttggactggtgtggttgtgaaaagctactgaaggcctgagcttaggacaaggcctgtgtaaagaacagatccaaattaggtcatgcaagagccagctggaatgagacaggtggttatgggtggtagaaaaagagaaattggggcaaaagatgtcccacaatactgagacataagaagtgggtagtcccaagactgttgctgtgtgaaaccttaggttgcaagtcatagttctgtggccacaatgcccaggctttggtgcctcaggccagaaggttttccccacaccaattgcaataacgatgatctgactttgcagggtagtgcgtgtggtgctttgagatcacaaggcaccttcacaactattatctgttaatcttcacaacaaatcctatgaggttagtactatcactcccattttacaggtagagaaattgaagctaagaatagtgtactactgtgccaaagaatttgaagctaggtctgtgtgacctcaaagccagtgtttttctcactattcaatactgcccataggatatgtgccagggttaaagacagaagaataagagaataagaaaatataggttaaaaccctaatcaggaagggccatgatagtggacttaaggctcaaactaatgctgtgggaaggagacaaattcccacctgattggaagccccgggttcctacagaatgtgcttttcttcttgcccagttggctaaagggcttgggagtgagtctgttccaggctatcttcttaaactcccagagcgtctccctacccatgtggctgacagctggtgggcttgggaatacttcacggctcttcccctttgcctccagcttttactctcagccttgtctctggcttctagctcttcccagccagccccttgagagtaactatttctttgggcactttttcagggttcgactctcagagcatgcacagctagcctcagtgtctatcacagaggaccacatgcccaggcctcatattcacggccagcctccaatgtctatttttaacttcatctccaattggggttatgcacactgtctcagggaggcactgccaagcctgggcgaagactctcatcacacgactgaaaattgtgtctctttatgggactagagccctgatggtataattgatgaattgatgcttaaaaaagtgggggtggaggggcttctatgattgtctttgaagagtaaacagacatacagtgcattatgcatgtgatttaaaagccataattttaaaaaagcaaatatttaagagataccactgtttatttggccctgtttttgattttttttctcttcttatttaaaattctaaaagcatcaaacatggaaatgtccaggattttcttcatctctaagaagccctgctgccccagcatcccaggttgctgggaacagggatgggacagagaattctgccacttgtcttctgtccagatcttggtttaacagaacagctctctgctcagtgtcccaagttagaaccccctctccagtcggtgctctgcccacactgcctccgccttcgtctggtcttcatctttctcttggactgttatttaaacattctggaacgtgatccttctgttaccagtttcttcccagccactccattttccacactgctcttagagtgatctctataaaaagcaaatctaatcatgcccttcctggctgaaaaccctcagtgccttgattttactcctagcttggttccagtggggtcttcttgctgtcattgcccaaggtgacctctcttgcacaggaacacccacaggaggcagcacctatccagtcccagagaatagaggctcctaaggccagttctctccctgtgggtgttcccctcctccatgctgtcccatcagctgtcaccagacccatcagacacaacagacccaccagacacaacagacaatggtgctgttctgggaggttcttttccagatctaggaagggtcgtacagcaccaagatacaaaagctggagcatgtgctcattgttattttatgccacacaagaaaaagtcttagacctaaggaaagtattaggcacctgaagaaggtgtttgcctttctgctgatggttcttttctctactgagtccagttgccccaaactatttcctcttcagtgtgggctcctcacttcacacctttgcccaagaggcagttctgcccttgctctctctcagctcttgcaaactctaatgaccagctttagtgcttcaggcatcacagggcccagagagtgagaggtgagggttggctgtcgtcctctgggtgactgtgagtctgcagtactagtcagattacctccagagagagctgggatgatttctttatatgattacctaagaggtgagtacccctcaccaaggcaagcagtgagtttttttgtcttttttttttttttttaagagtcaaagtctggctctgttgcccaggctggcgtgccatggtgtgatcacggctgtctgtagcttcgaactcctgggctcaagtgatcctcccacttcagcctcctgagtaactgggactacagataggtgccaccatgcctgggtaatttttttaaagagatggggccttgctatgttgtccaggctggtcttgaaaccttgacctcaaggaatcctcccatctcagccttgtgagttgctgggattgtaggcgtgagccattgcactggctctggtctgtttttaaaatgagtcagtctcatctcaagtcctattgaggatagggcttttccttccattagcatatttcgactatgcccctttgaggaacctcatgattatggctggtttttgctaataagcctggctttgcttgtaaaggaaggacaacatggctcagatctacacataatagaaagggggaatagaggggttgctggtgtacccagcaatgcatcctgaactcctgccacaatgtacctctggccatgtgtgtgagtttcctgaggctgctgtaacaaattaccacaaagtttcagtggcttaaacagaggtttattccctttcagttttggatgccagaatttgaaatcagggtcaaggggctatgttctctgtggaggctctgggaaagaatccttccttggctcttccagcgtctggtggctccaggcattccttggcgtggcagcattgcagcatcgctctaatctctgcttccttcttcatggggcctttccttttgtgtgtcattcccttctcttttatctaaagtcttcctctttctttctcttatagggatacctgtcattggatgtagggccactggcatagtcctggatgagctcatttcaagttccttaacttaattacatcaacaaagacccttttccaaagtaaagtcacattcacatatttcaggttttgggacatggatatatcattggggagggggctggcatcagtcaacccactatatcattccaagacaaaccaagtcctttgacaactatgcctttgcataggttctctttgatgtccttcactctctccccaccagtccaccatcctcacatttccctcacttggcaaagttatttatccttaaagcatgagctaaatgagctaaaaaaaaatcaccttgtgcataagccttccctgactcctgggggtgccatcccgtgtttcctgctctaggaccctgcagcggtaatcatttgcctggaaggcaatggccagccagagtttggaaagcaaagcctgtcagatgagtgcatagtgctgggcaggagagagccagagtctgagggagggggccaagggcagctgaggaattcacttgaaagagagccttgacccactgttcctaaatccagtcagtggctgctctgaaagggattaaatgttccagaagaggagtttgaaggtttagaggccatgagaaaatcttcctaccttttctgaatccctcctctttttcatacaaactcagaaattcctttgggaggagtaaggtctttccctttctgacaaaggtaagatgagagagacaattgtcctctatgtatatattaatagttcccatcagtagcttctccagttgactgtgagggaggcagagggcaggaggactcttaaaagatgggagtggcaaaggagtgggccacacacacgaaagatgcccagagtgatgctcaatgatggtcagtcctgcttaccctcaactctcagggccaataagaaagaggcaacttactgctgtagaatggacactgaaagaggaaatgtgggtctcaagactgagcttcactctaactttccatgacttcaccttctctggtctttgctttcttttctttgtaaaatgaaatggtagattagatgagctgtaaggactcagtgattttaagagtagctgtcatcaaagatgacttcgttctttggggattgactagaaaatctgtacaagcctgtctcaccatgtgaatttacaataccgcaccagaggaaatcactactgtccacacatgtttgggaatcgctgaagaattaacaaactcttgatgaatgcaaagacactgccacatactctgtgaaaggcacctaggatagagggacagtcctgactctcaaagggcttatgatctaatgtagggggcacacaccttcaagatttactgtaatgcaggttagacatcgatgtatgctataatagagcgagggcaggggaatatgggagtccttcagggaggaggtgacactgtagctgggtcttaagggtgagtaggaagcaggcaggcagcaagggaggaaagcaaggagagacattcaggcggcaggaagagtcttaatagaatgcttggagatttaaagtgaat

SEQ ID NO: 12085 - DNA, 6000 bp, Homo sapiens
tctcattcaactacctatgttatcatttggacattacataattacaaattaaaaacaaaaccaccttagacccggcttgcgagttcagccgttctggcccacgttacgtctctaatgggcaagacaagcgcaatgcttgaccaactgtaccttggctggccaaggaggcgtgaacggggaatcctgcgattcatctcgggcttccggccctcaccacccctcaaccccgtccccgcggagctcggagccagaagcagggacaagctccctcaaccgagccaacggtcctccgccacagacaaggggatgcgggaggaggaagggtgtgctctctgcccgcggtccggaggccccacgccccggtcccaagtccccggctgccgtctctccccgctccccacgtgacccggcccgggggactctggccgccctgctctcacctgtggggatgcccagctgcttggagccgcggccgaagccccgcaccacttgaccccggcagaagtaaggcaggtgcctcataatgcagtccgctcggggaatgggctgcggcccggtctgcgcgtcctgcggagccgccgtcgacgcggcgcccagaccccggaccagccgggggacaggagcgtgagctctgcctgccgcgggggcgcaccagtggccggacgacgccgaccacaggccactgcgaatccctgacgccgccgacccaacaaataccgccgggcgcctgaggagctgcgtctccgctggagggcagcggagacagccgaagtaagtgccgggtgtgagcggggtggggggagggggcggcccgaagcgcagagccggcctccgcgccgccggcgtgcgctcccttcctcagccgaacgcctcgagcccgctcggcttccgtagccccgccccatcatggccccgccccgccgctgcctcgcccggctcccgccgcaagctcccgctgcaggctcccgccccaggcgcctaatgtctggatcccgggcttcgtttcagcccctggcgatgggaactaatgtggaaaccccgttttcagcctgagagccgcgaaagcacaattctcgaacaattctggtttttttttctccttcctcctgttcataacaatccggaagccaaagtgagacgctctttagctccttggcaaccgctgggttgaacgtcaggcatcgctcgttccgttcgctctttaagtatttattaaagctccaaaattcagctcaaagatcgcctcttcacagaggcttttcctggccgccctaccagaagcggtcgtcctccaggaccactgaccacgttctggagttattaatatattcgaatgtaagctccaagggagaagtccctgtctgtgacgctgttaaccccagagactagtggaaggttaccgacatgggcggtgactgtcccctccaggctgtcttcttgacaatttcacaagcccgataacaggccgtccctctactgcaatgcagatagaggccttcgtaccctcggaactgtaaatacgcacgctcctagggaagtagctctgggctcactcacaggatatgcagggtgcaaggttataagaaggtgcatcctcttaacgtctcgaagacaaagaagttttttatttatttttttaaatttttaatcaatggaatccagagaagtttaatttttttcttttttgctctatacatttgtataaaattctgtgcagaccgtgtagtctctttctaccttacatgtatgcatctctgataagatttacctgatattaaatttatgttctaggccaggcttggtggctcacgcctgtattcccagtagtttgagaggccgacgcgggaggattgattgagcccaggaggtcgaggctgcactgagctatgataacgccactgcactccagactgggcgacacagtgagacaccctcaccccttaaaagaactagagaagaagaaggaagggagggaagggaaaggaaaggggaagggaaagtgaaagggaagaaaagggaagggaagggagagaaggacccaaagaagcaattatggtcagttacttatctatacggaattaaacaaagaataatgagaataacgataatagtaataccggtagtaagagtagtaatagcaagttgtgaaaagcaattaagttatctggagaggcttaagagttattttagcaaggtgtgtacaggattctctcactcttgactcccgtccttaataagagtgctgcattccttctaatatagggaggatgtctctcatatggtaatttcatctgcttctaagaaacagaaaagaggtcagaatgatttttttgtatctattgtttttcaagtgcttttaattcaaaatagtcaatatgcaagaatggtatatttttaacttcatcagcagtgatacacctaataagaaaagcctggaggtgagaacttgataaatcatccctgggtcttacgccactaagccctaggttgcaagaaggtatgagaattaaatgagataaaataattaaatgaatcataggaggtaaatgaggaggggtggttttaagaatagagaaaatgctaagtatttttcacactgtctcatgtaatcctctcatcagctttgttggaaagcattaacctaaacgtataaaaatgggcggggcatggtggcttacgcctgtaatcccagcactctgggagaccgaggtgagcggatctcttgagctgaggagttcaagaccagcctgggcaaaatagggagacttccgtctatccaaaaattttaaaataaaaataagtaagaaagagagaaaaaagaaagaaaagaaaagaaacaagaaaaaaaagaagaaaggggaaagaaaagaagaggagaaaataagaaagaaaattttaaaaatcagccagggcctggcacagtggctcatgcctgtaatcccagcactttgggaggctgaggccggtggatcacttgagctcaggagttggagaccagcctgggcaacatggtgaaaccccgtctctacaaaaaatacaaaaattagccgggagtggtggcgctcacctgtggtcctagataccctggaggccgaggcacaagagtcgctcgaacctggcggcagttgcagtgagctggagatcacgccactgcactccatatggggcaacagagcgagactctgtctcagccaggtggtggtggctcgtgcctatagccccagctacttgggaaactgaggagtgaggatcgcctgagccccagaatttgaggcagcagtgagctgtgattgaaccactgcactccagcctaatgacaaagcaagacacggtcactaaaaaaataaataggccgggcgcagtggctcttgcctgtaatcccagcactttgggagaccgaggcaggtggatcacctgaggccaggagttcaataccagcctggacaacatggcaaaactcggtctctactaaaaatacaaaaattagccaggcatggcagtgaatgccagtaatcccagctactcgggagactggggcggaagaatcgcttgaacccaggaggcggaggttgctatgagccgagattgctccattgtactccagcctgagtgacagagcaagattccttctcaataaataatacataaataaatagatagatttaaaaaaaaaaaggagagtcttgtagaatgtttaagatggagcagtcaggctccaatctttaaaactaccatttacatgtcaagtcatatgggtaattactgtgttatcagcataggatatagaagaaagaatttttttttttttttttgaaccagagtctcactctgtcactcaggttggagtgcagtggcgcaatctcggctcactgcaacctccacctcccgggctcaagtgattctcctgcctcagcctcccgagtagctgggactacaggtttatgccaccacgcccggctaatttttgcatttttaatagagacagggtttcatcatgttggccaggctgttctggaactcctggcttcaagtgatccaccttcctcggcctcccaagaaggaagaattctgatcattttccaccaccgctcaatagcgttcaatggctcctcccctctgactgaagaataaaccctccaagagttgtacttctaagaactcccatcaagtactcaatctgttgatcaaagcagacccctccaccttgcttcagaggccaaagcatatgcttcaaataattcaataattattctgtaggctataggatttataatttttcttcttcatttgactccaaaaatatgctacctagcattctcagtaaatctagagttgagagtctatgtgtctttgccaaacttactgcttttaaccaaggaagtattctaaaacgtgttttttatttccccctctgaactgcacttgcacatcctttcagctgcctgtagggaaagagtccacttctctggtttaatttgtctctgtagaaagaaggatcacaaataagactaaagagaaagtagaactggcagcttgtgagggaaaagaaggcttattctaagtaagcaatgaaaaatgaatctgaagaattcttaaaattcagcaataagaaaataagcaactcaattaaaaaatgagcaaaagatctgaataagcatatgaaaagatgttcaacatcatatatcgtgagggaaatacaaattaaaacaacaatgagatactactatataccaattagaatggccaaaattcagaacactgacaacaccaaatgctggcaaccatgtagagcaacaggaactttcattcattgttggtgggaatacaaaatggtacagccccttggaagataatatggcagtttcttataaaactaaacgtacttttactatgttatccagaaattgtgctcacttatatttaatcaaatgaggtgaaaacttttatccacacaaaaacctatttgtttttgctttccgcgctacctacagaggggcccatacggcgttgttctggattcccgtcgtaacttaaagggaaactttcacaatgtccggagcccttgatgtcctgcaaatgaaggaggaggatgtccttaagttccttgcagcaggaacccacttaggtggcaccaatcttgacttccagatggaacagtacatctgtaaaaggaaaagtaatggcatctatatcataaatctgaagaggacctgggagaagcttctgctggcagctagtgctattgttgccattgaaaaccctgctgatgtcagtgttatatcctccaggaatactggccagagggctgtgctgaagtttgctgctgccactggagccactccaattgctggccacttcactcctggaaccttcactaaccagatccaggcagccttccgggagccatggcttcttgtggttactgaccccagggctgaccaccagcctctcacggaggcatcttatgttaacctacctaccattgctctgtgtaacacagattctcctatgcgctatgtggacattgccatcccatgcaacaacaagggagctcactcagtgggtttgatgtggtagatgctggctcgggaagttctgcgcatgtgtagcacgatttcctatgaccacccgtgggaggtcatgcctgatctctacttctacagagatcctgaagatattgaaaaagaagagcaggctgctgctgaaaaggcagtgaccaaggaggaatttcagggtgaatggactgctccagctcctgagttcactgctactcagcctgaggttgcagactggtctgaaggtgtacaggtgccctctgtgcctattcagcagttccctactgaagactggagcgctcagcctgccacggaagactggtctgcagctcccactgctcaggccactgaatgggtaggagcaaccactgactggtcttaagctgttcttgcataggctcttaagcaacatggaaaaatggttgatggaaaataaacatcagtt

SEQ ID NO: 12086 - DNA, 6000 bp, Homo sapiens; identical to SEQ ID NO: 1356

SEQ ID NO: 12087 - DNA, 6000 bp, Homo sapiens
attgttgtaaaccatactgagaggctgcctatcacatgtgctgattattgattcctgaactgatgtgtttaatatttatagcctattgtaaattaataaatgatcttctttgtgaatatcattctacttactttacagatgaggaaaagttaagtaacttacccaagaacagagagaaagaaagtgagagaagcacagactgatttatgccaggcattcatcaattattattattattatttttaacttttttttttttttgagacagggtctaggtgtcacccagactggagtgcagtggcacgatcttggctcattgcaacctccgccttccaggctcaagtgatcctcacacctcagccttccgagtagctgggactaccggcatgcactaccacacccagctaattttttgtatttttggtagaaatggggattcgccatgttgctcaggctggtcctgaactcctgagctcaagcgatttgcccaccttggcttcccaaagtgctgggattacaagcttgagacaccacacctggcccatcaattagtttctgagagactataatatatatgagttactctgctagatcctaggcatccagaataaaaacatataaatacacatctgtgatatatattactcctgccctcacagggcaatgattagaagtttttgaagcggggctgggcatggtggctcatgcctgtaatcccagcactttgggaggctgaggcgggcagatcacgaggtcaggagttcaagaccagcctgaacaacatggtgaaactccgtctctactaaaaattacaaaaattagccgggtgttgtggcgcgtgcctgtaatcccagctattcaggaggctgaggaaggagaatcgcttgaacttggaaggcagaggttgcagtgaacgaagatcacaccattgcactctggcctgggcgacagagcaagactccatctcaaaaaaaaaaaaaaaaaaaatcatgtttttttttttttttgagacagagtcctgctctgtcgcccaggccggagtacagtggtgcaatctcggctcactgcaacctctgcctaccgggttcaagcgattctcctgcctcagcttcctgagtagctgggattacaagcgcacaccaccacgcccggctaatttttgtatttttagtagagatggtgtttcgtcatgttgtccaggatggtctcaaactcctgacctcaggtgatctgcccgcctcggcctcccgaagtgctgggatcacaggtgtgagccaccgcgcccggccccaaaaatatcttaaggaaattttcaacattttcattccactcctttgtgtcacagttccacggaaatctgcagtgaccacgcccagtcagaaggcagcaagaaggagctttctgctagaatgtctgtgttcccctcttcgatgggctgattttttcctatgcattcttctatctacataggcccaactaaaactgtgacactataatcattataacaattatgttgatatcgggctctccgactctcctactttttatacagtcaaatattattattatttttttgaaacagggtcttgctctgtccatcaggctggagtgcagcggtgagatctcggctcactgcaatctctgccttctgggttcaagagattctcctgtctcagcctccctagtagctgagattacaggcacccaccaccatatctggctaatttttgtatttttaaatagagacggggttttatcacattggtcaggctggtctcaaattcccgacctccggtgatccacccacttcagcctcccaaagtgctgggattacaggcatgaaccatggtgcccagcctttatattaaaatttaaaatgaggccgggtgtggtggctcacacctagaatcctagcactttgggtggccgggaagcaggcggattgcttgaactcaggagtttgagaccagcctgggcaacgtggcaaaacactgttatctacccaaaaaaaaacaaaaacaaaaacaaaaaaaacaaaaaattagccgggtgtggttggttgcgcacgcctgtagtcccagctacttagaaggctgaagcaggagaagcgcttgagcctgggaggtggaggttgcagtgagccaagacgatgccattgcactccagcctgtgcaatagagcaagcctctgtctcaaaaaatatatatatatataaatatatatatataaaatttcaaatgaacttatttcagttctgggcccctaagcatgcagttgggaaggttgctgaatcaagaacttccagatctgagaacagttaactcacatgaaaaattagtcccaaaacattcaagttcattctatgaaatttttggtggaaaatggcagtgaaaaatctatggtaaatctataggacgattaagatagtgagaaaaattaaagaaaatcctaagccttccattgcaaagtgagaaaaatcaagtcaagtggaagagagatactggcctcatccatttttcatttctgtgggtgccataaaaaaagagagagagagagaaaaaaaaaaactctgaatccctgagagctaattaaatgaatgtacccattaagaaatcttgtcttggttgggcacggtgcctcatatctgtaatcccagagttttgggaggctgaggtaataggattgcttgagttcaggtgttcaagactagcctgggcaatatagtgagactttatatcttcccctaacccccccaaaaaattagtggggtgtgggtgggtggttggcacaggcctaccatctcagctattcgggaggctgaggtggcaggaagttaaggctgcagtgaaccctgtttgtgccactgcactccagcctgggtgacagagggggggatcctgtgtccaaaaaaaaggagggggcgaagaaatcttgtctttccttttctagttgggatgaggaaaaattaaaaaatatatatgtaaataaagaaagaaatctcgtttatattgctttaaaactgctaattaatttagactttgggaaagaaggaaaagaagcccacaagctaaattttgtttcactgtttcttttcttttttttctttttttttttttttctgaggcagagttttgctcttgttgcccaggctggagtgcaatggcgcaatctcggctctctgcaacctccgcctcccaggttcaagccattctcctgccttagcctcccgagtagctgggattacaggcatgcaccaccacgcccggctaattttgtatttttagtagagacagtgtttctccatgttggtcaggctggtctggaactctcgacctcaggtgatccgcccgcctcagcctcccaaagtgctgggattacagacgtgaaccaccgcgtccggcccacaagctaaattttgaagtattagatcctttcttaaacttttgctcttcggattgtcaatgtcaaagatagtttccagggggaccaaattggccccaaactgttattaaataagccttaacttttattgctgcgcatttcttctgaaatcaattctgactgcttacgtggttagaaaaatagtttctgctattgaatataaaactcaaattatccatggctatgcaataaacttcagaaataaatggacagcagtgcatttatgacccaggtataatctcacatttttatgcaaaaatacagattaaataaggagagtgtaattttcaggaaaatgattatttatgtggatactcaccagatatgcagaaatcttaccagttctgattttgacctgccatggaatctgaagtcattcgcctttttttccccccagaggtaaaaaagttatctctacttcaaaccatttccttcttcctaaataactagtaattgctttttcatttactatgataactcaaaaacgttgttcaaaaatatcctgcaaaatttgcattatagagaaacgactctgcaggcgtctgtgtcgataatgaggctacacttaggaggcgtgagggtactgactatgcaaatgagcgatttctccattaggaattcccatccccaaatctgggccgaaggagagacaccgagcgcggccagggactcacatggtgcactggagccaaggggtttcgggaagggccagcgcgcgggtctctctagagccctctactcatgcgtgggaattccagattccttccctgggaaggaatcttcacgtatctcccggcactgtcctcagtgaccttcagccactcggcatcactttccctgtctttgaaaactccgagagaagcagccgccacctgcctcaggccaaggcaataaacccacatcacaccgccagtctgagccctgcaggaaggggtgcacagcggcctccagagcgctttctccccagctctgtttctgcaggctcggccgcgcgaacgctgaggaggggatcggaggcccgcaaggctcagaccccgcgccccgcgggggtcgcacaggggtcgggcgggggaggggagcggtggctgcagggcctcggccctccccgggggaggggcctgagcaccgcaccgcccccctcctccctgcgtcttctccctcccaccccccgcccttttccacccgcccccgcaggaggaaagggagagggagggggaaaagaaagtgctgttttgtggaaaggggcggaaggcgggggagaaaaagggaacagaaacatggcggtcaggtcttgggacggctgcgccgcgggcagctcctaggcgacgcgccgcccgcactgtccgacggctcacagcgcggaggcacccgcgcgggccagcgctccggccatcgcccctggctgtaggcggcgcccctcggagaccctgcccgcgaggcggcgcaggcgcagaccggactgaggcggcggcggccgctggagctagtcccccgccctgccctgccgagcgcgcccagtccgcgaatccggtgctttcttgccccaggaagaagccgtgtcggggctgcgctgacagaggagcaggcagcaggtgaggctgcggcgcggggcctttggcggaggaagcctgcgccgtgccctcgcggggcctgcgctgcaaggctgggagggcgcgggacaggtagagcccggagggctgagttccgagtggctggcccgcggggggtcgccgaggaggcggagagtggccgcggctggcgttcgtggcctagtttctccgcggtttccgggggcggggagtccccggatcctgcgggatgcagtcggggaaaggctgcccctgaagagcctccccgcgtcgcccgccgggcccatgagaatcgtttgcgtacaagcgcgaggggtctgggcccgggggaccgccggggcgacggccgctttggtgggggccggggtgcggagggagcaggatcggggcttcccagagggggtcgaggctgagagagcggagagctagagccaggggtggcgggcagtctcgagaggagtcgggggactgagaagtgtcggggacaacggggaggagggggacctgggcaggtgtctctggtgaattgaagacatttccttctctgtcttacggtggccgatcctcagggcttctttgtcggggatgactttctaggagggcagtatccttttaactctggagtgactaaacacaaaaccaaggaatgaagtcctaaggctgactcctgtaaagagctgtaactttttctgttttaagaatgctgtcacgtctttttttttttcctccccttttctgcttgatagaccttttccctctcgaagaccgtcttttatctgcactaataaggaattacccagtttttaaatagtaccgcctccttctccccttatgtatgtttgtcacacgggaaaatttagggtagttaccgcgggtacttgtgcaaatttgagggaaagtgtcatttccagtagtgaaccctcagctgtctctttgtgcctccgagatactgtcaagcgttgtagcctga

SEQ ID NO: 12088 - DNA, 6000 bp, Homo sapiens
tttggggagtggctgctaataggtatgaggtttctttctagggtgaagaaaatgttatggaattagataatggtggtggttgtacaactttttgaatgtatgaaaaaccaataaattgtacaatttaaggtggtacattttatggttgtgaattacatatcttaatcttaaaaatctctaggtagggagagaacaggatctgagtccactgatgccattatattacactgccacatggtgtcaccgttgaggaatggatgaagtccaaagaaggcttacacaaagcttgtgtccaggtcatgcccaagctacagaggtgccccaggattggagtgaaggttaaaatccagaatttggggagcaccatcccagaatggtttaatattaaggaggttctagcctcagccccacactgtgcaactatttgcagtccttcacagaccgaagttcttggctaaacctggttcccagctcaatggggaaattcaaatccttgtgaaagcatctctgttaaaaggagacactgctaggcacatcttaaacttccaaacactttattttttgaaaaactgcttctttatggaggtccaaggaaatattgggcaatttttactgtcctgggatagggagcatcaaatgagttgaggattttacatcaattttctctaaaatatttatactacttaactcagtgtatacatatgcatgtgcatatatatatgtgtttatatatatacacacgtatatatacacacatgtatatacgtgtgtatatacacacatgtatatacgtgtgtatatacacacgtatatacgtgtgtatatacacacatgtatatacacacatgtatatacgtgtgtatatacacacgtatatacgtgtatatatacacacatgtatatacgtgtatatatacacatatgtatatatgcgtatacacacatgtatgtatatatacacatacatacgtacatatacatatacatacatatgtatatatacacatatgtatatatatatgtatacacacatatgtatatatacatatatatactgagaaatatccagcaatggaagttgttacatacacacttattgaaaatcctttagctgttaaaaatggtaaatataaatgcaatgtagcaacataaaaatccttatgttataatgcaagatgatataaaacacatatttatatatatgcataaaaatgtacacatatatattcacaaattcatacaactgaaaataattcacataccagttaaagttatatgccatttgattctgaaataaatttcctttaaccctcttactccacattttataaaatgtgtccaatatctataccaagactttttttttcaatttcctgggcatatttttctatggtcacttttttcacttatgttttaaaattatgaaaaacatcatacatacaagaaaatttataatgtgtgttttcggtttaacatgtatccatcaggaatcagaattttactcagttggtttgattaaagagatattagtgaagacactacttaaaggagtatgactaagagaaccatccagttgagtcatccagagtctagcaacagcaggaagactgcgctctctctaggctacatagcaaaggagaaaagtgtttccagagcccatggagctggagccatggagaagggactgcttgccaagagctgcaattgtggagaaacacaaccaccaccagatactcagccccaaacagagaaagaacagagaaaatataccctgatgtctttttcctcctgcctcccatctccctgaatgcctcccgctgtccaaactcaaatggaaaccagctgaggagagcccaggtggtgccgtccaaagaggtcagctttggggtatagaacagggcagggaagtgaggagaatgaatatgatggaaggcaaacagaaaacctagacagtctaattgttttgtcacccagaatttattcttttcctttgctcagatgaagagcagctcatcccttacatatgagaatgacagagtctgacaagatttctcctcgaccaaactttagtcaggctcctctaagccatctccttgattagatattgaccttgggctgcagtgttcatccttgcagaatcagtgttggcaagaatcctgctaagtcagtttagagaggatcttcccaccctgaatgtttgaccactctcaatatctgatcaaattccttacccccaccagcccccaggtgatgtctgcttaccctggcctacctttagcaagaatcctgttaggtcagtttagcaaggatttcccctacccttgctgtctcttcttagtaattttccatccacggaccccacccccatccacacaacctgctcctcggctataaatccccacttatccttactgtattcagaattgagcccagttctttaccaaggtctctttccccctatttcaaaagttgctgaataaaaatctatttttactgctacagctattgtccagctttgattttccttaacaagcctcatcagctgccatattgccttgaggggatgtcagttcaggcacattctcacccagaaactaaattgtaatatttatctccaccactactctttatgcagggtaataggaaaagagagtcagggaagaagtaattaacattttaaatggagagctactataattcctgcctctagagcttgttgcaaggctaaaattaataatcatagcttcctactcatttacttatgtatgtttcccctgccctatgccaacacctaggtagatcaggatttttttatctggtatgcttcaacactttaatttcttcatgatctgaaatttctgcattacttcagttatctgataatcattattatggcacacggcagtattaagaagtgcccagtgaatctccaggtgtcatgcatagttcttcttgccctcaatatatagatgtaacccaatttccttttggtatttgggatgaatcataccattctgtcactgtgaggaatcaaagtgaccagagggcagtttcagctttcgaatcaatgaattgaaattcaattcaattcagtgacggggtcttctagtggcagcattccttcctttggatctaggcttccaaacacaataaacccaaggttgtagaaatggtgtgctggaatactatgcagccataaaaaatgatgagttcatgtcctttgtagggacgtggatgaagctggaaaccatcattctcagcaaactatcgcaaggacaaaaaaccaaacaccgcatgttctcactcataggtgggaattgaacaatgagaacacttggacacaggaagggggacatcacacaccggggcctgttgtggggtggggggaggggggagggatagcattaggagatacacctaatgtaaatgacaacttaatgggtgcaacacaccaacacggcacatgtatacataggtaacaaacctgcacgttgtgcacatgtaccctagagcttaaagtgtaaaaacaaacaaaaaaaagaaatggtgtgctggatattttctatttctccctccaggcattgtgcctagtaggctgacctctacagactacacagacctagctccactgtcttctggcttcctggtggatccagccagcggaagaccccagctggatatcagagctgggagaacagagaggtgggtcttctccactctgtccctgctttgggctgacgtctcagcactggctacaactatagaatctcaccttacttggtgaaaagttggcattgcttgctttcctctactgaacgacacggttccagttggttactctctcgtacagccacagctaccgctctcgctctcgcctggttttagtaactgcttccttcccccacccctcagccctatagttactaacagctccccgctgttactggttactactggttacggaaggcgaactatgtgcccgacactgtgctaaatgcccacatatattatcttttagtcctcacaatccaataaattagatggctttagtcctgttgcagaggtgataaattcagagtgacagtgacagagctagaaattgaaggtaggtgtgtttatgctagagtctgtgcactcaaacacgattccttacttcttgcatcagttgttaacctcccttcaagagtgtcaaacctcctggtaacccgcccattcccttaactggaaatgagggtgctgttgcaattttctcatccagccattccacaaatggtatctggaatgtgggacccacagtccagaatcctgagggctgctgttgagagcatcaagacgcgcccaggaggtcagggcggtgtgcactcacacgctgagcctggagaaagttagacgccttctccaccgctgtggtggttagcagggactttcctgaaggccagagactggtgacgttcatgctatttttccaagccatttggtagcaaagaacagagtgccaacaattcaagcattctctcaggctgggagagagacgtggcttattcaagatagaaattgctggtgaggttgaggcgagaccgacatctctctgagcagcaggggagaaagacggctctgttcaaaaaagaatgggtaatttcagtcaattctcttctttctcgtttctgtcttatctttatgactttttaatagtgccaatttaacagatgaggggacagaggcctttaattgagaattccactccgcttcctctgcctcatctcaaaaatctggcagctgagtcgccgcggctttgaatttgcctcttttgaccttcccctcccacctctggtaacactgagcctggcccggaaggacacacccggcttctggcggaagtgccggctctttaaagaagctgagggctgcgcgaattggctgaggtgcgtcatctactgtgtctgggcgccaatcccgacgctgggcggagcgaggcccggtccctgcagcgggcgaaaggagcccgggcctggaggtttgcgtaccggtcgcctggtcccggcaccagcgccgcccagtgagtgaacaccggccgcaggcgggtggggagaagggtcagcccggccatgtcagtcagcgcgatctcctgggctccgggcttgccaggcagcgctgggcgcccgctcctcgtgagcgccggctcttggctctcgcactgcccctggtgctgataggtattgccaacttcgttccattagagcgcgttcttgtcgcctggcgtggactccggatctctccgtagctttaaaatagagttgagaaaaacaggcacagtgctctcaacagaaatcagcacactattgcggggaatacctaaattacagtaactggcctcagggagcaagggcggtgttaattacagaaaacctccggaagctgtgggctctgggctggaatttgcaaggggatgtggcttaatttcaatgggatgcaaatattgaaaatgactgtggtgagacgatcagtcatacattcaggcaatgtgtcatctgatcgggaaataagtcagcgtggtaatcccgatgacagaattcatgcaattaattttttatgtccccccaagtaaaatcaaatctaggtactcacgggtgaccggaagaaaggttgtctggaacttgcaggcaccacttctcctccccagaaatacaccttcccatagtaatctatagctcacctgaggcagggctgaagcattaaagaccccttccaagatctcagaaggaatcaaagggaaaatgaagacagagggattgaaatcagcattctctgcaaaacatcactctgagacacagtgatgtttaaaattgtataagtagcaagacatttttttttacccctggtgaaaagtgttagaatttttaaaagacttaacttatacaagtgagtgaaatcaaagttatccctattgcaaggtcaattttgcttattttctgatacatattttgtgagcaagaggagata

SEQ ID NO: 12089 - DNA, 6000 bp, Homo sapiens
tctcaagaggtgtgttaatgcttccagtaattttccaatcaaaattatgtgagtccatctcaattgcaacatgtgctatgtagttttaggatacataggctctgcagaagccattgttgaattttggagggatataacaatcaaatagcagcaaagcctgaaatagttcatttgagataatcataagagaacaaacccatcttttggaaggtacttgaaaggaacacaaattaaaataaaatcttgcctgttgttcggatatagtgttacagggctattttaatactatttatttggagaattaatgatgttctctcctgatggaagataagcttttagataaaacatgaataaataaaatcacatgtcaaataaccatggtatccatggagatgcacaagtccatatattgtgatgtgagaaaatattgaaatttcttatttctattattttacctcatgcttataatatataatgcggtatattaatatataatttataaataagaaacatgcataaatgatagtgtgtgctcaatcttttttatctatagggttatcagtcaaaatgtctggcaacaatcgcgaaacgatgagtttgttcctatataaatacgaagaaattacataactataaagtgttgttatcaggcagtaagaagcagaagccacaattgtgaatttctaaatgaaatactattgaattcatttggtatggcacttagtgcaatgccatctgaagagagattcctaataagtagttggattttcaagtcaggaaaaactgttagagaccaactagtccaaatcttattttacacatgatttacctgaggtccagagaagataaataatattttctatgtcacatgggtggcccacagtaataaagtaaggtatcgaacccaaatctcccaaactcctttgtcttcctactacgtgcacacatgcacatacacacacacacacacacacacacacacacacacacacctttctatagatataaatatacatagagatatgtatatctatatgtctctctctcatatatgtgtgtgtatatataaagatcctccctaattatatgtgccatataacatatatataaatagagagcatctttgaagttaagcagtaggccaacccagtattctcactactttattttatcctcatatatccatatctttattttttcctttttttagccttcctaaaaatcacatcgcatttcagaacatggaatagaatgtgtttatcttgttaatttttaaaggcaatctaaaggaaaaaagtttaaatccaaagttatccctatattcacccatctcctctaagagaaacaaactcaaaactctaaatgtcattatttcttgctagtaattctctgagaaccacccaacataagaaatatgtactcaaaacccaaagaaaatgaaaggtgatatgagttgggagttgatgatacagaagtttaattgcaaagacagtatcataagtaaaacatcattcttaagagataagaaagtaaaccggcaaaaacagattctgtatcaattcctcatatctattagcctgattttggggttgaatttttccaaggctctcaaaaaaacaatgccatgactatgacataattcagaccatgtctttaagaaagaagctaaagagaaataaaaagtatttatccaggtaattcaaaccaatttttaacatcttgatcacatttgtgtagtctcttcacaatatgtacaggtagtgtttaagatatttgactgtatccacagacactggtttcaactgtggctatggcagttagccagttttgtcatatgttgggaaaacttcatctgccatgttgagtcatgaagattaaatggcatcatgcagttagttgcttagcaaaggacaggcatgtcttatttcactatgcttcactttactgtaaatggcagatattgtatattttacaaatagaaagttatgtggcaaccctgtgtagagcaagcctattagcataatttttcaaacagtatgtgctcactcatgtctgtatcacattttggtaattcttgtaatatttcaaacttttccattactattatatctgttatggtgatctgtgatcagtgatatttgatgttactattggaataattttagggcagaatgaaccacacccatagaagatggtgaacttaataaaaatgtgtgttttgactgctccacccaccaaccattgccctctctacttctcctctgcatttgctgagatgcaaaaatattgaaattaggccaactaataacatgacaatggcctctaagtgttcaagtgaaaggaagagtcaaacttctctcaacttaagtcaaaatgcagaaatgattattactaaggaaggcatgtcgaaaactgggataggccggaatgtaggccaaacagccaagttgtaaatacaaagaaaaaggaagttaaaagtgctactctagtgaacacaccaatgattagaaagtaaaacagccatattgctgatatggaaaaagtttcagtcatccggatagaagatcaaatcagccacaacattcccttaaatcaaagcctaatccagagcaagacctcaactctccttaattctacgaaggctgagggaggtgagaaagctgcagaagaaaagttggaagttagtagacattggttcatgtggttaaaaaaaaataagctgtcttcataacataaaagtgcaaggtgaagcagcaagtgctgatgtaaaagctgcagcaagttatcaaagagatgtagcttagataattgataacagataatcagtatagatgaagcagcattctattaataaaagatgccatctaagactttcataactagagaggacaagtcaatgcttggtttcacgcttcaaatctgactttcttgttagaatctaatatagctgatgactttaaattgaagccagtcctcatttacctttctggaaatcctagcatccttaagaattatgctaaggatactctgcctgtgctttataatttgaacaacaaagcctgatgacagcacatctgtttacagcatggtttactgaatattttaagttcattgttgagacttcttgctcagaaaaaagattcctttcaaaatattactgctcattgacaatgtacctagttactcaagagctttaatggaaatgtacaaagagattagcattttcataactgctaacacaacatccattctgcagcctatagataaagaagtaattctgactttcaagttttattatataagagatacattttgtaaggctcttgcagccttacaatcagagataatgatttctctgatgaatctggttaaagtaaattgaaaaccttctgggaaagattcaccattctgatgccattaagaatatctgtgactcatgggaggagatcaaaatatccctaactggatattggaagaaattgattccaatctttatgaacaactaagaagggttcaagatttcagatgagggaagtaacagcagatgtggtggaaatagcaagagaactagaattagaagtggagcctgatgatgtgactgaattgccacaatctcatgataaaacttgaacagatgaggggttacttcctatggatgaagaaagtggttttttgagacggaatctactcctggtgaagatgctatgaacattgtcaaaatgttggataaagggctccaattttgaaagacgttatatagtggttattaaaatgctataaaacggcattgcatgttgcaaaaaaatctttcgtaaaaggaagagtcaattcttgcagaaaatttcattattgtcttattttaagaaattggcacagttaccccaaccttcagcaaccactaccttgatcagtcagcagccatcaccatcaaggccagaccctccaccagcaaaaagattagaagtggccaggtgcggtggctcatgcctgtaatcccagcactttgagaggccaaggcaggtggattacctgaggtcaggagtttgagaatagcctagccaacatggtgaaaccccgtctctactaaaaatacaaaaaaattagccaggcgtggtggcaggcatctgtaatccaagctactcgagaggctgaggcaggagaatcacttgaacccgggaggcggaagttgcagtgagccgagattgtgccattgcactgggcagtctgggcaacaagagcaaaactccacctcaaaaaaaaaaaaaaaaaaaagattaggatttactgaaggctaaggtaatcgttaccattttttgggcaagatgttttttaaattaagatatatatactgttttttagacacaatgctactgcacatttaatagactacagtataaacaacttttatatgcacggagaaaccaaaaaaaaattgcatggcttgctttatcgagatatttgctgtattgtgttggtctagaaccaaacctgcaatcgctatggtatgtctgtatctagcacatgattatgcacatataaaacccaactccttgattcacaggcctctggataggagatatgacatgcccaaggtctcgcagttcatgtgaggcaggaaacttaagagagccagacttctttaaggagactgaaaggtgattcatttagtgagtagcgattacagaatttctaaaacagtgggggcggggggggcggcggggaggagggctggaattgtcctccagcgcatacaaggttgttgctgccagagaaatccagcaggaaagagcagcattctttcaccttttccgcctctgaagcggaggagaacttcatttcccagcagcccttaagattcctccgcgcactgcgctagcgtcccggcattctgctttccggcgctctgccttccggtgcgtcgtttacgccagtttgaaccaaagacgcccaaggttgaggccgagttccagagcatggggtctcggttgtcccagccttttgagtcctatatcactgcgcctcccggtaccgccgccgcgcccgccaaacctgcgcccccagctacacccggagcgccgacctccccagcagaacaccgcctgttgaagacctgctggagctgtcgcgtgctttctgggttggggctgatgggggcgggcgggtacgtgtactgggtggcacggaagcccatgaagatgggataccccccgagtccatggaccattacgcagatggtcatcggcctcagtgagaatcaaggcacagcacttgggcgggttgggtatctgcggggtagaggaaggaaacggagcagccacgtgggcggggaggcggggaggcggggtgctgccgctggtcaggtggtgggggcacctcaaacaaggtgggagaggaagttgttggaacgcctttctttttttttttttaattttaagttagtatttcttgagaacccttattagactcagcccttttaattctcagaatagctgttagaagtaggtatgattatagtatttactgtggagcaaaccgaggcaacgaggagtattgtgttcatggtcaggaaatgacagtcacttgatcccaggtatatcagatctcaaagcccatactttttctccaggtcctggagaaagcctgagcgagggcccttgaccttaatttaagaaatttgccttgaatcccagatctttagacgtggattctaagctcacctacttggtacacctgggtaatgtggcccacagccccgttctgtgatcgtcaagatgtcatccaatcaaacgtcatgatttttttagctttcaaaccgattgtcagtgaatagaattttaggtttctaactgtcttaccttcttgatcctgtataggtaaattctcctacaggatattcttttttttcctgatttttttttctttttctgtgcttcacttgccttataagaaagatacaatggtaatatatcctccagaagtgttgtgagggttaaataagat

SEQ ID NO: 12090 - DNA, 6000 bp, Homo sapiens
taatagacactgtggattattagacgggggagggagagcgggggatgtgagctgaaaagctgcctagtgggtactatactcactagctggatgcgatatacccctgtaacaaacctgcacatggaccccttgtatctaaaataaaagttgaaatttaagattaaataaaagcaactaagtgtaaatagaagaatggaaatggaaaaatcatatttcataattgtgtttcggtccaagtaatccacaaagagcaggtcctaggcgttttgtgtttatcatgtgtgccaaaaattcatattcagcaaagtgtgcaaagtaaaaagaaagaaaaacgtaatgcacatttatttaatcaatatatgaagagttgatatttatttctgggccttagtaacaacttggaaaattctaaatgaaattaaatgcagtacacaaattcagttcactgaatatttcttttgagtaatatcaagtcccacatttagctatgatgtctcacttactgttgtgatggtgttatttgtgcagtctatagtactttacactgtacaaagcatttgtgtgcactttatcccacttattcctaccaaaaccccatgaagttatttgtataggttccactttacaaaagaagaaacaaaaatctgggatgttgacttccaaacatcccctaatgttcaaagccaagggaaaccaacaaaaccaaatctaccatggtttattctcaggctgaacattactttgaaaaataccagtcatgccagccatgaaatttctacattttattttccttctataataatacactataattccaatattgtttgctctgtttctgtggctgatctctacgaatatgtaaaagcaaccatttttgaatattccaatatagattttgcagctactttcagcaaatcatattacagcttcttcatattccatgcacatgttgcaaagaaaaagtgttcaagttctgcaaattatgttgacttctttgaaaatcttagcaaagctctatacagtcatgcatcacttaacaagaatacgttctgagaaatgcatccttgggcgattttgtcatggtgcaaacatcacagaacatacttacagaaacctagatggctcaacctactacaaacttatggtatgtggtatagcctattgttcttaagccacaaacctgtacagaatgttactgtgctgaatactgtaagcaactctaacacattggccagtgtatgtgtatctaaatataactaaacaaggaaaaggtacaataaaaatatggtataaaagataaaaaatagtacacctgcataggacacttacaatgaatggagctttcaggactggaagttgctctaggtgaatcaacgagtgagcagtgagtaatatggaggacaaggacaagactgcacattactatagactttataaaccctgcacacgtaggctacggtaaatgcattttaaaatattttctttcttcaataatcagttaaccttagcttactgtaagctaacatttttttttacatcttttatttttatttttattttactttacgttctgggatacatgtgcagaatgtgcaggtttgttacataggtatacatgtgccatgatggtctgctgcacctatgaaccggtcatctaggttttaagccccgcatgcattagctatttgtcttaatgttctccctccccttgccccccaccccgctacatgtcccagtgtgtgatgttcccctccctgtgtccacgtgttctcattgtaagctaagattttttactttagaaactttttaaaactttttgactcttttgtaataacacttagcttaaagcacacattgtacagctgtacaaaaatatttctttgtattatcattctatacattttttctttttaaattttttgtgtacttaaaacttttttttactaaaaattaagacacaaacacacacattagtctaggcctacacatggtaagagtcatcagtaacactctcttccacatctacatcttgtcccactagaagatcttcaggggcaataacacaaatgaagctgtcatctcctacgacagcaatgccttattttggaataccacctgagaccattctgtagttaacattttttttaagtagaaagagtacactctaaaataatgacatgaagtatagcatagtatggcaaatacataaaccagtaacatagtcattgattatcaagtattaataccattgatcatttattatcaagtactaatgccattacttttaatggcaaaaactgcaattacttttgtaccaatcaaatatgatgtaccatacataattgtatgtgctatgagtaatgcactgtgctataacattacaacagctatcacatcactagatgataagaatttttcagctctgttataagcttacgaaaccactgtcatatatgcagtccattgctgactgatatgttatgcagcacataactgtacttcatttctaatttgatttttaaggtgtttatgtaacaaaagatatgtttatttaagagatgtactttagatgaagtgatttaaaatacctcttaaataattagacatttagagacctttgaggataatttaaaggttaaattggcagcacattaggttaattgctaaaatattatgtttttgtgtcctgcctacattgtgaacattcaaacgtaaggattagaaagtagtctctaaaaaaacataagaaataattaaaattagcttctggcccctagaaccgcttttcactctcattctggttatttagaggatatatacatccgagtagatacgtcatctagcaccttgactctgggtgcttttatctattctcattcaatgacctttgcttccacttcatgacagccactcactctcttagatatatgctggcaattctcaaaatcagttgtgtaactcagacttatcctctggcttctagaaacacttacccaacttaacatttccatttgattgtctcacaggcatttcaaatataatatgtacaaaatggaattcttgtattccacttaaatcttattatattctcagtctttaccacctcagaaaatggcagcacgtgcactcagttgttcaagccacaaacctggccatcattcttggttccttattttgtcttaccttcacattcaatgcctcaaccagccttttctttgtaccttctaactatatcatgaatcaatccagcatcttttatgtcaactgtcattatggtggtccaagctttcttacaaaatttcacctccgcttccaatcactgtctcctccatctagtcatcacacagcaaacagataatcttttaaaacaaaaatcgcaagagtaccaactctcattaatttattgaatggtttatacatgcatttcatgctctacattaaatatatatttcacatccttccacttttttagagctttattaaggtataattatcatataatatactgcatgcattaaagcataccatttgatgagtttagacacatgtatatgcctttaaaatcttgagcacaatcaagataacaataatatccgtcagctccagaagtttatttatggcccttttaatacctccctcttctcttctcctcccatgtctgcagagcaccactgatcagctttatgtaactcaagatcagttgttattttctaggaatttacacaaatgaattaatgtctccacttgcctcagctattcacatagagtccaggttaatttcttcatttccactcttccaaaaagaaaaaaaaagtgaacaagttcaatgaaaatcactgagaaaatgccaacatcggtgcccagtttttagagttacttataaattataaaactcccgaaacactacaacactttcatggacttgtatctttctcaacgttgataaaaaattatattaataataaacttccatgttgttgttgttgttttgaaacggagtgtcactctgtcacctgggatggagtgcagtggcacagccttggctcaccgcaacctccgcctcctgggttcaagtgattctcctgcctcagcctcctgagtagctgggattacagatgcacacgaccacgcctggctaattatttgtattttgagtagagatggggtttcaccatgttggccaggctggtgttgaattcctgaccttaagtgatctgcctgccttggcctccccaagtcctgggataacaggcatgagccactgcacccagccaaacttcgaggtatataattaaaagtttaataagccctcagcctaattttaaaattcagattctttctttctttctttctttcgttctttctttctttctttctttctttctttctttctttctttctttctttctttcttctttctttttctttctttcttgataacattattatcatagtctggtagattctgtctttctataataaaaatcctgtgatgttgttcaaagaaactcaatgggctttctgtatgtttaccaaggaattaaaatcttaacaaaggttttcaacacaagaaatactcccttttgtaagaattcttcataggtttttctagcacaagtttgtttttattgaatgatacttgatggttctgtatgttatttcttttctactacatataattttgattaggggatacattaaatattttaaaactatcatttctttttccagaacaatcataacatgttttgcttcttgttgctttaaaaggaacattttaagttgcttttttacaacaataagtgtgaaaggaaatgccaaaatacaaacaatttcacttcttgttggaatttgacatttccactagctaagtaatataaacatgcatcacctaaatgagcagtattttaatagcatcgttttcacattttaattgttgtcacatttcttctttgtttagggagacgtctggtgaacacccgtgggatctaaagaacaagtaagatttaaagcatactgggttgtgtgcctggctttcacattttatttattttattgcttaatagtgtttctttactactgtgggttgtagcttaaaattgttagaaattttattatggagtataaggaataaaagtgaacgttcaacactttcaaattatttggagtcttaaaaaatatacataaattttctgtatgtagtaggcagacacaaaaatattatgtctttatgtatatagatggagtgaaatttcaagtcctaaataatgggtatgtttttatgtggaagagcaaatacacatctatagactgaatttttacacgatgatttttataagatataccgttttatttaaaaattgtcttagtgtgacctctagcctatcaatggagtaggttagtgagcagtgagtagttgattcatttccccaaactccacctcgtgtggaaccatgattctgttaacaccagagagtatgaacaatacaacaaccacccaatagtggaatgagatgtgttgggatggttatgagggaatcttcagttaatggattgggaaagagaaagtgtgaagtgcagtcaaaaggaaagcaaatgagtaagggaagaactgaaaataataaagaagaaagacgacagatcttcaaaaaataaaaataaacaaatagagtaaacaaatagattacatatacttgcacttcattgtaaatatttggaagaaacaaaagagaggtggaacaaatacaaagtagtaagtagagactggaaactaaatatagagacacgatattcaataaatagtgcctaagagaaagggaaagaaaaaagtggtaaaagtagaagaaagttccattttaaatttttgctttttcacttatttgacaatttacgtaatttaaactacaacttgaatggtttataaatagaagccttgaatatttttatctatttcattgaaaaagaaaaaaattctagtcatcatgcaattattcgatgttt

SEQ ID NO: 12091 - DNA, 6000 bp, Homo sapiens
ttccatatgtaagtcctagcagccaggcatctatttctcaggcaaacatccagaaatgtcctctcaaaagacatcagatggctatggagtaaagacttctttattctggaatggaggagcccctgagtgtaatgctttctcagaagtgaagtacaagtcaacaaagccttgcggtatgcacagagccccacactgctcactgcctcattattaaatataaacagaccatccacgattaccagactttcaaggacccaatataaacaaacattagaggaagaagaaaagctagatacatagggacagaggtatactggattataattatggtagaatcacacagactgtaagaaaatctcatctctagagctgcatcctctgaaatgaccttttgtttctgtgtgtttgtgttgtgaccagaaagatgtcacattttctgtgagacctggctgttcaccagtggaaactcatgttttccttatattcctagttatcctttaataagctccgactgaggtaatctcagtgtgttccttgaaacttaaaagtacctgtctagctcactgtgaatggcttaatatgtgtatttcatcagtttgaatgcttttagttacaaacaacagaaaactcaattcaaactagtttaagaactaaaaaaaatttattggctcatacaagtggaaagacaagaggtggagtgggcttcaggtaagacataatccactgactcagtggtgttttcaatagctcaattttttcccctctgttctttctgccatcatgaagggggagtattacctaaaagatactatgcaacttgaacaaattcttttcactattgttattgtttttcttgattttctttttggataactcacttatgccctcagagtatgcataacagggaagatattttgtaagatagttcaaaatgtcattctagctggcataaacttgaggcacagattctggaacagtttggatgtgtttcttcctaaaattaacctggccccaatgctttctcctggaatttccttatagagttagaattttgtgggtacaaatgcaaatgaattcaaggtcagaaggtcatgacctcccaatgccctttctttcatgcttagagagatgaggcctaatcagacacactggagatttcagagcctttatctctctataaacagtttgttatatgaagagagacagattactctgtatgttctcaaaagagaaataatttttacatttttctcattcctgggattctctcttagtcattctctccccctaatggctttctcctagacacatatatatccattatcctaatgttcttctctttcttctttatcttcttttttcaaccttgacttcttttcaatggagagaaaaaattaaggattatttaaaatgctttttaacattgaacaaactgaaaaaaaatttatctgaactcttcttttaattgagacatctgaggcaaattgaaaccataaagtcagtcagccagtagacaacataaaaaatctacaaactataataaactaaaactgcacagttgttatatattagatatcccttaggtagagggactggcaagcatgccatctagtttgcatttaaatgctgcattattaataagagtcactgctggctaaaggtgataaaaatagcccatcaccccactattaggattaccccaaatcagtccttgggaaaggatttggttcatagagttctaaccctgcagttctgtagtaacatctcccagcatgggggtctcacctacgtcttggctatctgctgttaaaaagcagaatgaagactgtgtgctcagcaggcaactaaaagaatcctctgttattttggtggatcaaaagtttaatttccaggatctgtcttttcagcagccgttaaaggttttgagtagataacccgggcctttcactagttttagagttggagaggagccacaaatgtaaaataatatcatatacatagtttatatttgtactgttcaattatgatgaacaataaataataaaccaacaataataatttaaaccaatctcagaagtttccaggactttttcccttataaaagtcctctgaatatgactcaaatttgagaaaaacaaattattgtggagaatgcctcactgaggatataggtggaatgaccccagagcctgtattaacatgaaatagaaagcattattaatctatttacgtatggggtttcaagccatcccatagagtagagcacctctactctatctgctttacactttgtctttctctgcaagattttatttcaactttaatgtttttaacttttattttaggtatttttttttaaactagtgcactatatccccggtggatttctagaaaatcttaggttttctggattagaacaagttaaagagaatagagcaatagctatacggattaacttcaaaaggagaagcttcagggtggaattatccccaaactctggataattttatgcaaggactaatctaaaccagatgcctttttatcctctgatatactgctgtttaaagagggcatgtgggctttgcttcgctaaaggagactagaacaatagcaccttttaaaccaaggtaaaattatttgttttaatctcatttatccacaataaaccagggaattaaatttctaaaactttcctctaattcagttttatgggctctttccctatggttcaatataaaaaatgccatttaaaattttaggactcaaagaattccttcagtagctagttatgaaattcttttcctcctacactaccccagcagctaacatttcatgcacgtacttcctttgtatttgagaatgaccagatttgaaaactgacaagtagaagtgctattcaaacaggaggatccctttggaatttctaagcaataagaaaatcctttccaaatgggatgccttgaggtgactctatgacaagaacacaaaagttatatggagaaattattcattcttgcagtcgtatattcatcctatttcatatgagtgccaaccaagtgtgaagtttttactaggctctgaggataaaatggtgacttagcccctgttctcatggagtttatggttgaagagggaagagacattgcataattacaaaatcaaatgcatatttacaaagtaggaaaaatattatgaagcaaaagcatagggtaccataagaatgcatcacaatgggtttatcgtagtttgtgggaatcatgtagcatctatggcagttccattcactgggacactgaacaagatgaccaggcttgagcagaagtatcacggctgcatttttttttgcaatctaggtttgagacaagcaaacagggaagccaaataaacacttgaatatatggataaatctgaaggtataaatgtaagattctgtaggtacgagatcataagctagaagtgaaaatgtatttagaggtaagagttaaaaggaaaagagggcccgtaactgatttttaaggaattccagcatctaaagattgggggagaggaggcaaagaagactgaagagtggcctggggacaggggcagatctacctggaaattgatgtagcttaacgttccgggtccttctcttgcctgggagcaaccctagcaatgtgtttacatgggcatttattttttgaatttttctaaagaaagattttttttttttttttggttaaagcagagctcccaattgtacaagcttcagagcccatacatccgcccttgactaagcggaagaagcaaaaccaagagtgtgattgcatggaattacaagaggggtggggtggggaggactctaggaagagagaggtcaacagctgtgaatgtgtttgaaagtccaaggaatatgagaaaaaagtatttttattcagaatattaaaagaaattcttttaaatgttctaaattggacttctgagtatcctttggtcctataatctaatatcagagggatattttgaaaaagagtttcttatgcagaaaaaaattcgtgggacttccaaattgaggataacagaaagaaaatcttaagtggcacaaaatagaaatgaatatctgttcttcctggggccatgcaactctaataacttttccatgtttactgtttttgctttttaattggatcatcagactaagaatgcaccctgatgtgcgaaaagttacttagaaagtgagaggactgcccccacccttctgattaaagcgcttctcataagcatcctatgccattcagtaagctacccatgcagaaagcatccacagggcagtgcacataaggaaaatctgaggagctagaaacaggctatcagtttccgcaggttgacaaaatcggcagataaaaatacaagactgccattaaatttgaatttccgataaacaacgaagaactttttagcataagtacgtcccaaatattgcatgggatatacttgtactaaaattattcctttttttttttatttgaaattcccatttaacagagcagcctatattttatctgaccacctcacaagtccactacccacaccccaggtcgagcggcccaggagcgagtttaaaaccccgcacaggcctgctcggccgcgtcccctgattggccaaggcgcgcccgccgccccgccggtcgcaggcgtcacggcagccccagcagcctgggccccgccaccgcctccgcggcagccccggtcggcgcaagtgcggcgcgcgctgggggagggggcgcggcggagcgctaggctggcgtcgggccaccgcgggattaagtttctcagtcacgcgtgagtgtctgtgcgttttgatccgaagctcctcgccgggtcgttacttcagaagagaagacagtgagcgtgggcgaggcgaggcatccagaggccccggcgacccctgctccccagtcctccgccccctcgcgtcgcggccctgggcgggcgccgcgagccgggtaagcggcgcttgagccccggcccagaggccgaggcgcgcccccgcgccctgcgcgcgcgccggcggggaaggtgcgcgggcgccctgggctcggcgcttgggggtgggggtgggggcggggatgggggtgggggtgggggtgggggtaggggtggcggcgggccgtggggcggtggggcggtgcgcttgccccaccccgcgcggcccggcgcttcgcggaagccgctgctgtggcttttttaaaaggatggggtctagaagtttcctttgctactcgcaagtctccactccccccagccccgcggtggataatcctagacctttcagcacccccgccacccctttcttttgctctcgctgactaagaggtttaaaagtttttccttttccttgacccagaggggcacagtcttggtgtcggggggctgggggtggggtgttagcctgggggcccggagcgcagaccaggcctccagggcgcgggagcctgttgctctcccctgcaggggccgctcccggacgccccatccgccgttacgtggtcccgggatgtgcgggttgcggtagagagtgggcagcaatgctcctggtcctgcgttctcgccttagccgcggggaccccgaggcgagccgctaattggtaccggtgccccgtccctcacccctggcaccggcgcccttttaaccgccgctcccgttggtgggagcacgttggtcttgtctctcccttagtctcctcaccccccgcgctgatgggcgtctttgtctgcgatttggcagccccaggatgccggatgttaccagggaagcgatgtttgggagacgctttgtgtcttgcggagttgcgcgtttgttgggtggtgatggtgtacatttttgtttgcgttctttgcagaggcacaaaggctgggctattcttgcctgcagtcacatggaaatcaagcggagactgcgggggaggagaagtggccaggcgccggcgggaggtagaggccgctccgtagtcactgggg

SEQ ID NO: 12092 - DNA, 6000 bp, Homo sapiens
tgcaaccttgaacttgcttccctagttcagccatagacgcccactttatttatctattgctaggacatttgtttcctttttgctattttctttataatgaactctctcaacaaaaatctcaatctccgtccttcatgcaaagaggttggcaccatcaaaattgtcctacttttaatatgttatttatattttgatagggaaggactttttaaatcacttttctatacccattttacttccctattatcttgggactctgttaattctatttacttaaattaagctgttgtgaatagactctactcacaatttttttttagaaagcacctgtttcctctgctttctacatcaatccacatttcttcaaaagatgagggatgaggatgacctagtcaaagccttgcttcctcccatattggaagagtccctgtgtgaacttatgagccttattacttgtaatggaagctactttattgtgctattgacacggaaagggagactctttcttgactttgagtcctggggagtggaaaactttcatcatcaaatgagttgttaaaacctagaggattacacctgtagcctgacaaactcatatttattgccttgcatagagagatgtcactcctaggcaagagggaggaaggaggcatcttttgtaaattgaacttccattgaagaattttgaggagcatctaagggaagcaggtatccattttggattggttgttttgaggtgggattaggaaaagagagatttagccaggattggatgctgtcatgaggggatgatggctgagcaattgggtatctctagtaataaatgaaaatagccagcagtcaggggcatcattggtgagaagtcagcaatcacctaaagaggggatcattatggcactttataactgctgcatgaccttggcagaaagtgtttcctgctaattttgcagctggctttatctgtgtctgtcctccttgtctgattagtggcagggcttcttttctcttttcagtccaaattgattctcactcttttaatccaaaagagattttaactctttcagcatcctagactcaactcatcagaacattcactaggatgcgttttcctactagcacttaaccaagtgtaagaatctcaggttcatcatgatttaattgaatagaaacttctagagccaccatcaaacaatccaaagttgaggtaaagcaatgtggcctaacaggttccaatgtagtatacttagaacctttccagatgccccactactctgccttttgataataccactgccctcactaatagtcttttccagcttggagcaggtcatcaccttttgccaaaagcctaaggactcttcattgggaatagcattgtttctgaggctcaccatgcttggaatctgttccacatttccagccctctctctttccatgtatcctacctttgagccacaccagagggattcttgcactttcatttctctatgtttttgcttacactttcctctgtcctgaaatttctttccctcctttcccccaatcaaaatcctattctcacttgcctgatacaggaaccattctccaagaagccacccttgaactatcccatggaaattactagtttcttcattagcacttccataaaactttccttgtaactctgtttagcactgctattgtttttttctcctaagcacacagtcgtttttgtttgtttgttttgcagttttccttgatatttggggaaaaatgtttattttacctactctctacattctagggatatttcttagcctgaagttcctggcttcgctgtgatcctttggaggcataggaaggtggggcaacttgtgaaacttcatatatataaatttcatatatataaatatatatgttcctgtatgtgtgtgtgtatatatgtgtgtgtgtgtgtgtgtgtgtgtgtatttgtgtatatgtgtactttgctggggtccacaactttcatcagatactcaaagagatgtgtaacccaaaagagaagaggttaagaacaacttttagaatattagattgttatggcacaggcactctgccactcaaacagatgggagagacaactataggcaaccaagaaatcatgaatgtgcatcaaatatgggtgcttaaggcatggtacccagctgggcaggtggagaatgccatccatccaaagctgccaagggctattagccagtactgattaaactctggactgcactgatttttggaaattgcactaaaatccagatcctccctagtcacggcacagaagcacaggagttggctgtgtttaccctcataaatgccctgagtgtgcctttgttagaagcttggttggcagtggcagcaatgctacttgtccttgtctactttttctacttccagataaatattagtttgattaataatcacatttcagtttgtcccaggccccatgaagtagattagaattctggagggaaaaaatatggtacgatctatatcgtctttccataatatacccagtaaatagaaaatcttttcaaaagattacctgatgccacatctccctcacccccttattgttacccaggtgcctgaatgtatgggttgcaatacaatataaccaatgattagcatgaatgatagaaccagatgacttgaccttcagtgtaagggataggcaggcctttgattatactcatgaaatgcccatgctaaaaaggttcatgtttttaaggatgtttctcctgcctcttctctcctattcccttgcttaaaaattctctgtggaattgatttggctgataaaagacaggctaacttattttaaaaagggactgaaaaatccatgcacttccaattgtcatgtgcaatcatggacctgtcaactaattcttattttggcagttttgagatcacttgtcacaaattattccctctcacaggggtatctgaagagaaagcaaaataatatgcaattcatgtagctggattcaggtggaggggattctacttttaatatgcaattgggtagctggatttgggtgggggggggattttacatttaatatgcaattctggtagctggattcgggtagggaggagtccacatttaatatgcaatcaggtagctggatttgggtagaagggattcacattgaatacgcaatcaggtagctggattccggtgggaggattccacatttcctcttccttcaaagtgattgtttatatgaaatatctccttcttttcaaacagagaaagttacaaaaatcctactacatcaaatgatttatgaaaaataaaggtaattctatcaaaagcaatcgtgactagtctttcaacctcgctatgcatatatcggggagtgtatttgttaacctgaaaggcaataaaatctgcttatgggtaaatcaattcctaccactgggttcttttgggaatatctagtaatctaggtcagtaattctaaaacttgagtgtgtattaggatcacctaaaaggcttgttacatcacggattgctgggctacacctaaacagtttctactacagtagatctgggatggggcaaaagaatatggatttctcacaagttgacaggtgataccgatgctgctggtctagggatcccactttgataaccactgaccaaagtttttaaggtcacaaggtgtttataattagttcagaaaccaggacacaacatgtttaaaaatccttagcaatacaaggtaatatgaggccccaaacaggcaacaatgtgcactatataagggcagtggtgagagaactctggtttggcaagatttccactctcaaatctggatagggttaagatcatcagagagcagggcattctagaatggggaaatgaaccaaattagttggagctaagactggagaggtaggtagggatgtgtctgtggagggcttttaagcacatcttataaggaatacagattttatacaacaggtaatatttcttccaccaacacactgtctcctcctgtggcacgtgggcagaaagatctagctccacattactgcaaacggtttaaccttccccaaatactgttcagccggagtgaggtgggaaagttagtagatctctggtgtttggtgaagataccaagttagactgagaggtggattacttgcatcgctgagtccaaaagttgtcggcttttgcagggatgggaaagcaggaaacttttggaggtctcccaaaatataagaaaagattgtttgggtgtggatttaggttgaggacaggaacaggaaatatcctgggatgtctgaggcaacccaatagagggtctgaagtggacgagaccatgcactacagtgcaatgcttttccatctttacggtgcaccccaggagtcacctggtgatcttgctgaagtgcatgtactgattcagcaggcctgaaattgtgcatttcaaagattgtgagttcccagaggatgctgatgctgcagaccgcgctttgaagcaaggtaccatgggacatcccagaacacctgcggggagagaggcctgctggccacatcccccgaagaaaggatacatgcaatcttttaagctaaggcccccatcctgtctctcgggagaggtgagcagtgaggatatggggacaatgagaaggacggctcaagtagggctggggaggggcagaggcgcccaggcgcgccaggtgcaagcgctctggagagtgcggtctgcctgggtccgcggctctggggctgcggcgcgattgcaggagtttcggccctcagcggctcccatcgcggctcccgggagctaagcgagacggcgacggcggcagtcgtccctccccacgcgggcgcgcgggcatgcggacacccactcggccggtccaggccctcaggctcccggaagcggaaggggagagcggcccggcctgggcggcggcgccggaggaggcggaggtggcgcggcaggaggaggggaaagagctgctggcggtcgggagagcggcggcagcgagaggcgagccagcggcgacggtgagtgtgcaggcgcgggggcgaagcggccgcccccacccccatccccatccgcacccccacccccatccccggcccccgctccgctctgccgggcccgcccgccgctcctccgcgccgggacgccctcacctgttcctgcacgccccctgcacctgctctgtttggaacccgggggtttctcggtgcctccccgccccaggcctggcctttttcagagcgtcttctgctagagctacagccccttgctaagtgctcctccctcaactgggggtggggggttcctgctctagtcgagacgatgttggctagttatttatttatttattttaaatctgtatcctgagtttctcgcttgtaaactacagtttctctccccgcacccccgtctggagacctgcactgggatcccgggtttctctgtgctattccagagcttttcattcattccagacttctggtgtgaagctgcagagaggacaaacagtttgctcctttattgaccttctcactcctctcctcttgatccaaagaggttttcggaaaatggcttatggatggcagcagtttgcacttgttactgttcactgtaacaggtcgctggattgtaactgcagagtccatttaagttacggtctttttcaagctatatgtgggtcacattttaagatcccttgagagtcagggtggatgtctgtatcaccagggctgagaggacatgaccaattattactttaaaatattgcaatatagcagtctctaaaagtagaagagaaaaaaaaatcaaggtcattgtgggcgggtcataaattatattgtaaagttacagtccaaaggcgactaaggataattaagtgcaatttaaaaagatgtgttaaataggtcctcagcctactatgctaatatatgcacttttaaaaattcactgctttccttgtggtaagaataatattaataacagt

SEQ ID NO: 12093 - DNA, 6000 bp, Homo sapiens
tcaacaggaaaaatgcaactaattcttagttaggcagggactatcatatactatgaggaatagtagaactcgggctttggagacattattggattcaaatggagctgtttgttattgggcaagctacttaacctcattgagcctcagtttcttcatctgtggataataatagtgataaaactgatgagattgaaaagagattagcaaacactctagttcatggtaggtgtgtaacatatcagttccctttttccaccactgatgcccattgtggtagttattattgatcatcaccaaatctttccattcttctctgaagcacacaatgcaactgcactttcttgctcccttgaaaatagatatgaccatctgatttgcttcagtccatgagatactagcagcagtgatgcaccacttccaagctgaagctttaaaagcaagttctaggtttgccatgcatcttttctccctgcaacagcaaatggcagtgttctagatagtgaccagcttggggttaggagttaggatgacacagcaaacttcacaaaggacaggtagcacaagtgagaaacaaaaaccttcattgttttaagccactgtgatttttgaactttttgttatcataacataacctacatcctcctgattgactcaccttcctttaagtaactgtatttgccatcatcttaattcactccacagatatgtgttagccaaaatgccaagcgcagggctagatgctgagaaatgcatgatactgactctttgttctcacggggctcacagtaatgggaggagagtgagggtcattgtcaggagtcttttaaaaataaccccagttcttttgtttagctaaagtcgaggtttggaactactggttttgtgcacattgaatacttcataagtgtgctgactgcctgcaattttaataacagagaagctagagattttaataagtcagaaaaaaggttgtatatgtggagagaatgaagaaagaaatgattaacaaagtaagtatgagtactgtactttattttgtccctgggttgcccacaactttctgactcagctatcctatcttttttttttgagatggagttttgttcttgtttcccaggctggagtacaatggcgccgtctcggctcactgcaccctccgcatcccaggttcaagtgattctcctacctcaacctcccaagtagctgggattacaggcacctgccaccacacccagcattttttttttttttttttttttttgtatttttagtagagacagggtttcaccatgttggccaggttggtctcaaactcctgacctcaggtgatccacctcagcctcctaaagtgctgggattaaaggcgtgagccaccacacccacacctggccctcaaccatctctttcaccttctgctcatgacagtttactagaatttttttcccttgagactgaatgtcaagtcaaaaacaataaaaaattgctaatcattactatgactccagagctacttgcttctttaaaaattcctgaaattataaaatataaagccaaagcaatgaatttctaatggtggaattgtagacactgtggccccctggggatgttatttcagatggggcaaggggatattcctaacctattttaaatcatgccagcctagataactatgtgaaaattatatgggtgcttagcaaaactattaactagcacccctttggcagttttacattaaaaatcctttattagcttaggtatgacctagtgatttttaaaattcattactgatttttgaaagcctcctcttcaaaacaaaaagagcccattgttcttaactggtaataccaattactcctataaactatatgttaaaaccaatcttacagctaatagaagggtaaatatgaggccaactaatgtttatacttacacaagtatctacaaatataaagaagtagctccttaataatttctaaaaagagacccattgattaatctacttgagtctcttagcaaatgctactgtttaataactcatttgatggtagtaaattttctcctgaagctaccctttctttatgactaggcaataaggtctgtggatctgggagacctacagttgttattcaattcctctgcttccacgtagtgtgatttggacaaatgacaggccctgcttttctccattactaccaggatggaagttgtagccttctcaactgttgtggcaattaattgccaagttcttggtcaactgtcaaatcttgagtcgaatatggatctcattgagatgctttggaactgtgtaggagtagtcactcccacaacatttatctcccccttctcccttactaagagagccctgattttctaaaagatgactatgtgctcagttgaaatactgtttacactcccttgcagctatgtcttgtgaccaagtcgtgatcagtgaaatgtaagtgaagcattgacagaatcccttcctaaataaaaagacaaagcctagcaaggaggccttctgcctttcacccttcactctttcccttcttcctgcctggaacacagatgtaatgcaaaagaataaaccattttgtagccatgaggataaagccatacattaagaaagacagatcaaaagatctgggttcccagatagcatcttgaagctattttataaaccctgggcagtctgctttcagacttctttttaccatgagaaaaataaattcttgtttggtttaatcaccaagaatgaatttttattatgtgcaaccaagtgcaaatcccagccaatacaatctatggactcatgaggtcttcatctggatctcattcctcttctcaccgaatcaagactcagggtcatctctgagctgtaggggaaaaacctgaaaccataaaaattctagaagataacataagaaaaactcttctagacattgtgatattcccctccgcaccccatgtagccagaggcacctattgcctcagggaagaataggattgttaaactaggaaagtagacaaaggcagggtaaaaataaagcctaattggttacccagaggtccaatttgtatagaaaaggcaaaataaatgcacaattgttttccttttcctaaaacagttttgaaaattatgagctggttccctctgaaccatcaagcaatcaatctgttcagttgtttttaaaatattatcaattaatagatataatcatgtttgatgtgttttaaacaattgcgattatcttttttttttttttttttgatgctcaaattagcccgtctttggtcagtgacagcctatttgaattgtccccttcttgacacaaccctagtggtagttgatagttttcttgctttctgaaaatatttacagataaaatgatatgatgctctgggatttgcttcaaaatgatgacataggaaaaaggggtatagatgaaatatgactgtccatgagttcataattgttcaagctggttatggccccatggagattcattatactactttcttacatttgtatatgtttgaaattttctaaattaaaagttaaagataaaaaaattcagtcaggcacctatagtctgcaagcacttgggagtctgaggctggaggatggctagagcccaggaattcaagacaagcttgggcaacatagcaagattcagtctcgaaaggagaaagaaaaagaaaagttgagtcttgaatgcctggctttgattggggggtggggggaagaaaaatatttctaagttccctaggcttccctttacttattgatgagtaggcccagaggtctgactacagagctgtactctaagtcagaggtcatgagctctcaggatatacccattacccccattgtaaggagggcatgaagaaaccctcttggatgggggagagaacagaaggatggagggtaaggagaggggaaaatgtgcgaaaagctttcagagcttcacgagttgggtacctcttggcagctttgctggtggtcacagggttgggtaaaaggggttccctcactaccaatttgtcttaccaccgtcttccattctttggcccagattctagtctctcatccccaacaagcctgattctatttcttgtggtcaaggggatcttgctttccagataggacaggaaggagcactgggctggacatcccgaggccaaaagccgaagcctgtcagtgattcaaaatgacacggggttttgggtctcactttcatcacccatgaaatgaaaggtcaccctgcaagactgaagcccctgcagtgtcccaagcatccaaatccaacactcaagaaaccctggaccccaacagcctgtcctgcaggcctccgtgccttttcattgaacgtcttttccaccattacacatcacatcgcctcctaaagaaaagcgcgactgctatcactttttgcagataattggagaggcggtgcccagcataagatgaccccaaagttgacagcactttcaggctttgtgaattaggcgcgtcaccgacctgtacgatttctcctctctgcccttgctcgcctgcaaatcctgacccccgtccacactgcggagaaatctcctaagagacggctgccagcgtcgcctctgcgcccaggaggcgtggagcaaaggactcgggagctgagcgcgctgcggccccgctcccagcgcacagcgcacagcccagagggaggggccggcgggggccgggcagcgccagactcggagcgccgggctcacagcggctcagtctcctcccgaacccagcccggctggcgagagcggcagccagtgcgagccagagcccgggcctcagagcgggtaggcggagggccggcggactggagcggcgggccgcgctcgggggccccgccgtgtgcgcgtcctcccatcttatcctggtaagtgcgggcggctgcgccccgcctgccgctgtagccgctgtggcggtcgtccccgcatcccggttgcgcgcatcccgttgctgctctgcaggctcacaggtggctctgccgtggatgtgggcgccccaggccccgctaggagttagccaactctctgtgctccggggcgtggatttggagcccccgcctctcctacccttgcttttggcttgggatggggggcgtggggcagggcctgccgtcgggggagacgcgcagaggggcgcttccattccccagccacctacaaacgactcagggggatgcgggccaagcgcctcaccaaatgcaacccagctccaagctcacaggtggggcgtctgtcctttagatttattttcctattaatccaccagggaaagtttgggaccacgcaaggcaaagttggggcgcggctgggggcgaacattctcctacggaggcagctcccggggagacgagcggtgggttttcagggggagcgaggatcgggctggagatgactttgcgcccggggagttgaatctgtccctgctggtcgcccgggccgggcatttacacaatcccctgagtgctgtgaatcgcttaatcgttcctgctaagcgttgacgttcgcagccacctgggaatctccgtgatggggtcgggttatctcaggagtagcagcaactcagcggggttgatttgtgctcttgctttgctctgaaaacctgagctccagctaatctcagtatttaagtggcgtgtgtttaattagcttattttacacctgagattatctcagcgactgcctccaaaatgaaatcgttgatatggaaaagaatagtctttttaaagaaaaactaaaaagagaactcttcagaatatcagctgtcaagtctggctattttacccatctcctccgtgggatagagaaagaaaactctgctttggatatctaacctattaaagtcagtggtggggctattttgggcagattttgtggacagaggtattgctacaacttgcgtattgtttatgaaatacacatgtggtctctcgaaatagcctacttgttatttcactg

SEQ ID NO: 12094 - DNA, 6000 bp, Homo sapiens
cataaaaaattggccaggcgtggtggcgggcacctgtggtcccagctactcaggaggctgaggcaggagcatggcatgaacctgggaggcggagcttccagtgagccgagatcgcgccactgcactccagcccgggcgacagagcgaaactccgtctcaaaaaaaacaaaaaaaaaaaaacaaaaaaaagggggtagtagaatgatggttaccagaggctgagaaggtggtgcccagttgggggcatggggtggtgtgggggagagaaggaataaattctcatgtttgatagaacactagggtggctatagttatcagtaattaattgtatgtttcaaaatagccagaaaaggagattcaaaatgtttctagcataaggccgggcgcggtggctcatgcctgtaataccagcactttgggaggccgaggcaggcggatcacgaggtcaggcgatcaagaccatcctgactaacacggtgaaaccccgtccctactaaaaaaatacaaaaaatcagccgggcgtggtggcgggcgcctgtagtgccaactacttgggaggctgaggcaggagaatggcatgaacccgggaggcgtagcttgcagtgagccgagatgggcactgcactccagcctgggcgacagagcgagactccgtctcaaaaaaaaaattttttttaaattaaaaaaaaaaaaatgtttccagcacaaaaaaaatgccaaatgtttgaggtgatgaatatcctaattatcccgatttgatcattatacattgcatacgtgcatggaaatatcacatgtaccccataaatatgtacaattgtgtatcaataaaaaaattaatttttaaaaatggaaatttaggcaatataattacaggacaatagccattcaaatcataatgctaacaggtaaaaaggttagctgtttattaagcaggaaggaaaaggaaagtaaatatatatatggatctggtctatgaggcctttttttttttgagacagagtctcgctctgttgcccaggctggaatgcagtggtgcaatctcagctcactactgcaacctccacctatgaggccttttaatgtttgcattaaaagtctgtaactgcaagtatttacagactttttaatttacagacaagtatttttatcaatgcaaacatttatagaaaagtacttttataaatgcaaatatttatagacaagtatttttataaatgcgagtattttcatgtctttatgaaatgcaaaatgaataaatagaagtaaaccaaaaataataagagtaaaagctaggtcatcaaacagcagatgaaaatgaagttttctaaataaattcttctgaaatgtgaatatacgtatgaatcagatggggaccttgttaaaatgaaaactgatctcaaagtatagtcaagttctcaggggatgctgatgctgctgatattcaaactatacttttagtagcaagaatgatacatgcttggcacacagcagtaatttgtattacctgtaacagtttctcatttgtggttttcatctctaggtacttgacttggttttcaaaagacatatttttgataatgtcatctgttgcttgtttttcctgttcaatttcttcttcgacacttctgatttgtttttctttcctaaaatcagaagcacgtaatattcctgatactatattgaggaaaaaatatccaattattttatacaagtcatggtcctaatttaataggatacttaaagacattcaaccacagtgtgtgactgaaaagtctttatatttgtactaaaaaatgctatttgacctatataaaatttggccccattagcacaaacttatttttacatctttctcttctccatccctaaattcctctatttccttactctccattttattttactaagaaatcacaaagattaccaaaaaatccttaatgacttatatatatgaggatgcatttatacttttttaaagttataccttcaaaagacaaataagaggctgcgctcggtggctcacgtctgtaatcccagcactttggaaggctgaggcaggtggatcacctgaggtctggaggtcgagaccagcctgggcaacacgacaaaacacccatctctactaaaagtacaaaaattagccacacgtggtggcgggcacctgtaatcccagctacttgggaggctgaggcaggagaatcgcttgaacccagtggggaagaggttgcagtgggctgagatcgcgccacttcactctagcctgggcaaaagagcaaaactccatctcaaaaaaaaaaaagacaaataagttttagaattgtggttttaaagcatcctttagccataagtttttctgactaaattaaatactgtatagaagtttcccgtgtaaatcatccagtgtggctctgacagaactagggagtagagaggcctgcagtgcaatttgattttttagttatggctttagattaataatatgctttgcttaagttctcttttacttactgctttagttaacattgctatttcacaaatttttgctattttttagcattgtaaaatattaagctcatttctctaaaaacacaataaacattacaaacataatcctataaaagtagtaatagtgaaattaattagaagcaataaccatttttatcacgtaatcaaaagaaataccaatgacatgtcacttgttgcctaggcaaggtcaattattgatagggtagagaaaaactctgaaaaaagaataggtaagatgccacttatctaaatactttcaagatttacattttataaaaagctggattgaacacacattttcactcccaagatcattaatttctattttgagtttcaaaatctgattaacctatcactatttactctctttcgctcatagataccaacttctatagttttcacaatcaccagctaagcttgtggatccacatatcccctacacaccttctacacattcatatcctactactagaataaacaacctaaactcagaaatttccctaccaaaaaaaatctcaaaataaccaaataaaagatgaacatagtaaagcaacctggaatttcaatttatttttgtttcactgttggagaagaagtggtatcttcacttggagcttcaattacaacagtaaaacaaatgtgtttcctgctgctacaatttgtataggtatatgagctcaaagaaattgaaaggaaagtatctattttcataaattaaggatactgaagcccagtggaattaatcttttggaaggaattcattctaaatttgattactgactaccaacagtgtttcttctttcaatgtaggaagatgagaactaatgttataaagtattccattttacagaggagaaattacagcataagaaaagtaactgactttctaaaggccatatgatgtccaggtgtaaggtctttttgatgctttgagtactttgctcctgttataacttggcagtaaaaccactgatgatggtgtcataaaagtaagtaaacaggctgggcatggtggctcatgcctgtaatcccagcactttaggaggccgaggcgggcagatcacgaggtcaggagatcgagaccatccttgctaacatggtgaaaccccgtctctactaaaaatacaaaaaaattagctgggcgtgatggtgggcgcctgtagtcccagctacttgggaggctgaggcaggagaatggcgtcaacccgggaggcagagcttgcagtgagccgagactgcgccactacactccagcctgggtgacagagcgagactccatctcaaaaaaaaaaaaaaaaaaaaaaacacacaataataagtaaacaaaaacgttgaaactcaatagaatacaaaacttggtggtatctttacaatttgaatccctccctacctcctttcttttctctctctctcctttccttccttccttttcctccctccctgcctccttcccttcctcctcctcctccttcccctccccctcctctctcttctcttctctctctctctctctttccctctccctctttctgtctttctttcttgacaggtaccacttgtcacccagactagactgtggtagcacaatcatggctcactgcatgctcaaactcaagccatccccccacctcagccacccaggtaactgggactaaaggcacacaacaccatgccctgctaatgtttttactttttattttgagtagagacaaggtcttgctaagttggccgggctggtctcaaattcctgagttcaaattattctctcatcttagcttctcaaagtgctgggattacaggtgtcagactctgcacctgacctcagtttgaatgcttctaagcacaaaataccatcaggacaaacataaattaatttagcaacagtatatctttcaaaagtatgcattttcaatattgtaaactctaaatcagtaagtaaaattgttaatactttaataaaattttcaaagagtaattaagaaacacaaaggtaggctgggtgcagtggctcacacttgtaatcccagcactttgggaggctgaggcaggggtatcacctgaggtcaggagtttgagaccagcctggccaacatggtgaaaccgcatctctactaaaaatacaaaaattagccaggtgcagtgccgggagcctgtaatcccagctactcaggaggctgaggcagggaggagaactgcttgaacccaggaggtggaggttgcattgagccgagatcatgccactgcactccagcctgaatgacagagcgagacttcatctcaaaaaaagaaaaaaaagaaagaaacacaaaggttaggcaaacagccttacttgttatactaaaaaaggaaaagatgactttaagaaattattcttctagtcaatcttttgctaaggaagtctagtttttttttttaaatcacctgttcactgggtacaaaggttaaaacaaagtgaaatgtaatcatacgatgtactttttttaatgccgttgaaacagagttaatttcctttagcacacaagtcttagagacaaaagaaaaaaaggtaagatatgtatatttatagctttggttattgttgtattttttttaatcatatttaagtttgttaagtctgtacaaccatctttgcctttaagaagtgatgaaaaataagaaaatatgattatattttcacatggtctacctcaaaaatactatatacctgagacatggccaaagggtctttcctaaataaagttagaatacaatactaagtaattgttttgcggggggcggggggggaaatggtttcatctagccaatcaaatttataagaatttttattttaaaatatgttaatcacagagcattctgaagtgacactaatctaaaagccaattggcaagataaaaaaaagactggccatgagttgatgattattgaagcaggctgataactattcttcttacttaggttttttccttgaaattttccattacaaaaaggttttaaatctgaaaaaaatctacacaatagttaaataaggaaacaaagttaattgtgtattattaacatcattctctaaatacattgaattctggcataaatatctaaaatacttaatggaaaaactacatttagattttaacaaaaccaaaataattacagcatctctttatttcatagcatataataatcatataaagtaaataacttaagaaacatgtacttgaaactttattaagaacaatgcttctttttcagtatctaccatttcctttgagtaaagctctttttttttcagtaacgtagatcatatgctaggtaaaaatgcacgtaattttgtgaaataacaaaagaaactgatattccatcttctattccagttttctattttatattagctcctaagtaatcactatatgaaactcaactatcatttcaaaaaaaatccaaattagaaaatattccaaaaggagaaagaaagca

SEQ ID NO: 12095 - DNA, 6000 bp, Homo sapiens
tctccttgttggcctacctgcagtacaaagcttttcttttctcaaaaaccaggtgtcacagtattggtttctagaacattgggcagtgagtgcttttgcgctttggtcggtaacacctggatctgatttagacaatactttggacctgaagtcttaattagttgaacttttgggggattttaagaagacactaatgtattttacctgtgagaagaatctaaataatctgtggccattgggcaaactactgtggaataaaggtgcctgacaattctttgtccctcctcccatcaagaggtggagtcagccaggtgaaatggctcatgctggtaatctcagcactttgggaggccaaagcaggaagactgcgtgagctcaggagttcgagactagcctgagcaatatcgcaacatctcatctctactaaaaattttaaaattagctggacgtggaggcgcatcccggtagtcccagctactcgggaggctgaggcaggagaatcacttgagcccaggagtttgacgttatagtgacctatgatcacaccactgcactacaggctggttgataaaggaagatcctgtctaaaaaaaaaagtaaaaacaagaggccgagccagttttattccccttgaatctggcctgccctataaacttgttttaagcaaaagaatgctttagaagtgatgctaaggctgggctttcagggatctccatcttctgtatttttgaaatgctcctttttggaatgcttcctctagtttgtgaggaaacccaagcagccacatggagagtcctttgtggagagatccaagtggagaatgaaggccccatgacccaacccattctgagtttccagcccccagacagccccaactgccattcacatgagtgaagccattttggaacttccaactgtgccagtgcctcagctgacaccatgtgaggcaaagctgcccagccaactgcaaaactgcgagaaattgttgcttcaaaacagtaagttttggggtaggtgttacgctgcaatagatgactgaaataactgtctaccatgtgccgggcactatttgatgcccttctgatccatgagggtaaaaacagaaatgtaacctggcaggtgcagaagagggcgccataggagggcagaggaaggccagctgcagggagaagcagggagctggtgattctgggcagatgagcacatggatgggccaacggccaagcccccatgccagcttttggccaatcagcactgcaacttcctcctgcatttgtctcgccggatgggattaatttttcacctgacgaagtagagagtggaaaagagctggagacagtggggagaaaggttgcctgggtctgtctcactagcaccagttaatgtctggactgctggacaatgttgtcccaaaggtttctgggccatctgtattatttgtaattgactgcttctaggtgcctgtggatcaggggcagctgagactagtgctcaggcctcagtggactctgcaagttcctgagggataggcaatcagcaagtgttgttccttttcctcgatttctggccacgtgtgtcctgggacaggtctgtgattcttaataacccccgcagtcctgtctcctggctatcatctataccaatggaagacacatccccatttccccctccacttaattttcagttgcaggactaatctgacccaccctcactcattggccaggccgactttacccctagacacaggatgctggggtcagcttcacctttaccaactccttggagaactccactttacgttctaaactaagttagcaataatttttcccttctctccttcccacatcattaagatgatcacagtatttaaaaagtattttaacaaatatcggccgggcacggtggctcacaactgtaatcccagcactttgggaggccgaggcaggcagatcacgaggtcaaaagattgagaccattctggataacacggtgaaaccccatctctactaaaaatacaaacaaattagccgggcatggtggcaggcacctgtagtcccagctacttgggaggctgaggcaggagaatggcgtgaacccaggaggcagagcttgcagtgagccaagatcacgccactgcactccagcctgggtgacagagtgagactccgtctcaaaaaaaaaaaaaaaaaaatctaggggctgaagatacagtagtgaacaagagagaaatttcctgttctcatgaagctgattttctaatgagggaggcaagacaacagaaaataaatgcataatgttgggtagttgatatccactctgaaaaaaatcaagcaggttaaggccgggcgcggtggctcacgcctgtaatcccagcactttgggaggccgaggcgggcggatcacctgaggtcaggagtttgaaaccagcctggccaacatggtgaaatccgtctctactaaaaacacaaaaaattagcccggcgtgatggcaggcacctgtaatcccagctactcaagaggctgaggcaggagaatcgcttgaacccgggaggcagaggttgcagtgaggtgagattgcaccattgcactccaacctgggggacaaaagcaagactttgtctcaaaaaaaaaaaaaaaaaaattcaagcagtttaagcagatttgggcaggaggccattctgcataaggtagtctgaaaaggtctctgtcataaggtgacatttaagagacctgaattgaatgaaatattggggacaagtgtttcaggctaaatgaacagcaagtacaaaggccctgaggcaggaagaaatatggcaagttcaaggaatagctatcaggctagtgtggctaaggcaggtccagcatggtagagtgacagatgtgggtggggagggaaataggaaccagattgaacagggtttctgtggatttggttctgaacaaaatggcatgatctgatttatgcttacaaagatttcctggatgctctgtggaaaacagactagggaggaggaatggaggaggtggaagcagggtgaccaattagtagctgccatataacccagggcaagatgatggtggcttgatcgaggatggttacatcagagttggctggtggtgaattttgatgttttgaaggtagcactgacaaagctggctgagggcttgcaaatggcattgagagcaagagaagcacatcaaggacaccttttagattctggggaactgaataaacaatagtatcactctctgagggaggtaagaacgggagtggtgtgtaaggagtaggttgctgagggcaagatgtattgtgtttgagatgccagtaaaataagcagttgaatctggaggtcagggaagagatctgggctggagacaaatcagtgatcagcatttggatattataaatcattccgaggcagtaagtgtagacacaaaagaacatcatggactatggctggggccttcagcaactggggaagaagtccagagaggagacagaaatggccagtgaagtgaggaagatcagaaggacctggtgtccaggaagtcaagtgaggaaagttgattctgtatgatcacaaccaaagtgtcaactcataagccttattttctcatctgtgaaatggacaccgtaacaccacctacttcatggcagatagtactggcacacagcaaactctcaaaataaggtagctactgttattccctgatggttggctgccagagccctcaacttccctatccacattactgacagcacctccatgagtctttctctggggtgaggtgtctctgctcactcagggcctgaggcctctgggtcaaatcgaggtcaagtggcttcagtgcctaagtctctcacccacacagccttcagcccttacttgcaaatcaacaaagggtaaacctgtagaaaacatgggtttcggagccagaattctgcctcttgccagctgtgggctcttaggaaagtttcttaatctgccggggccccactctacgacatggggagaactgctacttcatgggacagtgggtagcccagtgtagactgtaacgccggctgatctcctgcacgctggcctgggagttagaggcttcttgctgctctcctcttcaaagtatacaggactcccgccacacacacatctggaaccaagctggtctgagagccccttatagcccaggctacctgatggggaggcacagaagtggcaacccgtccactttctttgccgcaggaccccccgttaagcagcggggtccagccgggctgagttagggagggggtttcgaacgtgccactcctcgcccggcgtcgaagcccgtttcctgggtaacctttttctgcctctcttcctagcccaccaaggcccactggccagaacgccgccgcggccccaaaccactccagataaccacccgccagctgtcctctccgttctctccgccgccgcgctgcaggcccaggctcgcacccgagtcccttcgcaccccaggaagtggcgcggcctgtcgagggcagcgtggaggaggaagaggaggcgcggctcaacgcgaccgaagctccgccgcaaaggctcgggaggaagagggcggtgcgcggccaagcgtcggagctgcagtcatactccggggaccccacgacggcgccccgcccgctgcccaccctcccgaggccccgcccagcgcgcccatcccgccacgggctgccccgccttcccgccctcgtccagaaaaccccgcgcccggccccgcccccgccttcgccggggccccgcccctcccctctccgccggcgcctcgggcggcttctcgccgctcccaggtctggctggctggaggagtctcagctctcagccgctcgcccgcccccgctccgggccctcccctagtcgccgctgtggggcagcgcctggcgggcggcccgcgggcgggtcgcctcccctcctgtagcccacacccttcttaaagcggcggcgggaagatgaggcttcgggagccgctcctgagcggcagcgccgcgatgccaggcgcgtccctacagcgggcctgccgcctgctcgtggccgtctgcgctctgcaccttggcgtcaccctcgtttactacctggctggccgcgacctgagccgcctgccccaactggtcggagtctccacaccgctgcagggcggctcgaacagtgccgccgccatcgggcagtcctccggggagctccggaccggaggggcccggccgccgcctcctctaggcgcctcctcccagccgcgcccgggtggcgactccagcccagtcgtggattctggccctggccccgctagcaacttgacctcggtcccagtgccccacaccaccgcactgtcgctgcccgcctgccctgaggagtccccgctgcttggtaaggactcgggtcggcgccagtcggaggattgggacccccccggatttccccgacagggtcccccagacattccctcaggctggctcttctacgacagccagcctccctcttctggatcagagttttaaatcccagacagaggcttgggactggatgggagagaaggtttgcgaggtgggtccctggggagtcctgttggaggcgtggggccgggaccgcacagggaagtcccgaggcccctctagccccagaaccagagaaggccttggagacttccctgctgtggcccgaggctcaggaagttttggagtttgggtctgcttagggcttcgagcagccttgcactgagaactctggtagggacctcgagtaatccactcccttttggggactgacgtgaggctcccggtggggaaggagactgacctctcggttcacgtgtcttgccatagagccactctcctgagtgggtttttctcctgatcgtttgggccaagtgacttctctctgaacctcatatttctcttctgggataataaatggtcaccctttcaaggggttgttttggaagatattgtgaacaatggtaaataag

SEQ ID NO: 12096 - DNA, 6000 bp, Homo sapiens
tgtgtgtgtgtgtgtgtgtgtgtctcactacagagaggcttccgcgtgcaagaccagacacacataagcagatgcatgtgtgcgcacatacacacatacacaacacacacacacacacacacctgtccatccacacaggcacatgctcacatataggtatatacaaagacacaaatgcttctcacacatgcaaatttcttcagtgttgtctccctggctgcttccgttaataagacccctcttccttcaggaagccttccctgatagctccagctcatactagaaagtgacaagtctgagctcaatccctggtttcagatgccaagttaggcagctccatataggctcttttaggatggagtaggcctaggttggaattctgggttctcgacttcaggggatctttgcccttggacaagtggctgtgcctgatcctgtctgccttggtctccatctgctctgtcctgaaggcccatggatgattctgagaaggatgagagcctgggcggggggcgagggggagttctggtaattggtgggtgtgagagttaaagaccttcctgggtcctgcctctgcccttgcccctccccagcctcgccgcctagtaggggaaccctggtctccttggggtgagccagagccctggtctggatgttctagttctaggtgatcttgggcaagttgttaccttgctctgaatctgttttcctacctgaaaaatgagtttggaaggagatgcttacttgggtggggcttaagtgtcttttctttttggggcattctgagaaccttcatggcttcagatgattcgagagagaccagggctccttgagggacctgccctgccctcctacccccacccctgcgcctggaaccagagtggctccttccttgcttgtttataccatgggctcctgagttatgcaaaggattccgtggctcgaaagagtcggaaaaaccacaagtgtaaagcagcgtgatgaaaagcagtttttgtgataagttaatccaatggcatgttgattgaaacaaataattaatcaaaatgtttagtttttgtgcgtgtgtcaacactttgggggacattcggggacagtttttagcacctttagtcatttttgtttcttcattctgatattttaaaatttcgatttgcattttcatccttaattgagtttcagccaattgtgtttatcccatgttgttcacaatagagaagtgttgggtccatttaaaattggagacaatctaaacgctcatcaatagaaggattccttattatataatctccatcaggtggaatgctgtacaacaggcatgaggtggacatggacctactgtcatagaaagatattcttaacaaatgtttgaatgaaaaaagtattttagaccaagtgcggtggctcacgcctgtaatcccagcactctgggagcccgaggcgggtggatcacctgagatcagaagtttgagaccagcctagccaacatggtgaaaccccatctctactaaaaatacaaaaattagctgggtgtagtggctcatgcctgtagtcccagctactcgggaggctgaggcaagagaatcactcgaatccgggaagtggaggtggcagtgagccaagattgtaccactgcactccagcctgggtgacaacagcgaaactctggctcaaaagataaaataaaataaaaaagtattttgttttatttttatatatttatttattttgagacagagtcttactctatcacccatggtggagtgcagtggtgccatctcagctcactgcaacctctgcctcctgggttcaagtaattctcctgtctcagcctcttgagtagctgggattacaggcacctgccaccatacctggctaatttttgtattcttagtagagacggggtttcaccatgttggccaggctggtctcgaactcctgatctcaggtgatccaccaacctcagcctcccaaagtgttgggattacaggagtgagccaatgcacctggctatatttttatttgctaaaaataaaactctgtgtgtgtgtgtgtgtgtgtgtgtgtgtgtgtgtgtgtgtgtgtgtgtgtaggtcctggacagtcacagtttaagcatcaagagggcctgagtttagaccaaaggtataccaggtataaggttgtggcaaatattgtttctttgaaatttaaatttaactgggcatcttatattttatctggtaactctactcaagcccatcctatgaagaaaggaccccgggtgtcccctccctctctgccccccaactatctccactggctcagagacccagagaccccccgccgcaggctctgtgcagactaacatgcttcacagctctgacccaaactcccaccttggtggcccctttagctgcctctcttctctctgcagttgaactttctgcctcctcagcctctgcttcttcagtgctgttgccaccctctatccccaccagctcatccaggcagctgtctgcaaacacctgcctggccagcccctcccagcacccaactctggggcaacagccccctactggctcccatcagcctctgggcagccctgtgtctgggtttccagctccttccacacccactccttcttcgtcatccttcttccccagaatcctggccctggcccttgcctcactccctgtgcttcttgggcagccccagcaactctagtgctgaatgtccaggggctgatatctcctcttctctttctccagctagactcctctccccagcccaggcccaactgcgcctctgcctgctggatgccctggggcctcagggacctcaggttgaccctgttgctcttctctttgtttagaaccctttgcaggctcctcaggccctcgggttaaagtcagaactccttggcctggctgacaaagcccttcatggtctatccctgcccacttccgcagccctctgcaagtcactcgcagttcccaggttttctcacaatcccatcaagcttcaaatgccccggtgccccatccccctgctcgttttggaaaactcagttcccacgtcacctctaacggaagacccttgtacccctccagcttgggatagccccgtctgtattccttccagcctatctggtgtgtcctaagtcacctgctgcttacctgtctctgccgtgagacagatgggactgtgtcttctccacctctcagtccccagggtcaagccctgtaaaagagcttagagcctgatctctgaccccagcatggatcccaattccctccctcaccaacctgacaccagcccattccaactctgcccaagtgctgacctcatccaagaccccagatccacttctaacatgacctcatcccggccctgggagcacacatgggaaaggaaaaaaggcaggactctcccatttccaagcgtgcacccctcccttcctgaggaagaaaggctgaatcttgagcccacgtagaatctgcagagggaggccgggcgcagtggctcacacctataatcccagcactttgggaggccgaggcgggtgcattacctgaggtcaggagttcgagaccagcctgaccaacatggtgacaccccgtctttactaaaaatccaaaaaaactagctgggcttggtggtgcatgcctgtaatcccagctacttgggaggctgaggcaggagaatcacttgaactgggaggcagagattgtggtgagacaagactgtgccactgcactccagcctgggcggagcgggactccgtctcaaaaaaaaaagaatctgcagagggaagttagtgccttacagagggcttctgactaggaagccccgggactgtggccgaccccttcctctccctgcctcacccctgcagaaagatctgcagaaaaagctggaaggggtgggagggtgtgtgcaggggtggggactggggctatgcaggttccagacctggtctttggcaccctctacaggacagttccattcccagacctgagctttggacaactgaatcttatgccccttcccacccatggagcctggtgccggaagttcccaggacttacccaccgtccaccacgccacatagcaagcgtcctcagtgtctgcagaccagaaacacctcccttgtgtctcagcactgggccacctgctgaaaccccaaactgcctgccccattgtttgagacccagtcaggccttggctccaaaagtcctctgggactgctgctggcccccagggtctctcctgactgcacctcggtcccggagctcccacaccgctgagccccgagcccgatgtcccgatccagctctgggtcctttacgggggccttgctggcctttcctaagggaggtgttttcccgaggacaggtggactgctcctcagactaggggccctcggagggccaggcctgggcttctacctcctctcgcaggctggtgtttctctgcaaatatggctcgtgtgtcctccttcctctcagactgggggcccctgaggactgggcctgagtttccctttcccccttcacaatgggggttccctgaggactgacccagggcctcccccgtcccctccacctggctgttaatctccaacacttccacctccagtcctattctgcacagctctccccagcgctgggggctcagaggcctcttcagccttccccagggctggggctcagggagggcttcctcaggcgctggccccagagtcaggctgcacattggcttggaggacaggcctttcctctgggactgagaggcccagagtgcccacccagagctccacctctgacctcacaaaggcctgcttcagaactcggtctccacggcactgctggccggacgagggatgttattttgggcagtgcatctggacttggttcaagtggcaccagccaaacccctgccttactgacctctcccctggaggagcaggagcagcgctcgaggccgccctgggagagctgagaggcaggctctggactggggacacagggatagctgagccccagctgggggtggaagctgagccagggacagtcacggaggaacaagatcaagatgcgctgtaactgagaagcccccaaggcggaggctgagaatcagagacatttcagcagagtgagtggggctccaggcagggtggggatggggcagcctcctcagcgcccagatctggaagggccattccctgggtaccatacagggaggaggtgactgagggattgtttggggaaggagccccgtctgggagtggaagtcccggctttcttgttatggtgcagtcctgtgttgctgtgtgacacaggcacatacaccctctctctgggcctcagtttccttacctgtaagttggttgttgggaggaccagcggtagagcagagatggcagggatgcactgagctgggctgtcagcagaccatgggggtgggacgaggagagagctgaagaccaccggcagtggaccacagcgggaggcgtgcaggcaggagacgggtcagctgccggcttgctggagtcattcctcccacgcagtcccctcctgaggggctggagctggggctggagggtttcggcagtcagggctggagataagagtctgtgctggagctagagggaactgggctagagaatcaggaggacagacagggtgaggggacttcgggctaccttcatgctgtcagttagagataaagataggagtacaaaggggaatttttgggtgaggtacacgggtgaaatgagttttcagggcctcatcctgtgtgttcaccttctgtgtgtgtgtgtgtgcatgcgtgcatgtgtgtgtgtgtgcaggtcctggacagtcgcagcttaagttagcagcaagaggacttgaggttaaaggtatagcacgcaaatatgaggctggagccactgagtagaggctgagggcatctccacagtccaaagccgggctgcagacacggaaggtcagcaggagcactggagggtctggc

SEQ ID NO: 12097 - DNA, 6000 bp, Homo sapiens
gccctgatggagggggtggggaacaaggacattgagacccagcccttgttctgctagctaaaccatgtgccttggcatgcagctgcattgactggagggggttgcaaagatactctatggtgagctgcagtccaggattatagatagacacatacatgcatgcatacatgggtgagtacaggtagctgcatatgtataaataaatgctgctcaacgtatataagacagacaaatccataattgtgtgtgtaactagctacttcctggtgcagcccacgagaaaacccatgtgaggtgaatgcagacagatgtgtgtgcaggttgcttttttgtttatttgctttttgagacggagtctgtctctgtcgcccaggctggagtgcagtggtgcgatctctgctcactgcaacctcagcctcctgggctcaagcgattctctggcctcagcctcccgagtagctgggattacaggtgcctaccaccatgcccggctaatttttttttggcgaggggatagaatttcgctcttgttgcccaggctggagtgcaatggcacgatctcgactcactgcaagctctgcctcccgagttcaagcgattctcctgcctcagcctcccaagtagctgggactacaggcgcacaccaccacacctggctaatttttgtatttttagtagagatgggatttatccatgttggccaggctggtctcgaactcctgacctcaggtgatccatctgccttggcctcccaaagtgctgggattataggagcaagccatcgtacccggcctaatttttgtgtttttagtggagacagggttttaccatgttggccaggctggtcttgaactcctgagctaaaatgatctgcctggcttggcctcccaaaattctgggattacaggcatgagccactgtgcccggctccaggccaggttccttttttttttttttttttttttttttgtgatggagtctcgctctgttgcccaggcaagagtgcagtggcgccatcttggctcactgcaagctctgcctcccaggttcatgccattctcctgcctcagcctcccgagtagctgggactacaggcgcccaccaccacacccagctaatttttttttattttatttttagtagagatggggtttcaccttattggccaggatggtctcgatctgctgaccttgtgatccgcccacctcagcctcccaaagagctgagattgtaggcgcgagccaccatgcccggcctccaggttgcttttataagggaagaggaaaagaaataaaaaatagaagtgtgtgtagtgtctgctggtgaaagagcttcccctgtttttctcccctgctctggttcccaggctagatttggatgccagcagacccaggatgggacagggtgacaatggggtgttgtgggctgggtttccctattttctttcggtgttgaggagtcccttgccagtttctgccctgtgctgcctttgcagctccacttgaggcagggatgggctggatgcatattatagggtgggaggaaaagggggcagcatggcaggggtgctctaccactcccatagcctgtgatctgggccctggcaccaggagtctatggttctgtcttgagtcacaggctggcagtggggccagagggcaggtactcagtgatggctccctgattcaccacggggcctcccagcctatagaggcctggagggtagggtgcatctttctgggtcaagggtcattagagtcctcatgtgggggttctatatatgtgtgagcccatggcgaggctctcatgtgaatgggatccctgatcatgggagcagagctcagtgtctataggcaagtgtgtgactgcaaaccacagggtgtgtgtgtgtgtctgtgtgtttgtgtgtgtgtatgcgcaagcacctgcatgtatgtgaatctacttcatgtgtatgctaaacccatctctttgggcatgaaccacctctgggactgggagcccttatttcctttcttttcttttcttttttaacatgcctatctaggccaggtacggtgaatcatgcctgtaatcccagcactttgggaggccgagacgggtggatcacctgaggtcaggagttcgagaccagcctggccaacgtggtgaaaccccgtctctactaaaaaaaacaaaaaacaaaaaacaaaaaaattggctggacatggtggtgcatgcctgtaatcccagctactcgggaagctgaagcaggagaatcgcttgaacccaggtggggtgatcttggctcactgcaacctctgcctcctgggttcaagtgatcctcctgtctcagcctcccgagtagctgggattacaggcatgtggcagaggtggttgatgcccaaagagatgggtttagcaatactcataatcctacaatccaagcactctaggaggccaaggtgggcaaattgcttgagctcgggagttccagaccagcctggccaacatggcgaaaccccttctctacaaacaatacaaaaattagccgggcatcgtgatgcatgcctgtagtcccagctatttgagaggctgaggtgggaggattgtttgatcccatgagctagaggctggagtgagtcatcatccatgtttttaagagcttgtttagcttcttctgctacctctcctgacacaacctgtccacttgaagggtccatgcctatctgtcctgaaatgtcaatggtcctgtcacctaacatagtttgactgtaggtcccagtggcccctggggctttcttggtgctgatcacatttctgatcaaggacgacaggactaacccttctctcttttggtccctctgggagaagaacctctgcactagccctgctcgcttctcaatgaaccgtgggagcccttttttttttttttttttttgagatggagtttggctcttgttgcccaggctggagtgcaatggcatgatctcaggtcactgcaacttccgcctcctgggttcaagtgattctcctgcctcagcctcccgaacagctgagattacaggcacccgccatcacgcccggctaatttttggtatttttagtagagacagggtttcaccatgttggtcagtgtggtcttgaactcctgacctcaggtgatctgcccgcctcggcctcccaaagtgctgggattataggcgtgagccaccacgcccagccgggggcccttatttctcatattcgtccctcaagggacaagtcctcagggtcattagcccacctggattaagtccctctggaaaatgatttctttgatctcctctggcaatgctgccatagaagctcagcctaagggcatgttgtttgctcccaggccaccagatgtttccttgttattaaaagcagcatagagggcaaggttgcacttcgggaggccgaggtgggaggatcgtttaaagccaggagtttgagactaacctgggcaacatagcaagacctcatttttacaacagatttttaaaaattagctgagtgtcatggtggcacatagtccctatagtcccatccattctggaggctgaggtgggaggatcacttgggcccaggagttcgaggctacagtgagctgtgattgcaccacagcctgggtgatggagcaagaccctactctttaaaaagagagagagggcaaggttgtcccatgatccccctcagatagggctgactcccccataattaagtttgcttaaagaggcagacttgctgggctcagtggctcacgcctgtaatcccagcactttgggaggctgaggcgggtggataacttgtggtcaggagttcgaaatcagcctggtcaacatggtgaatccccatctccactaaaaaaacaaaaattagctgggcatggtggtgtgcacctgtaatcccagctaatcgggaggctgaagcaggagaatcacttgaacctgggaggtggaggttgcagggagccgagatcacgccattgcactccacctaggcgacagagagagactccgtctaaaaaaaaaaaagagacagactcttccttggctgggggtaagtcagatgggagaggagagggttaaaaacagctgggactcagcctgctggcaaacatgtggcatgtggcatgtcggggcaactgcagctcagcctctggagccatgtgagcaatgcacgcaggtacacgtgtgacaagctaggtcacctagccatgttcaacaggcatgtgcacagccacgaggaatgcccagccgtacaattaggcacacaggacatccgccatgtgtagacacagctgtggacatagctggccaggacatgcgacacacgacgtgctcatagcacagggagaagggcccatgaagtctggttggaactcagcacgtgtgtctgtgtgcccacctgagtctggactgctgcccctctgacactagctgtccccttgaagggtcggtgccttatctgtcctgacagaagagacagtgttgcttctcacttggggctcgcagcctcctcctcctgcctcgaactgaggatctgttgggtccagtcatcctggagagatgcggccagtttctttctgacaggtctcctcctgcccgcaaggaagtggggtgatcacagggcgcaggtggtctctatgacagctgcatcctctccagccatggccctgaaccctgcctataatcccaccattggctctcagatctgcctaagcctctcagcccccttgacgtcccctcccttaagcgccctccgaaggccacccgtccctcaaagctcctcacactccatgcccgcagctccctccacccggcgtccgcaccagcctcccagccgaggtggggcgggggcgagggggcgcgcactcctcggcgctccgggactgcagggcggggctgcagggcgggcggggcccgtgtctccagcgctcctataaagggagccaccagcgctggaggccgctgctcgctgcgccaccgcctcccgccacccctgcccgcccgacagcgccgccgcctgccccgccatgggtcgacagaaggagctggtgtcccgctgcggggagatgctccacatccgctaccggctgctccgacaggcgctggccgagtgcctggggaccctcatcctggtggtgagtggagggagccggggaagcccttctctctccagcccttgcactccccaaactctcacttccccgaaggggctgtgttttccaaggtagcctggacccacctccccagctgtgacccccacgcttaaccgcggaggatcaagctgacttccaaagtcctcttccccacggttctaaccccctctctgacagctccgactcttgccagaatgacagctgttactccccagtgatagtgccgatcgtttaccctcccacaagtgactcagccaacaggctgggggcagcggtcacgcttgcagtctgggacagccagccacttcccctgcctcccacacccctccagattcccagaatcccagcccccagatgtaggggagggggcggaggcaaatgagccattattaggttatttgggtcctgggtgtctggcctctaatgaataattaagcctcaaaaagtccaaaggttgaagtgagtgaggacagtttgcacgagtgggggcagagggtgcaggccacatgggctgcgaacagcgaagtgggaagggaggcagattctgacggtagaagggtgggaggaagctaggcccaggcacagaggacgcgtgtctaaagttgctcacctggtgctcagcgactcccaggccctgtctgttatccagacagatgctgtcagcgtctgtgcagaagacgacaagcattctggttactccctggcctcttggttactctgtgggttctctgagtgagcatttccctgcctgagttactcctcagtcctagttactccttggtcacaccagtttcaccctggttttgttctgagtgactctgtttgcacttcttagg

SEQ ID NO: 12098 - DNA, 6000 bp, Homo sapiens
tgacagtgtccttcaggtcagccagggccaggggtcactgcccatcttgtccccaagtcatcttcccggagcccgctcctcctccctctgtccagccctgaccctggggggagggggtctggtctgagactgaggatggaaaatgtgattaataatcaaaaaacatccaagaggaagagaccaggaaaacaacttgaggaaggctcctcgcccgggggaggggggccatgtcctgggcctcgggacagctccggccgccctcccgccgccctttctgggaagctgccacaggagtggataattttagccaaaagtgaaaaaaaaaagtcaccctaattatttattttttaaaaagatgccccctagtgtaaattatgcttcccctgggggcttccctcttctctgttacccccctcctaatggtgcccctgcttggtcaggctggagggccctggagacactgggctgggggcagagaggaggaatttcaacatgaaatgttttgttcattaacagagaacatagggggaaattccctttctgcctgggcccaggcggcccaagcagacactcaaaagctatcgtgaaaaatggagtctaggctgcagaatggggtgggggttatgttggggggcgcacaacagacattgtctcccctcttctcagactcctgacttccaggggtttcctgagccttaatctttctgccttttggtgattttgttcccgattcctcaggttactctcaaaatttctttttagcaaacgagaggaactgggattagactggagttagaacttccactggaggaggaagaaaggatatcaaagggcgggaggggagaccttggacctgaataatttagaattctgacagaatatattggaatcgataggcagcaaatctgagggggacctggacaggaatgaaagcccctctctatcagagtgaatttagagggccctggtgagaagggaagaggagatagttccaggaactgggggtaattcaaggttggatacttagtttcccccattctctacctttaggggatctttgccctttctggtgacagaggttggaagggtcagggcacacaggcagccgtccagatgataggatcccagaagggggtgtgcaggatggggatgttgtgagtgggccccaggtactatctccggatggtgctgggagctgtctctggatgcaggggtaagtcgtccctaggggcctgggctggaccctgagtgggggggttttgggcccccctccctggctcggcccggcccggggctctgtcggatcgggtttctcggcgcctggagcctccgcgaggccgagctgttcccgggccccggccaagccgccccgggcgctggcactgtgtgaggaagcaggcggggtgagggggagcaagggcgggggcttgagggcgtttacgtaactgcctcctggagcccgccccaacccgccaaaccccagtgtgattgagagcgtgtgtgactctgtgtgtgcctgtgtgacactcagtgtgaccgagttcatggctgtgtgtgtaactgtgtctatgtgtgggtatggtgtgtgtgactcagggactctcctactcttttgggacctctagttcctagcccaagctggggaccctgactctcagtgtaccatagtgaagttgaatatacaccttttactgtttgagattgggtgtgtgactttatgtgaccatgtgtttggcatttgtaatacagagagcctgtgtgtgagagtgtgtgtgtttgtaactttggagagccaggtgtgtgctgcagggagaaactttctgatggtattgcaagttagaaaccagcaccgtttcctaaaggagcactggaaaggtagaccataggggatggggagggagctctccttcctcggagacatgtcagtaagaataaggaagggtctttgcttgcccaaaggcttggaatggcacaattgatcccttggtgtgtgtgtgggggggtccaagtttaggtcacctgccagggtggagggtggtgtcagaaatcctggccatagagcccctttcatggtagagaactccaggaactgaaagtcaacgaggaacttcccatatttccccaggcgcaaatgtgagatccccatcacgtgcagggcacaagggatctggcctgggggtgttacttccagccactccatcatgggcaaggtagatggtgaagattggaaaggcagtgaattcttggagatggagttggggagaggatgtcagtgaagtggggtttggcttaaggataagtgacatgacacagaagggggctggcgcagagctggggaggccgggaataggggcgcttaataaaggtggagaggaggcagggccagatcctgcagggctttgaagccccacctaagaaactcaactttgcccccaaggcggtggggagggctcagcactgaggcttacaagctcaaaggctactgtgtaggtagggcatcagaggcggcaggagcggaaaccactactagtctgttgacccagctctggggggaggaaaattggttgtgagccgggtggcggctgtgtggagaggtggcagcccccggtgttcagtaggtggccgaggcctcagcgcggagcaggagcagcagccagaagggaacgcacgtcccgcaccgtccgccaggtgtcgcttcggccccggggaagcgctcgaggccgctgggtcccgcgccgggaggagctgctgaccgactgacgcctggacagaggtccgacgtgcgcctcttcccttcctttatcgtctgacatccacacgtccacttccaggaccccggactcccagtgcggatcttgtccccgcagccgtggactgctgctctgccgacagcagcctctgcgtccccgggggccgagggggacgttggaccgggacagaattcccgactgctcccaacctggcagaaagaggctgagccagggacaccagggcatctggaggtcaagtccgttccccaaaccactcgccaattttcaccccgtccgcccctccccggccggattagagcgccgaggccggtcagccccctggggaggagcggcccccggtgtaccgaaccttgccagggcctagagcttcgccgcaggggcaggggcaagtcctgctcccctcaagatcccgtcgcaacgcccccttccttccccgcgtccacagtctaatcccggtctgcggcacgggaagcaggaggccggcggcccagagagcccggggagaggacaccttgtgtgggcggctgtgcgctgaccctcagcggggcgcagctagtttgctgtgtgtcctgaagtcctagctggccgtctctgagctccagcccatgccgacccctgccagttgtaggaaggggattctgtggccacggaagtgaaagtgaaaagcccaggccgtggcgggaagaaggattttcctctgcagtgggagtccctgaggcatttgttgggaaagggcccgggcgctctaggcagcctactggggaaggatgtgaggaaacatggagacatttccctcccttctcctcgccctcagccctagagcagctccccggaggggcagggcccaggattatgggtcaagggtcaggtgacaaatccaaggggtggagacgggggtggctttctcggtctctgcctctgccattgccactccattgcgctttcacgtggcctcagaagttggtcaggttgtccaaccttactctcctatgttgcagccagaccggaggcccagggacgagtgcagtgaacaccccggcccctcagaggcccaggctgcgaagggagtgagcctcctatcgaggggtgcgcctgtgcccggcattgagagtgcaccctccctaccccttcattccagtggaggcttctcccccggctgtgtgtcctcggggcgcgaggaacatgcgagtagtggtgttggtgtcatcggagacactggaggcatgggcctgggctcccggcagggtccatccccggtcaaggaagcccctttcccccgcgcgagggggtgaccgggaggggagtcgttgcggggggcagtagcaataggggagaggcggagccggctggcttcttctgcccaaagtgggggttgggggttctggctcgcgttcctctcacggcgacgccggagggaggaccccgagagttggcccggggtgtgccagggagtcggtgcgaggccgtcagggcctgaacgtgcgggagtgtgcgcaggagagacctggctaaggccgagagggagagtgagtgtgaaggagcgatcccgggggtgagtgcgcgcccagccgccctaggggagcgggccgagtgggtgtgtgtgtgtgtgtgtgtgcgcgcgcgcgtttgcgagacccgcggccggggctgcgcgtgaagcacggggaccacagccgtcttgagggcgcgcccgagaaagggtgaacgcgagggggccacgcgtgccagtgcggacgagtgtgccagcgggggggcagagcgcgtgccagtgctgggcgagtgggagtgggggctcacaggcccgcgcagggcgagcggaccgcgtgtgccaggagcgagagcgtgccaaggcgggggcgcgcggggcccgtggcggggaggggtcgtggcgcgcggccgcggaggcgcggggagacaaggcaagagggggaggggagcgagggcgcgcgcggccgagcgggcgcccgcggtcacatgggcgagagaaggagggagggagcgcgcgagggagggaggaggatgggggggttaaagccgccgagcgctgaagagccggtgcagagcgggcggcggcggcggcggcagcggaggcggcggctccagccggcgcggcgcgaggctcggcggtgggatccggcgggcggtgctagctccgcgctccctgcctcgctcgctgccgggggcggtcggaaggcgcggcgcgaagcccgggtggcccgagggcgcggtgagtaccctgcggcggagtgcgcgcggccggaccctcagagcccgggctgaccagcagaccggcggccctcatgcgtgcgggaagagtgaggggacacccgtgggcccacggacgggggcgacaggaaagttcacgagaaactttgcctgcaaactcgggggcgggggcgctggaggagcggccccccacgtccgggcgctccgggggttgggcgtggtggtggtggtggggccgactgtggactagagggaggtggctccggcggtttgtcctagtgtccctgttctccccacccctcagctgcacgcgcggggtctggaaaaattcctgggtttggggaggttcgtagtggcctttgcgcgcccaaaggtggcttctttctcgggcagaaatctggacttcaaagcgcccggggatgcgaaccgacggttgcgcgtctgccagtgcatgtgtgtccgtgtgaatccgcgcgcccgcgcgcgcgtgtgtgtgtgcatgtgtgtgtcggtcggcgtccccatggttttctcttcagtccgcctggatgtatctccatgtagtgggtctcctccagtgtgtctctttgtaagtcttcctggcttgtgcgagtctgcctatggtgtatccccaagtgtctctttgtgagtctgctcgtgtgtgtctcctccagtgcggctcagtgtgagccagtctgggtgtccctgtgttgctccgagtagtgtatctccgcgtgcgtgggggctgggccgtggggaggtcaccagacggacagctctccctctcggctcctctcctctcccgagcctctcctccagcgttagctcgctcgcttgctcgctcccttgtccccctcccccctccagtagcttcaggcgggcaggactatttcacgccttgttgaaaattcaggattttctttctttccgtctagtctctctttttgagaagcgtctgtgtgtgtctgtgtgcctggcagcttgtctgcaacattgggtgtgt

SEQ ID NO: 12099 - DNA, 6000 bp, Homo sapiens
ctgaatgccagcattgtggatgccatcaaccaagctgctgactgctggggtatccgctgcctccgttatgagatcaaggatatccatgtgccaccccgggtgaaagagtctatgcagatgcaggtgggggccaaggaggggtgggaaaagggcctcagggtgctccagtaccaggaggatccagacttccctcctgttatgatgggtagagttgcatgtctgtatcagtctcccttggcttgttgattgggattgttgtgggcttccaggtggaggcagagcggcggaaacgggccacagttctagagtctgaggggacccgagagtcggccatcaatgtggcagaagggaagaaacaggcccagatcctggcctccgaagcagaaaaggctgaacagataaatcaggcagcaggtcaggagagggtagaggctgagggaggagcaaggcatgggcctttgaagattggtgctggggcaggatctttggggtactttgacttcatgggtcaagcaagctctgtcccttctcttgcaggagaggccagtgcagttctggcgaaggccaaggctaaagctgaagctattcgaatcctggctgcagctctgacacaacatgtgagaggcccctgggtgggaatggggacaggaattgacagtggaaggggttctcttatctacgcttgaggagagttccgcctctgtgggctctgttgagccagattacatggtcctttttattgtgaactgctttcttcattccccatcccccccttcttctccgtatcggtgatctctgatttttatccccctgtgatcacagaatggagatgcagcagcttcactgactgtggccgagcagtatgtcagcgcgttctccaaactggccaaggactccaacactatcctactgccctccaaccctggcgatgtcaccagcatggtggctcaggttagagctctctgaggacccagcatagagcactggtgccagggaccaaactgagaccccaccaccgtcatcaacacttacataccataaaggtcttcagagtgccttggccctagacctcccttcattctttgtagagatggaatctaagaatgaaacatctccactcagtcctgcaaatatggaagttcttgagatacctttttttggtagatacttgtgctggtattctgagagtcactttactctgatggtttgcaagattcctaaaatcaactccagagcttacaagacaggtttgagagagggagaaaggaaaaccaacttactggcccccatgccatcttttcccgtttagccattggtaggctgggctgcacctctgtcaagtgtcctcatggtattctctctgttcctctcctcaggccatgggtgtatatggagccctcaccaaagccccagtgccagggactccagactcactctccagtgggagcagcagagatgtccagggtacagatgcaagtcttgatgaggaacttgatcgagtcaagatgagttagtggagctgggcttggccagggagtctgggaacaaggaagcagattttcctgattctggctctagcttccctgccaagattttggtttttatttttttatttgaactttagtcgtgtaataaactcaccagtggcaaaccagaaactgtcctctttgattggggaatgaagttgggaaagtcactagcattttccttggatccagtcctgtcagcatgatgcctccatgaataagagtgaacttcttgtaaagtgaaactatcatttttgtcttcaagagaaactgtgggatagggtggaagtgttaaaccatatgttcactgaactgctggctgggaagtgaagtccccttcctgctaagtgtggggctgtgtgtttgaggcaggtgtttgggggttttttcgtgggaaagaagtactttcatgagaaactactaccctgcactggcatacttaaagggttttcagggactgagggtgctcctcattcatttattcaaaaacattgaatgtctaccaagtgccaagctcattactagacactggattacaaaaatacctgaaacccagtggtccctgctttcacagaatacaaggtcaggtagggaaaacagacaggaagcagacagtgatagaaagtgataaatgtggccgggcgtggtggctcaacacccgtaatcccagcactttgggaggctgaggtgtgcagatcatgaggtcaggagattgagaccatcctggccaatatggtgaaaccccgtctactaaaaatacaaaaactagctgggcgtggtagcatgtgcgggtagtcccagttgcttgggaggctgaggcaggagaattgcatgaacctgggaggtggaggctgcagtgagccgtgatcacgccattgcactccagcctggcaacagtgagacactctgttaaaaaaaaaaaaaaaagtgataaatgctgtggtagaggaaagttctggctgagggatcttggtgggaagagcatatcagcttatgagtagcagcgttgctgattgccactgaactcaggctggaaaagttagcaagttttcaccaagtcaggtcctggactagaataaacaaaggctcactgcttgagagaagttggctgaagggtatagtgttaagggggatgtgactacatggcaagggccaagtcacaaggaatgagattcttgttgaaggggttggacattatccctagggtaatagggtttttttgtttgtttgtttgagacagcgtctccctctgttgtccaggctggagtgcaatggcatgatctcggctcactgcaacctccgcctcccgggttcaagcaattctcctgcctcagcctccttagtagctgggattacaggcatgcgccaccatacctggctaatttttttgttttttgtagagacagggtttcaccatgttggtcaggctgatctcgaactccagacctcgtgatctgcccgcctgagcctcccaaagtgctgggattacaggcgtgagccactgtgcccggcctatgaagggtttttttcccttcccatgaagaattttaagataaaacatcacattggccaggcacagtgactcatacctgtgatcccagcactttgggaggctgaggtgggaggatcacttgagcccaggagttgaccagcctgggcaacatggtaagaccctatctctacaaaaaagaaaaaaataacagtaatcacattaatgttttagttagagctgtcttgctgcaatgtggagaagggatagtagggagacacaggaggctgggaggacagtgagaaggctgcctcagtgatcctggagaagggatgaggtctgaactgagataaggggctatggggatgaaggtggaagaataactcaactttttttaaaaattaacatattcctttattcgtttggtcagtatgtgaacctcaaatatatgctaggtgctgaggatatcatgaagaaaacagaattccctgacctcaatgagctcacattctactcggaggggataaaccataaatacgtgtagaatttcagatgctgatgagttgtgctatggaagaaattaaggaagtgaggggaaatttttccagggggtgtggtggtgggaggtgctgaactagtaaagtaggggattgcaggaagccttgctgatgttacagttgagcttcaatatgaaggtgatggagatccatttcggcatcgggaactgaagctgacagaggagatggcaaatgcaaaggtcctgaggcagaactgctgtggatggaacagagttagggaagcaaagaagtggcagctagatgaatcagaaggggaagaggcagatagtgtgcagggccatgtagagccaatgcaagaacttttactctgagatgagaaaccagtggacgggttttgtttctttttgagacagagtcttgctctgttgcctaggctggagtgcagtagcacgatctcagctcactgtagcctctgcctcctggcttcaagcaattgtccagtctcagcctcctcagtagctgggactacaggtacacatcgccacgcctggctaaattttgtaatttttagtagagttggggtttcagcatgttggccaggctggtctccaattcctgacttcaactgattctccagcctcagcctcccaaagtgctgggcttacaggtgtgagtcatcgtgcctggcatttttttttttttttttgagagggagtcttgctctgttgcccaggctggagtgcagtggtgcaatctcggctcactgcaacctctgcctcctgggttcgagtgattctcctgcctcagcctcccaggtatctgggatcacaggcgcccgccaccactcccgggtaacttttgtattttcagtagagacggcgtttcgtcatattggccgggctggtcttgaactcctgaccttaggtgatccacctgccttgacctcccaaagtgctgggattacaggtgtgaaccactgggcccagcctcccctcctccactccgaaggattatttgcttaattattcagtcgtaagatttagttacaggctttgaaaggaggagtaatgaaatctcagttggactcagctaagcaaaaaagggaaaataagtattatctccattttacagatgaggtaatgcctaatgatgacaatatgtgcggccaagctaggattcaagtcaagtttgactccagcagccgtgctcttagtcgtaaccatgaatggacagtggttccctgaactcttcctccagcttggtcccctgtccccaattttcaattactaaatatcccatcaaactggggccagccccacgctcctggccaaacttccaccgaggtgccggcagatggcgatggagccaccgacgggccactctgtctggcgcacgcatctctgtgctgccaggtcgcaggcgccgccgccgccgcacttccgggtgccattgcaggtgagccagggtctcccgagaacctcaccccccggtattcccctcaccctgaagtaagggagtctccctcttcccctcagctcctaaccaaggtgctcagtaccgcggctagggtgcccagcgggaggctgggtagttaccggaggaggcagagccggtcgcacgcctgggtcccagcggaggcccagtcgactctcgacccgggccccagcctccttgcgtggcgaaggtcgtgcctcaggtctcctggcgaacctggccgcccggaagcggagagtgactcctccccttcgtcccctcggtgcccgccaggcggcgccgtcggctgggcccggattcccctgcggcttcgatccctttccactgggtattgagattggcgaggggagaggcgcagaaacggcgtgtaagagagcctgactaccaattggaataagtttccctcctgactgttcacatgtacaggcagcattagcatttcctgcctgtacatgtgaacgttcctatgctctacccctcgaagatcctgattcagtagatctggggtgggacctcatgaaacggcgtctccctctgttgtccagactctagtgcagtggttcaatctcggctcactgcaacctccgcctccccgattcaagcgattctcctgcgtcagcctccccagtagctgagactacaggtgcccgccacccatttttgtatttttagtagggacggggtttcgccattttggccaggctggtctcgaactcctcacctcaggtgatccgcccgcctcggcctcccaaagtgctgggattacaggcgtgagccaccatgcccagcctggaaataggaggagagtaatattgcgaggggttggctgtgaaatggtttatctccaggaaggtttccgggaggaagtgattctagctgggcttgtattcagggaccagaatatccactggttctttgccccacagtaatgaatttacttccccacccctatcaggatgcagaaagcctcagt

SEQ ID NO: 12100 - DNA, 6000 bp, Homo sapiens
cttacagcctgctgagtccagtttcccaatttgtaaaataagcaggctgggctctctaagatcccttcaagtgtaaaataataactgcctttctcctcaaactttgttacataaacaattgttaacccaggactccctccatcctatgcttatgcaatttattttttgaattccaaatttcatttttcaataaatgcttgctgtattatcttttttttattttaattttgattcatttattttttgagggagggtttcactgctgcccaggccagagtgcagtggcacaaacatggctgacagcagcctcgccctcctgggctcaaacaatcctccccactcagcctcccaagaagctgagaccataagcatgtgccatcacacctgcctaatttttaaattttttgtagagatggagtctcgctgtgttggccagtctggtctcgaattcctaggcccaagtgatcctcccacctcagcttcccaaagtcttgggattataggcatgagccattgtgcctgactttgctgttattattattattattattattattttttttgagacagagtctcgctctgtcacccaggctggagtgcagtggcaccaccttggctcactgcaacctctgcctcccgggtttaagcgattcttttgcttcagcctcctgggtagctgggactacaggtgtgcgccgccatgcccggctaatttttgtattattagtagagacggggtttcaccatattggccaggctggtctcgaaattctgaccttgtgatctgtgcaccttggcttcccaagggataacaggcgtgagccatcgtgcctggcctgctgttattatttttatgacatttcattctgtggtttggagccatcattttgccttgttgcaaggcttgaatcttgagttggccttttgatgtatttgcttttcagctctgtgccattaagcacagagaacgtgctttctgtgtcaccatttgaggcaggaccaaggagaggcctggggcaagtcaccgaagacctatctgtactctttggcttcagtgatcaaagaaatccaagtctccctcatggtgcaatcaggtggcccatttttctccctcctgactctgaagcctttgtgacagattttaaagaggcgtttgtaaagtccacacctagtgtgtctccagcaatcatactcttgattgaggtcagactatcttgtattttacagatggaaaactgtcacttgcccaaagtcacatactgtggcaaggctggtctctttaaccagagtctccctattctttctattacatcatgcttcctccacagttcacgaaactcttgctgctctaataaattacacacttggtggcttaaacaatacaaatttattgtcttacagttgtggagatcaggtcgacacaggtctcactgggctaaagtcaaggtgtctgcagggctggttcctttctggatgctgaaggggaaaatctgcttccttgccttttccagctctcagaggcttcttgcattccttggctcaaggtcctcttcctgcaccttcaaaatcaggacctatgggttgagtgtttctcctgtggcgtctctctggccctccttccctcaccgaatctctttcttcccatgatgggaaaggttctccctttcaaggactcatgtgatcagagtgtgcctaccaagataaaacaggataatctctctatctaaaggaccttgattaacatagccacatctacattttgtcaggtaaagtgacatagtcacaggttctggggattcgggtgtgaacatttttgggaggccattattctggctaccacaccctgtcagtaaactagggcttcccggaggccagtgggttaaagtaatgaagacagatatagcctgactttcagagtcttaggagatgctcccgatgtcctgacatagactgtatcaatgacacaaagttgatcaggtgagcccccttccacatggcaaattctatctgatgccctcatggttgggccccctcctcttgtcaaccgtaaacacccattccctgtaatgagtagtggggaggccaggagagggcaaaacatgggtgttagtgtctgccctccaggctctcagatgatgatagtatggttctggaaaagctgaaatgtacagcactgacccctcacctcttaaaagttccctgatatttgggcagtagaggtacagcttggagttacaggtatcttttctgatgtccagcctctaaatgtaatgtgaatgtcaaaactgtaaagaccccaagtgacacacgtggggaaggggaaggatcctactctcttaccctgttcacaaaggaaggctacaagctggtctaagacagaagcgaatgcggcctgtgatgaaaagatatgtaaccatcaccaaaagagctaaagaggagaaaaatatagaacaagcctggttaagacattcaagatattgcggtgtgcagttccatctggggatccccttcttttttttatttttttttatttttggagacagagtctcactctgtggcccaggatgggcacaatctcggctcactgcaacctctgcctcccgggttcaagcaattctcagcctccctagtagctggaattacaggcacatgccaccattctcagctaattttgtatttttaatacagatgggatttcaccatgtttgccaggctagtctcaaattcctgacctcaggtgatccgcccacctcagcctcccaaagtgctgggattacaggtgtgagccaccatgccggccaggagatccccttcttaagcctctctacaggtcaagttaggcagcaagcccatgtattccatttttttttttttttttggagatggagctttgctcttgttgcctaggctggagtgcaatggtgtgatcttggctcactgcaacctccacctcctgggttcaagcgattctcctgcctcagcctcctgagtagctgggactacaggttcgagccaccacaccaggctaatttttttgtattttgtagtagagacggggtttcactatgttggccacagacacctttttgagtgcagactagaagcttggttttggcattttacctggcatctacatcatgttcacctgtgtattggatctgaaaactgggacattctacagtttgtggaactcctgcaaatgttcctgcaattgatttactcacacactgcccacacccaccccctgtacaccacaggttcaagtatttgactcttcccaccccacccacccctgccaccagctgctctataccctcccactcactctcagggcccctgaggtccccagggagtcaccaccacataccactctctgtatctgggggaaggtctaggttgttggaaactttaatcaagcaaggacagttaacagctgcagaggcaccttaggaaacagtgagcttcaaaaaggaaatacttgtaggatctcttgtgatgacctttgacgacttttctgaaaatgacccgtcattctctgccatggaaaataacagtgatcacaggcagccttcagcccacagaaggcttcctcctccaggcaggctctgacatagccgctcacctcacagatgccctaacagactgcaaagtcctgggaacatgcatatccatgcacacacatgcacacgtgcctctctacaagtacatttttgaggtcacagctttgcctcagtggccacttcctctagggctggctgggcggagctattggcagagctctagggtccctggcagtgtcctgccacacaccaccaatcatccgagctgttggcatgtggtgaggaccttttcccccttcctttttcctccccacagctgcaggagggggattctgcggggcggatgtcactttgctaggggcgggttcttcccacccccacactacatcttgttctagctccttcctatcccggatgtaggccattttggggttcctagtaggggtcacatcccggtaaaagaacattagggagcacctttgggcacccctgctcagcagccccctttcccccaactggttccctctctcctccatcagccaggcccccaccacctatgagggcctcgcggtccctgggtcctccgccacaaatgccccctttttccttggggctgggtgggaagggacagctttgggactttttaaagaaagaactttgctaggaaagtaagagacgaaccaaaaccaaaccaagaaaatgtcaagacctccgctggtccggaatctgcgctcggcctctggctctgttctgctcctctgccttgacttcacctaggaagctgcagccttcttaagccctctgcaactcccttgctcacctgctccctggctccccatgagggtgcatggggggcagtgctgccacttgcctttccagaggtgctgcagccatggctcttccttaccttcacctctggcccaggcctgttcctgaacccccagttactggaacccccaggatgatgagaagcgagggatgcaaaccaggaacccccagtctcatggggagaacggagcctcaccctggagctggggagatcgtctgggtcagtgcagctccagctacacatcataagccccagtggacaaggcagccaggaggagggtggggcagatcagggcagataaccagaaggaccgagtttggggcccagcatggcccatatgggtttaagatgcatggagaggaagcacagggaggacatggggacaggcccatcccctacccctgtgttctggacctcagcgtcccctccgtggcccctctggccctggcccagggatgccttctgcttcattgagcccatctgtttgagacttgctaacaccttcctcttttgtgactggaagtcacagggccaattgctaagccgtgcagtcacagagggaacacagagcctagttgtaaacggacagagacgagaggggcaagggaggacagtggatgacagggaagacgagtgggggcagagctgctcaggaccatggctgaggccatcacctatgcagatctgaggtttgtgaaggctcccctgaagaagagcatctccagccggttaggacagggtaagggggatgaggcctccccttgatcctgcatccccacttcccgccccacagatcccattcccaaatcccaccttggtcccttttctcttctctctagacccaggggctgatgatgatggggaaatcacctacgagaatgttcaagtgcccgcagtcctaggggtgccctcaagcttggcttcttctgtactaggggacaaagcaggtctggagagcctgggggatgtgtgtttgttggggggctgtgtcttgagctggggagtccacaatgtttttgttgttgttcttgagacagggtcttgttctgtcactcaggctggagtgcagtggtgtgatcatggctcactgcagcctcgacctcctgggctcaagtgatcctcctgccctggcctcccaaagtgttgggattgcaggcgtgcgcccccatgccatggccctcagtattcttgagagcacaataccctggggaaaggaggagggcggttcttaggaaacagaagaataggaacaggataaatgggagccaggggaggaagaaagattcctcccgcaaggtggagacccctttcggggagataagggctgcggagggatagggcagccctgtgggggatgagttctaatgggaaacggggagccatgggagggaaaagaggtgatgggagatggatgagagcaaagggggagagggtttggagccgacagataaggggcctctgaggaaacgataaagggagaactaggagagatgagggggtcccgggaaaagatacagtgagacccaggaggaagccgagagagtcccgggcagaggaggaactcaggagagtgacactgtgtcccagagcagctctagcaggcaacgtagg

SEQ ID NO: 12101 - DNA, 6000 bp, Homo sapiens
ctaatcccagcactttgggaggccgaggcaggaggatcacctgaggtcaagagtttgagaccagcctggccaacatggctaaatctcgtctctattaaaaatagaaaaattagccgggtgtggtggcgggcgcctgcagtcccagctatttgggaggctgagacaggagaatcacgggaacctgggaggtggaggttgcagtaagccgaaatcgtgccactgcactccagcctgggcaaacgagtgagacaccgcctcagaaaaacaaaacaaaaacaaaaattaaccaggtgtggtggccagcacctgtaatcccagctattcaggaggccgaggcataagaatagcttcaacctgggaggcggaggttgcagtgaacagagatcgcgccactgcactccagcctcagtgtcagagcaagactccatctctaaataaataaataaataaataaataaataaataaataaatgaaatatgggtgtgtcttcttgtttttcctgaaaggaggaggaagggcaggacagggagaaaccctcaccaaggggagttatcatagtgtagttcaagggtccccaacactattggtccatggcctgttaggaactgggccgcacagcaggaggtgagcagcggaggagcaagggtgagcggcggagtagcgagggaagcttcatctgtatatacagccactctccatcctggcattaccgcctgagctctgtctcctgtcagatcagtgcagtgttagattctcatagggccacgaaccctattgtgaattgtgcatgcacgtgatgttgtgggctccttatgaaaatctaggccaggtgcagtggctgatgcctgtaatcccagcactttgggaagccaaggtgggtggatctcttgaggccaggagttcaagaccagcctggacaatatggttaaaaaaaaaaaaaagtctctaataaaaatacaaaaattagctgcgcatggtggcgcatgcctgtaatcctagctacttgggaggctgaggcataagaattgcttgaacccaggaggcgaggttgcagtgagccaagattgcaccactgcactccagcctgggtgacagagcgagaccctgtcaaaaaaacaaaacagaacaaaaaaaccacaatacctgatgatctgaggtggaacagttttatcccaaaaccatcccctcctcccatactcctgtgcatggaaaaattgtctcccacaaaacctgtccctggtgccaaaacggctggggaccagtggtctagctgatgacccagtgacagcctgggtacgcaaagcagggtaatagaaatcttgaatctaagccagttggcacagtcggtgtaaataaggggttcaggccagatataataatgataagtggtccccaactgattattgcctttagagaactcagggcactattgccagatctttttttgaaggaatcaacaaattagaattttaaaaatttgaaatctcccaatttttaactgttgacaaggaatcagtggcatacttagcatatttgacaccaagtggtctttgtgtgtgtgtgtgtgtgtgtgtgtgtgtgtgtgtgtgtgtgagagagagagagagagacagggtctccctctgctgcccagtcaggagtgcagtggtgagaccatggctcactgcagccccaaatttcttggatcagcctcctgagtacctgggactgcaggtgcacaccaccatgcccagctaatttgtgtgtttttttgttgttgttttttgtttgtttgtttgtttgttttttgtagagaccagggtattgcccaggctggtcttgaacttctggcctcaaggaatctgcctgcctcagcctcccaaagtactgggattacaagtgtgagccaccttgcctgttccggatcatttaaaaaacatttttctttcttttctgtctttttttttttttttttttgagacaagctctcactctgttgcccaggctggagtggtgcagtggcacaatcatggcttactgctgcctctatctcccaggctcaagcaatcttcccacttcagcctcttaagtagctgtgactacaggcacacatgcccccatgcctcgctaattttttaattttttgcagagatgggaatctcactatgttggttaggctggtctcaaactcttgggcccaagctatcctcccacctcagcctctcaaagtgctgtgattacaggtgtgagccatcacacctggcccaaatttttctttctttctttttttttttttttttgagatggagtcttgctctgtcgcccaggctgcagtgcagtggagtgatcttggctcactgcagcctccacctcctgggtttaagcaattcttgtgcctcagcctccagagtagctgggattacaggtacctgccaccatgcccggctaatttttgtatttttagtagagacgaggtttcaccatgttgaccaggctgctctcaaactcctgacctcaggtgatccacccacctcagcatcccaaagtgctgggattacaggcgtgagccaccatgcccagacccaaatttttcttgttttctttctttttttgggggtggggggcagggtctcactctgttgcccaggctggagtgcagaggcttgatcttggctcactgaaacctctacctcctaggctcaagcaatcctcccacctcagcctctcgagtagctgggaccacaggcgtgcaccatcacacctggctaattttttgtatttttggtaaagacggggttttgccatgttgcccaagctgttcttgaactcctgggctcaagcgatcctcttgcctcaccctcccaacgtgctggaattgcaggcatgagccaccatgcctggaacaaagttttatttttcaagtggatcatttaaaaaaatgctttatggccaggcacgccacttctctccagcctgggcaagtgagccgagattgtgccactgcggtctggtctgagcgacagagggagactccatctcagataaataaataaataaaattaaaacaaatttaaacattctttatatgacaaaattattctcaatggcaattataaaatgaataataagggccaagaaataaactcagtgaatattttctttccttgaactttgtaaatataatcatgtcagcataaaaacagccatgcattgcttaacaacagggatatgttctgagaaatgagtcactaggcaattttgtcattgtgcaaacatcatagagtgtattttcacaaacctagatggtgtagcctattacccatctaggctacatggtatagcctggtgctcctaggccccaatgcttacagcatgttaccatactgaatactgtaggcagttgtaagacaatggtatttgtgcatctactgtagagacagggtctctccgtctgtcgcccaggctggagtgcagtggcataatcatagctccctgcagcctccaactcctgggctcaagtgatcctcccacctcagtctcccaagtagctaggactacacgcttgtgtcatcaggcctgtctactgtttttgtttgttttttggtagagatggagggtctcactatattgctcagactggttttgaactcctggcctcaagcaatcctcctgctgccttggcctccaaagtgctggtattacaggaatgagccactgcacctggtccactacagcaatttaaaagttagatctgggctgggcgcagtggctcatgcctgtaattccagcactttgggagaccgaggtgggcaggttgcttgaggtcaggagttgagaccagcctggcaacacagggagacctatctctacaaaaaatgaactagattagctgggtgtggtggcacatgcctgtagtcctagctgcttaggtggctgagatgggaggatcacttgagcccgggagatcgtcaaggctgcagtgagctgagattgtgttactgcactccaacctgggagacaaagtaagaccctgtctcaaaaaaaatataaaacttagatccataaaatatttttcagggaggataattttatcactgattttttttttcagaatttctggaacatggtgataataagaggactgatttttattttttaaattctctacagacaatgcacccccttattgcctgcaactcaaggggcaggacttctgccatccctattgttggcatgccactgcactgattttaaacttttaaaaaatgttgtatgggctagacaaaacacatctctgacttctggtctcaggtttatatttgcaacttaaaatccctcttcctacatcaatagccttgcacgtgatggagttagctctaggtatggcaggtactacacccgctgaagtgaacatgtgcaagatagggctcagtttcccaggacagtcctacagcaaagagttttaaaatgcaattaattattgagagtgacagttcttacagacagtttggatgaagtgggttgaaaggggaggtttgggggtgtcccccaaattataatgcccccaatgaaacaataacaagcatcatctaaacacatatcctctcagatcagccttagggtgtgatgggatcagaggtaccaggaggctcccccgacccttccactttataccatactcattgaggaatacatctttcttctgggaccagagtcagggaggaaggtgggcatcctggagcagaaggggtgttcctgtccttgttagtcctgcttcacaccacttctgcccccaccccccgccctcagagtcctcagggactcaactgcccgtggcacattacccacaggcctgcttctcttctcaaggggggcaaagggcctgggcagcgagggtgggggaagctcaggagctgcaggagtggcgcaggtgcaggcacagggcggggtctttgttctttttttcatccctcccctcccccttcctccccggaaaccagagactttgccaccaccagtattggggatgctgagctgcggggtacgggcctgaggagggatgggagtaagaagtgctgtggaaaccgtcaggccatgaaccaggctgaccctcggctcagagcagtgtgcttgtggactctcacatctgcagccatgagcagaggcgacaactgcacggatctactcgcactgggtgagctgggcagggcaggggctggtgggggaggggtcatgtggccccaggtcccacctgctgggccctgggggtggggcggggctgttacaccccccttcctttcacatccacaggaatcccctccataacccaggcctggggactgtgggtcctcttaggggctgtgacgctgctatttctcatctcgctggctgcacacttgtcccagtggaccaggggccggagcaggagccatccggggcagggacggtgggtgaaggacaacagggatgggttgactgagagttctctcttaccgagaagtccccactcatcccctaaactctgcgttgcagctctggagagtctgtggaagaggtcccgctgtatgggaacctgcattatctacagacaggtagggagctggcagagaggaggggcacagaggccaggtcctgggtggctgggatgggggcgtgcaggaggaaggacaagttgctgaccagattcctgttccccgtcccaggacggctgtctcaagacccagagccagaccagcaggatccaactcttggaggccctgccagggtgagtcaactgtggctggagaaaagggggagggaaggaagtggggggcttttcgggcttttccgagggtccagtgaacttctaacagccttgcatctccaggctgcagaggaggtgatgtgctataccagcctgcagctgcggcctcctcagggtcggatccccggtcctggaacccccgtcaagtactcggaggtggtgctggactctgagccaaagtcccaggcctcgggccccgagccggagctctatgcct

SEQ ID NO: 12102 - DNA, 6000 bp, Homo sapiens
ctaacatttcccgttcttccctagccccctgtcactatgaggggaaatattttaccctgggtgagtcttggctccgcaaggactgtttccattgcacctgtctgcatcctgttggcgtgggctgctgtgacacgtgagtgaccaaagatggccagagagaatgactctgatatgagtgactgagggatgaccagggagtgactagattgctgtgatgtaagaatgaacagaagagcaatacaagatgggccaaacctgaagggaccaacactagtgtgaaagataaggcttcaggctataaatcaggggaggttggggtggacctggagagaaaatactcctgttataaaacaaaaaggcccacatatggtaggtgacagcttagttaggaggaccaaggggccactgaaaggggctctgtggggggaaaactgtgagagagggaacatgtgggcagggataaaggcagcctttcactgtgctgactccttcccctatccttggttccccaggtcccagcatcccatcgacttcccggctgggtgtgaggtacgtcaggaggcaggaacctgccagttctccttggtgcaaaaatctgaccctcggctgccctgcaaagggggagggcctgacccagaatggggctcagccaacacccctgttcctggggctcctgctccccactccagctaaactcaactgatcatccatctgctgactgctcactgctgctgccacttccagggaaaccactagcagctgccaatgtattctgaacaaataaattaatgctatagctgaaagcccgactctcactgtccacgacattggaccccaggtggaaaaagtgggtcccattagagtccaggtgctgagttctcagtatccggaaggaactagcaccagggtgggccagtttcagatggttatggtgctggtgctggggcctggggcagcatatgaggccagggtggggctagtaggcagcaccttgatgggcaggtcccagctgaaggtgtctacaggtacttgctcaggtcctgtccaggtggtaggttcgggctgttccacagggggtaggagtaccaatcctggttctcgggacgttacaaattcaaaatgcaatctccacttcaaggacactatggaagaaaaagattaaggtagaagcatcagaagctagcaggagtaaaagccaatgacaggatatagttagtgaatgagaagaaaacaatctgtgttcaggaagacagggaaaagtcacagggcagggagctgtgattaagggtttttctgaagcaatgggtactaccacagatgtgagctgaagatagcagtattaagtacctaataacctaagagtgaggcagtcaagtctaggtagcatgaagtaatcaaaaatcagtgtatcacagggtcctagtaggtaggtgtggggaaggagttctatcaagctgttaggagtttaggggtcagtgcatctaagaaacaggaagaggttgaaggtctgagaaactgttccgggtcagaggctagacgtgggtatgtctgggagtgtgtataaggaatcaggatccattacaccctcccttagcacagcattttactgtccccctctcccttctccagtaacagtgagggtctcaccaatggctgtacagaagcctggggtggagctgagagggattgggagggagaagctggttctagttgtatgtaggcaggattcctggtgccgggcgtgagtcacatgtgacacagaggggacaccccctgccccacgtcgccgctggtactcaggctgtacacgctcctcggtctgtaagctgactgaaaactgggagcaagagacaggtgtgtgctaacaggaagtgctgtctgtaggtgagaggacagcccaacctcaagctgttttacaaagggaccctggatgaccccactatccccttctacatgccacccctctttatacaggccttccaccctagcccttcaaccccagcaccccagcaggtaagaagctctgctcccttcttacctgcaaacaagctacggttccttcccctaagtttaaggtccccaccacgtcctcgccaagtctgtacacagatttgaagatgccaaacgtcccaactttccctcggccatcactgatattgtatagatctggggagaataggacactataagcctggagtctacatactggataacgtctaggactgggcaccacaggccaaaagatggggcttttctttaaaattggaggtgtcaggtatcagtggatccacagaagtgtgtggtggttaggagactgtctctgagatgggaaaacaatgaggggaaggatggggtaggacaattctgaaagaattctcacggaggctgcggcaggatgtggcagccattaggcgttccccagccagctcagctagccatgaatctttcttcccaccttcatcctcctccaagaatggactggatggggctacagcctcatcctggggaaaccggacatcctgaaggcctagagaaagaatgagtggagaggtaatgctgagagggaacggagatgagagtagaggttagggttttagattctaacatgagatggctaaaggtaaggggtgccagggctgaggtttacatctctatctccagaaccctccctcccttcccaactccctagcactgtcactgagaccaggaagtttccctgcagtccctcttgcaagccctctaagacaatttctgctttggcatcgcccttccccagcccttccctccaggagcccttgcttaccagtcagcacaagaaccctcagagggactctgagtaaagtgataggggagttgacacgctggcagccaatggtcagtttgtagacgtacttgactgactgaccccgaaaggagggtggtccctctatgggcagcacttcactgtaggagtctggttgggaagtagttgtcaggacagccagaggcaccagaggagtcctccctccaggagacttagaaggcaattcagggatggggacaatcactcacatgatttggactctccaggatcaagcctcaggtcacagaatagaattttcggtggagtagaaaggatacactggcccctctcacctgaaaaaggtaaaaatgactaatttaatgacccattgtccagtactgaacaagactagcacggcaagtggagatagtgaaaggctgccaggccctccgtccctgctgtgaaatgggaatagtcttctacccctaaagcaatagtcatgctccccaacatccccagcatgacagggactataagaacaagaacaattaacaacttcacccatgggtgacaatgcctccacacacaccctccgcaccccccctctcccaggcaaatgcccctctctaacctcggtgtggcagaaagacagtctggctgtcgggctggacatctggctgactagagtcaggaggaggcagtgctactcgactctcactggcatggaactggcagtggatttgggcactggcccaggccagggcctcactgtgggaaaaggaaaaggaggcatcagaggtagttcctgacctcacaaatgctttcccaagctccctatcacaccatcttaaccaacaaggttagatggctgtcctagtgatcaggaaatccacaatcccaaagagaaaccattaaataaagagtagcagactgtgcgtaaaaaggggaacgggggaggggaaggaaagcgtacagctatgtcatccacatcttctgttaaagagccctctcctacaatgacagcacagtgagcaagaggaggtggtgtcgctacaggacaacctgagctctgcctcagccccagagataatctggcttcttcccagaagggccaccaccttcagtgccagcatccccacctggatgcagaagtggccgtgggcggaagggggttggtgacggtcactacacactccagcgcctccccagccaaaaatacaggaccccggctgagctctgctaccacttcaatcatggcagctccggaatcagatctagaaggaaacaaggcggggcggaggtcagcaccttgacagggaggggcgttgcggtgagcacctagggctgagggctgaggacaggggtggtcagcaccgtggtgcccgagggagctcctggatataggaggggtaggcgggtgggagggaggcgactgaagactcagtactgcccagggggaggacatcgctctgggccctagaccccagcccctgtgcgacgggttcttctccctgggcacccccgcggagttcccaaactggcctccgctccccctttcctcaaagttccacgtcccagcccaagatcaccgccgctagtcacctcgcatagtcgacactagggatcggcacccctaggcctcatctgcccgcccctcagggacctggctaggtacgcggcggcggcggcggcggcggcgtccgctgggcggtagaggcgggacttcccttcggtcccccaccctccgcggagtcccttccggccggaagcgcccggcaggccagaccggaaagggctcgggtcatcccggcgcccagggtcaccttcccacgggctggcacctgggcgcgggcgctgccccggagccggccggcgggacctggcgcccaatcctgggggacccggtgccgtggcccaggggccgggccgaggtcccgggggcggtgccttgcgggcccgtcccggggcggtgcctggtgggctggccccgcggctcctcccctctctgcgggcccagtcgccctttggccgggcgagctaatcgtcggctcaatgacgacgaggcccgacccttcccgtccaggacctacagagacaaccgaaggagagcccaaggcggcttctttgctgtcgccgcccccactgaagcaagagctccccggctccactgaaacaccagctcatttaagctttccccaacgcccggccctccgggacgatacctaacaacgaccggcgcccgcatctggaataggctggcgagatacttagtatccgagggctcgggacttggcgccatcgaggtcatggggacccaggatccagggaacatgggaaccggcgtcccagcctcggagcagataagctgtgccaaagaggatccacaagtttattgccctgaagagactggcggcaccaaggatgtgcaggttacagactgtaagagtcccgaagacagccgacccccaaaagagacggactgctgcaatccggaggactctgggcagctgatggtttcctatgagggtaaagctatgggctaccaggtgcctccctttggctggcgcatctgtctggctcatgagtttacagagaagaggaaaccctttcaagctaacaacgtctccctaagcaacatgataaagcatataggcatgggcttgaggtgagtagaccccattgcctagaatgcctttggcttcactttgttccagctcaaaacttctagcagaggtgggaaagggcaagaaagcagttgggcttcttgtctgagtgaagcggtccctatccctggcatattttaggcctgtggttttggaccgtgagaccaggtcacatctctttgcaacacccttccctcccagtgttttgtcttttcagaaggaaagggtaggaacatttggtcatgcaatcagcctttcccattcaggctcttctcacatactggtttccaatgacttccctttgggattagctatactttgtggcaaggtaggaaaggataatctggctgctgtgatactaacacaatgttgttttatttgggggtgggggggtctcaaccccttatttcccacaagcagctggggcattctctgtacctcattagacacactgttagagtcccaacactactgcttctttcttcaagctttagctccagggagtaggtaagaagagcctccctgccctcacctctgaagtgatgagaaggtgct

SEQ ID NO: 12103 - DNA, 6000 bp, Homo sapiens
aacaataggagtggcagagtcccagcctcacctcttactgggtacatagctcagataggtcatgggacttctttgaggacacaaagtatgtgaaaatctgaggaaatgacatatcgtgtggctgcttgggaaacccacacagtattgtgcaactgcttcttgtttcattgacttggcccttggtaggtaaaaatgtatttgtatttcacaagtatgtgtcactcagacaacaagtaaggtgtccctgaccttacccagaggtcaccaatctttctgagctctgggacttatcagggggcataaactttgcctgctggtgtgctgggagaaaaagccggggtaccgaaatgatgatagggaaaaagccacctggtgtcttccttcttatacgctttttctcatcccatgttttttctggaacccaccttatttgaatcctagctttcctttacagatcacctttcccaagtagccttccctgattgcagctggtacaacttccctctcctatcaacactcagagcacttggtatgtgcggctctcaagcaatgctgataattttccttaggactgtttcccctctgagctacaggctcattcacttacacattcctgagccctgtaggaccctgtgtttcaaaccacaggtcactataatgggtcaggatgtcaatttaaagctataatttcccaaaattgcctgagaagaatcagccagggctagcgttaaatatacacaggccaactggcctctctcctggggattctaatttagtctgtcttggaactgattatatatatatatcatatatatcatatttgtgtatatatcgtatgtgtgtatacatcatgtgtgtatatatatcatatgtgtgtatatatcatgtgtgtatatatctatcatatatgtgtgtgtatatatcatatgtgtgtgtgtgtgtatatatatcatatatatatatatatatgttgggtttttttgagttagggtctaactctgtctcccaggctggagtgcagtggtatgatcacagctcactgcagcctcaacctcccagacttaagcaatcctcctgcctcagcctcccaggtagctgggactacagatgtgtgccaccacgcctggctaattattttattgtttatagacagggtctcactgtgttgcccaggctggtctcaaactcaagtgatcctcctgcctcagcctcccaaagttctgggattacagacatgagacagatctattttttaaccagacctctaggacctagaatctaggtcaatgcttttcaatctgtaatgtgcacacagcacacctggtgaacttgttaaataccaatcctggtttactggggccagaattctgcatttctaacacatttctgggtgactcagtgctggtgctgtccctaagtgtatggcccataggtagtttgcccaaattcaagagattcttgtcttcaggcacattggggaagcaagaattgagcactgttgttctcaacctcagcacacctgggaagcttttagactatactaaggttcaggtcccactgcaaaccaattaaatcagaacctctggggcaggggaatggggccggggagtggggcggggggtggctgttgttttgttttcaaagcttcccagatgattctaatgtgaaacagggctaagaatcactgattcagtggggccccaccaccattaaaatgaatgaatgaataaactgaagagaacaaacaatctcccaggctggcagggtaaaccctgggtctctgttatatgttattaatacagatgcacgtgagttgctggatcagagcaggtttggacatgaatgaagcagaaagggagaaggtcctggagttcacagaccagccatggggacagactgcaaggacctgaggtgggggcaagggagggtggggctgacagcactgaggggctctgcagcaggacgtagtgagttcagatggggcagcagtgaccagaagcctctgaactgagccatgcaggaggaacaggacattgttatgaagcaagcaagaccttttaggcacagaggacaaaaaatacccaagcgttgggggacgtgaaaagaatgcagcaagttcagggaagggaacaccaaggggctggctggcccttggccatttggtactgggggtgtgaaggggagtggcagagatagtcactcacagtagctgatactccactgacagcttgcgtaaggctgttttcgtgcacctaagagccaatgaagtctgagggcaccagacaaccttctagaaagcattttttgaggggaggagtggagggtgattaagcaaagatccaccagcaaccttcttatggccctttcccccaggaacccaggccctgccttccaacagctctgctctccacccgcatttcatttcggcaaacatctcctaggcgccctttttgccaagcactgagttggagagccaggaaaaagccagacagctctgccctcatgagctggcggtgggaaagatcacactgtcatgagtgactacaacataggacaggatgtcagaagcgccccaaactttggggcatgggaaggcaggggcaaggacagtcaattttgcctgagatgatcagggaagccttctaggagggagaggaggcaaaaggaccttgaagggctatttggtgaagggctaacatgtatcagtggtgaaagggggaaacaggcttaaggaacacaggatttgcaaaacactgagactgcatatggctaaagcacagaatatagttggggttgaggtggacagactggcaaaagggccaggacaggacagccccgtgcaccgagttaaggagtttggatttactgggggaaccaagagggaaccaagggggaaccattggagatttttaagctgcgggatgacatgatcacagctgggttggaggatatctggcagctgacctagtggttggaggtatggaatgcaggaatgggtggatgaggacagaaatgaagggctaactttaagatggatctggtatccaaaaatagagggttttcatccccaacattcatatgcccaagaagagccaatgaagggcctgggggtttctgacaaggaactaagagctggaggggcagaggactgtgctgtggcctgcagcagcataaaagaagcagactgggctcagctccagacctcagttttcccgttagcctgggattttctgagtctggtgtgccccaattgtgtgtttaatttcagtcttttccttcttgttcaggttttaccgcaggagaataacctctccattctaatctgaaattaattatttatgcttatgaacacgctggatgcctgcctggtttatttatttttcaaataatgcatctgaataggcattcacacaagacagggcaaacataattttgaggcaaaggccctttccaactgttgcccgattaactgttctaagccattgtgtagccttgtccttatcctgcggagtccaaaatttatccctcgcgtactaattagatggcaggtgtctgtgtctgacagtcaagattcgcattatccagccccaccacctgacccttacaatcttatctcctgctgctatgactttctccactgggccaaattccactcatccatcctccaaggcccagttcaaacgtctgctctgtgaagccatctctggttctccctcgaggggggaggtcccctcatgcttctgaatttccagtcttttgttgttgtatccttcatcagacgctaagctccccaggacctggcacgcagtaggttcctcaatggagcgtttgctggaatgggggagggtggtctccagcttcccgagaggcacctaagcacgccagccaaagtggggctgggcagagaccagacccgcttttggagtcagtgtctacaaagtgctctcgggggaagggggcacgcggggaacgtcgcccacccggagccgatccccccaagaacgcttcactcgggtggggttactgcttgggctcgccccaagcacagtgcgcacacttcacacatccgcaagcctcctgaaacgcctctcccctcaggccgacctttctgtttccttcaacgcctcccatctgttgtgtgcgttccagtttccaactcagagtcagaaccatcatttccaaagactcctgcaacagcccgaggacgcatacaaggcatgggttacttttcagacggagatttggggctcagggtccagcgactcacccaaggtcactctcaagaagtatgagggctatgactttgacccaagccttctaactccccgggcagcgctcctcccaagccccccgcaagctgtctgagcttcaaaggaaaaagtttaaaagtgatccatacgtcccaaagcacgcacaaagcgttcttctgtaaactgcggcatgggtcgctgataaaaggtccctctgaaggtttgaagatactcaacaaggctccacagagggtactttggagttttccgcgaaggcgctcgccccgcagaaccgacaaggcccctaaaaccgacaatgcccagacgccccctgcaggcagcgcgctagagaacgcgttggctgtttctggcacgctgaggccaccgtacggcatcaagggtgaagcatggtggctagcggagcccgcatcctgacaggtgtgctggcgtggccctctacctgccccgccgcggcggcctgcggccaggagaagtaggctggcgacatctggcgggccgcgggccgagggaggggaggcggggcggggcggtgtctccctcacgtgaccccaacagcgcccagcgcgtcgcgctgcgccccaacctcggggtcggtcacagtctgcgcctgcgcgggccccggctcgctagccgtcctgcgggacgccggcgctgatgggtgagtgtgggacgagcgtggggaagcaccgggctttcttcgcatgaggttggagggaggggaaacgcgctgaagggcccgctggggcaggctgccgccctgggggcccatccctgtcttctgcgcgctccggctgccctggcccggtccctgcgggccccacccaggcggcgcgggcggaatcagttctgagcctcctcggctccgggctcccccgcctgccgcgggtgtttgtccggctgctgggcgacctttcccgcgaaggcgctgtcccttcattcgggcgcgccctgggctggggaggcacctccctggtgcacaggaaccgcaggggcggggaggagccgggagctgcctgcgcccgggggacagcggggatggcaccgcgcaagggcctctgcgtcccgggagactgggatttcggcctcacctcgggacccctgactgtgaagtgtcagaaacggaagaggacttagtgatcttgtccaaccccctccccgcctttcacaggttggggaaatggacgcctggagaacggtaagttcagctacatagcctggcagtgcttgttctgcgacagcatattgcatcgcgttgtaggaagctcacttgtacaaggattttcggggacgatggtgttggtggtgttagtctccatccattatttggtgttcagtttagctagatggagtatgtcagcacctcaacttcctgcaaaacctttgttttgcatctcacagctctacctagctgatcttaattcccaccttctgtttttctctacttgtaatctctgaaacagaagcccttgaaatgtatagtgaccttgccattttgagccgcctctgcccgtgctttgaaaggattccataggatcaaaaggtgctaggactcttgaggtcccatagtggtttagagcacaggttaccgctttggaactggaatcacccttagcgcatctcaggggaaaacaagctaggagttgactcatctgatctctcgtttggtaaatgaaagcaaactcagatcagtggattttaaaatcagatattgctttgtctttatattggc

SEQ ID NO: 12104 - DNA, 6000 bp, Homo sapiens
gaggtttcaccatgttagccaggatggtctcgatttcctgacctcgtgatccgcccacctcggcctcccaaagttctgggattacaggcatgagccaccgcacccagccaagaatgtttctttcatacgtgagcacatagggtatttcatgtattagcattaatgttccttatcaaatatgcaatcaggggctctctatagaatcaatttcaataaaacagttaagcaattttttaatggagtaggcattgattataattttctcctcttctgacttttcaattcttcccaattagccagtgataagaaactggaaagaaaatttcaacttgtttaccattcacttgttttttttaacctactgtagtttggaaggattaaattttaggctagctgattcatttcacaaaaaaatttataaaatttataattcatttcgcacaaaaaaagttttaataaaaaatatttccctttgtatttgagctcaacttaattcccaattggccctgaaatgtgagaattgttttcctaaaatattgatggatgtcagaaggccacaagaagtgagacctcatcttttttgctctatgagaacatcaatctttctatttctgtgaaaaataaggaaaggtaggtggactctggtgatttcctgatgttgaagttaataaaaagctccattcaaaactacgatattcggcacaattaatcttccctgttaatataaacagaagaaagagtaaactatttgacctcaaagctctggtttaatttctagcaagtacgattacttcggttcacaatttaaaaaataaaagctttagatttctattccaagccattacttgataaatcattcataaaagaacatgaatgcacaaaacaaaaataaactttttttaaaaatttggtaagtgtcagtgttctaggatgtgctggccattctttgtggaggtcctcagaaccaccctctactcttccagccccagtgtcacccttcctgcccgagtgtcacccttcctgctcgagtgtcaccttgctcccctcccagctgacttccagttggttttggctaatgagagacacccacagaaacagtaaggtttcagaagtcagagctcaaaaagtttcttccctactcactcctgtttccaggttctgacaagaaaattcttttacttctatgactgtggctcctgccagacctttgtgttccccggctgctgccttctggggatctggcagcaaccgttcctccctctgcgcctctgctgtaggtagtaaaggctttctgctagtgcttgtctttggttgccacaatgtcacctggtgggtcccttcacttttcttttcagcctgtccctttaaactatctgagcaaatcatgctttctttctgggccttgactaatgcagtagtgcattttaaaaatctgactaatatcacattgcattgcttagaaaaatatcataagaaaaataattctttgagaagtagcatatttgtgaaagtagatctatttaggaattaaaatgctattagattggcaggcaaatgttatatttttgtattctcactctattttctagaactgaaaactaagttctagcttagactgcaatgcacacggtatactacaaagagagacgataaaattgcaggatgagagtataaagtacaaggtaaaaccttattgaaacaaaataagcacaactctatgtacaggttgtatgtgtttatatataagagccaaggccgggtgtgatggctcacgcctgtaatctcaagactttgggaggccaaggcgggtggatcacttgagctcaggaagttcgagaccagcctgggcaacatggaaaaaccttgtccctaccaaaaatacaaaaacttagccgggtgtggtggcactcacttgttctcccagcttctcaggaggctgaggcacaagaattgcttgaacctgggaggcagaggttgcagtgagcgaagatcacaccactactgcactccagtctaggcgacagagcgagactctgtctcaaaaaaaaaaagaagaagaagagccaaaacaaggatacataaggatacataccagcctgtcagcctgttttgtatcattggttacctcagtggggttggggtgatggtagtggcaattattaacattttctttatacaattcttttaaaaatgttccttttgtaattcaaaatattcaagaacaaatttcaaaagagtctgtcttaacaaacatttacattcttataatccagaagctagtcatcaaacacacctcagtatcatcatttgttccaatataaatatactcacttcctaaatatgtgctattgcaaagtagatcttattcctttcttattctggttgaatcatacaaccattatccagattgaaataaaaaatataattgtatttattatccatgttaaggttaaatagaaggtaagaagtttcaaagtttaaattgcattatcatggaaagtagggaagaaaggaaataaagcagcaacacataaaacatttatatttgtgatattcgatattttttctgggacatccagtgttctagttacatcggccatctcgaattcatgtcttcatttgttcagtaagtgtgtagtgtgtgatgattgtgacggatgcttctctactaggcaaagtaatttttagagcctcactactcttagtctgcaaagttcattgccagcattatcaccacagcaagtgtctatgctgatttaaataataaccatatagcagcaagtatagccacataaaatgcatttcaagacacacatttatgtttaaggacttcaagtcccctaaccaaacaacttaagtagaataaacctaaataagttttaagtcaaaagcaggggaatcaaaacaattacaagcctcctgtcttagaagaaaatgctgatgcttattggcttaaccatataaaatagtgtatatacatttactagacatgaacaatttggaacaaattttgagtgtacctataagtgtgtaaaatgtatattttatgtattgggaataatattcataaatatattcctccaatgttgtaaaaaatgcatgcaccctcactacgctagtgattttacagtttaatgaagccattttgttttaattgcaaatgtctaccaccgtagaagtttcttggcctttctccattaagcctaacactttgaacacccaagttcacttttttttttttttgtcttgagacggagtctggctctgtcgccaagctggagtgcagggtgcaatgttggcttgctgcaacctctgcctcccgggttcaagcaattctcctgcctcagcctcccgagtagctgggactacaggcaggcaccaccacgcccggttaattttttgtattttaatagagacagggtttcaccgtgttggccaggatgggctccatctcctgacctcttggcctcctccgcctcccaaagtgctgagattacaggcatgagccactgcacccggccaagttcacatttttaaagactccatctgatgcctgacaaattggtataataatagattgacatttgttgttttactctaggtccaatttagaaaatgatttccattttctctctttctgtctcactgaaggcaactgatctgtcaatcaaaactttagatttataattttttctgtaataaaagacgtgctatttacagagttcttgtgcaaaagtagtttaagtgaacccaattaataattcaagaatgactttgtaagattcttcatctattacatttgaattcattttacattttacatctattacatttgaattcattttaatgaaaaagcctttcaaagttgtctttccaaagggaagattaatacactatttcttagagataccatctaaaaaagtatctttctttcttttttcttttttggaaactcgcggtggtggtaatgtgagtgagtttgtcaatctttgcccctactgtgaatttgagaagcagaggaagagaaaaagagaaagaccccccccgccccctgcctccgcccctccctctagcacacagtaggcacgcaaggagtgcagtgttagctgctgctggactgagctcctcatcctacacttgcaggggttgctcttttggacagaaagctggaataaaacgtaaattttagacttccaccaaggccaggactagggtgaagggactaacgcactagtctcaggagcaactgttaagtaacgctaatcctgaatgaatgaaatagttttaaaattgaatgtaatcgcaaagaaaaaaaaaacccatgatagacaaaatattaaaactttaaataaaggcttgcactcgcacaacccaggctcaccggcctctccctgctcctggcccggtttcccagcttggttctctacaagtcagaattcctagcaaaatcaaagtgtgcgcgcgtctgcccgagtacacgccgcagagttatttctgccccatcttccctatttgaactcaaacaggacagcattttcctgggtgcagcccctgcgttgggtgaacagcgcagtgataaagcctggcgttctccacctgcaggcggaggctgacggcgcggtctttggcgcgagtccgtgcaccgcggccgccccgccccggtgggagagagggacggaggaagctgcaggtataacgggaggagagcgccaggcggagctggggcgtccctcccgctcgcttcttgactcgcgttgctgccggccgcctcccgcgcctagtgtccgggacgcgcctgaacctgccgcctccgtgcctggggtggcgccgcgcggccccgagcgctccagaaagctgcggcgcgagtccgcggggccgacctcggagacgcagctggggccgggcgcggcttggcgggagggtctgcagcgccgagggaggctgctagtgcgtgaggaagagagctagagactggacacgggagacagagcagcgtcagagccgcgcaggggacgggagtgagagcaggagcgacgcagagcggccgtcgccgtgcccgggtctcagggcgcctggctgaagtgagcatggcttcagtggcctgggccgtcctcaaggtgctgctgcttctccccactcagacttggagccccgtgggagcaggaaatccacgtaagtacagcaaatggtttaaaacttgcgctaggctgtctggaaaactttgtttttttttttattatcggtaatatttggaagtggaattgcagaacatgctcctgaacatgaagaaccttaaaaaaaatttggaattgcaacccgaaaaagacgattttgtttacaatagactttcctcttgtgggggagtctaagatataccatgcatgttttgactttttaatcgatgtacttgaatattcattgagaaagtggacgtttctgtaaaacctgaaaagcatcttaataagagattagcctgcaaatgctgtcatttattcctttttaggattgtaatattttgtaggaattaagtctaacagggaaaaaactggcagacattacatcatactgcatcaacttagatgttagcagcttacagttttgccgaccttggcagcttcagagttaaaatgctaattaacttccatgcagtatagggacagagcgcctgtaggtgaaactaaattaataacctgtcctaactactaagggaataacacttgaacacccctgtcaggggcttcgtttctcatagtagaaagttcttgcttaaagacaaaactcagccagtcatttaggtgatcttgaaaatgattcctctctggatgctaatattttacattatttaatttgccatcaggttccctgttttttattttccttaatttggtaaacacctaggaagcctttatttctagaatgggctatgattctaatgtaatgatgatattccagacagatgagcaaaacataatgtacccatattttatcacacataaaaat

SEQ ID NO: 12105 - DNA, 6000 bp, Homo sapiens
ttggtgaatcatcagtctctctcttctgcagtgttgccacctttaaatggccccttactctcataatcagtgctgagtagtggcaagggggagaaaatggaaaagttggcatgggagagaaggcagatccagaagataggatacagctcaggtaaagggccaaaggtctcctgaaatgactcttcaaggcaacttcttagtgtttgactgcctctttcttacattctttttattttgccccagccctgagaatgtggcctgattttctcttctgttattacaactgctcttctgcttgagtttcttctacaccttcaagatggctgaagaacaagacgctttctctccatgtctatgctgtttcactgtgagtaaagcaagtgtacatctgctttcatttctttttttcaaaaatgttattactactagtgagtgtggggaaagagggcatactgcaacataaataggagggaaactgcaagtaataaaaattgtttaaaattacaagtaattggttttagtgattcttggtcatttttgaggcacagaaggggaataatgcttatatagcagtgatccatgtggtttagaactgaagcagaaagaagacattcatgcaaccaacaatcatatgaaaaaagctcaacatcactgatgattagagaaatgcaaatcaaaaccacaatgagatacgatctaacaccagtcagaatggctattgttaaaagtcaaaaataacagatactggcaaggttgtggagaaaaaggaatgcttatacactgttggtgggagtgtaaattagttcagccattgcggaagacaatatggtgattcctcaaagacctgaagacagaaacgccattcagtccagcaatcccattactggatatatacccaagggactataaatcattctatcataaagacacatgcacacatatgttctttgcagtactattcacaatagcaaagacatggaatcaacctaaatgcccatcaataataggctggataaagaaaatgtggtacatatacaccatggaatactatggagccataagaaagaacaagatcatgtcctttgcacggatatgggtggagctggaggccattatcatcaaactaacacaggaacagaaaacatatttactgcatgttcccatttatagtgggagctaaatgatcaaaacacatggacacaaagaagggaccaacagacactgggtcctattggagggtagagggtgggaggagggagaggatcaggaaaaataatcaatgggtactaggctaaatacctgggtgatgaaataatctgtacaacaaacccccacgacacaagtttacctatataacgaacctgcacatgtacctctgaacttaaaagtttaaagagtgggcacatacccctgatatagatatagcttaatatataatctccatatatatatgactacactcatagcacatattacaaagcacataaaaagtaaagatcaaatattttcagaaaaaaagaaagtatgcacaacaatgacaaccttcataacttcataataacacatgataacttagcatcttttgcttacagtattatgctgattttgtgttattactgtaaagtacactggtggcttatatttgcagactagaactgtctcaagatgctatgatgctcaattgtgttaaccagtttataatcaattaacctaagcttgatgatggcaactgaatttccaggtatacaaataaatttgagggtgaagcatagttcctaaaaacgatgctgatctctgtttttatctgcggcattgtatgttatttgacaatgcgagggaacaccctatcttttcaacctaatttttcttataattaaaattaccattttaagcattggtaatttcttaccagcgagtaaagttttaattattcataataaaattttatgatgggcaaaaagaggaactgaagcagagtcacagtttaaaaaattataattatttagtaatgtatatttaataataaacataaacatacaaaataacctcaacttcaccagtatttctctctcttttgccttttaaatttgtttgtttttatttgtacagatttaggaggtatttcaggtacagttttattacacagatagactgtgtggtgttcattagtatttcttagtcattttgaaggagaaatatggttccctgtgatacttcatatttccatattgattttttttccttttctcgtctccttcccacagatgctgcaaatattcccagccttttccccttgatgcccaaaataaattcctcaaataccctgagcccaggaactattcttaatttcacataaattttatgtaaagggactgagtccttccatccccctgccacttcctggattttgctcttccatacctaatttctcaccaaaaacataccaccaccaccatcacaacaacaacactgctgtggaatgacaggagcctcctcaaagggcactggaggggaaggaactgtctgacaaactataaggcaatggttctagtgtactttattggcatggaggaggaaaaagtatagagaaacttatttactcatgtgttgatgtgatcacaagaatgaggcctgacctgtcataatccccagtctaatttctgcctccatttttgtctaaaacagagaagcccaactgtctgatgggcagttccgattgagagtactcttcctccatcacctgattcttaacattatcctggggctttaccatctacctgttcctgggacccaactcctagtgcagacctttcagctgggggtcctgggtcttccacagatttttggaattgtaacagcaatgataataacaatattggtgatggtgattatagataaccttcacagggcactctctgtgccaggtactatgataaatacttaacattgattgtctcttctgattttcaaagttctaagagaatttttttagttatctactgctatctaaaaaatggccacaaaacttagcatatttttaaaatatactttttttaaacttttgacctcttttatttgttaaaatagtgacatccataaacatgaaatgatttgatcataatgcattcattgattatggctcttgccatcttgtggcatccaggaccctggctgaaacgttttatctcacagtttctgtgggtcaggaatccgagtatgacttacctgggtcctctacttcagggtcactgagtcaaggtgatgcttgggagcagagtcatctcaaggctcagtgggatgaggatttgattgcaagctcacgtggtcattgacaggatgcagttcctcatgggctgacggactaagggcctcagttcttcagtgactgttggccagaacctgccctcaattccttgcctcatgggcctctccaatatggcagcttccttcttcaaagggcgtaagccaagaggacaatagagagagtctgctagaaagatgaaaaccacaatcttgtgtagcctccacggaagtaacttccgatcaccgttaccatattctattgattagaatgaagtcactaggtccagcctacactcaggggagaggattacttacacaaggacatgaatatcaggaggtgggatccttagggatcatcttagaaatattccatctcacagtttggggaaggagggaataagagctgttttaagattacaaagacaatatcaagactagaagatcaaggtagttcaaggtcgaaattgaagctaagaaaggtaaaggctaagggttggaatggagaagtgccttatatagtttttgatccatagtgtgtacctctctaatatccgtgtctcccagccctaacatgaaggtagagctaaggagatggtgagtgtgagactaaaggttatatgagggattattagggcacgccacaaaaaactgctgctctcattgggaaagtaaatggaaaataatggtaatggagtagtggagtggaacagcagcaaagaggaactgaagataagctatcctgagtaaaagcaacccagggttcctatgggaaggagacttttggcagagacatgccacattatcaaataaaaaagggcagagccagggcataaagcacgtctgaaataagctatccacaatcaaagacagtcaagctaaagaaaacaaattccagccaggaaacagaaggctggttctggaaagattttttgaggcaatgctacatagagcagaggtgtggaggagaggacagggaacatttttagcagcatcctctaaaacgaattctatttcatatgtactttatgaaagggggaaagattgcaggaattacaggcccaaaatccccccaaattcccgaggctctgtctattatagtccttttctccagcactctcctttccctcccactcaggctctttcgatcttgtcaacagagcaggaaccacgaagttcacactctgaacttctgtcttggaattatgccagtatcatagtgtgggggcaataagtggggattcattgagggaggcaagacaaacatgttaacagccttgaagaaatgcctttttagtacagaaaaagggagaaggaatcaggaagggatttcttaccaaacctcaaagaagatcgttctttaaagagtgctaacttctccagcttttagtggggaattgccctccatggggattaagagaccagcgccttttaatcaaaggagggctgtacgttcaaataactgggaacagctgagtgtcccacccaactctgaagaacaaaacagctacacgaagccactcctgcctgcagtatacaatgctatgttttttggctaattctccaaggatattacacttactttcaatggttaatgaatagcttctaagtgcctgtttcatttagttgtccaaaggccagtgggtcccagagcatataaagctgcaagctggctaatgagctcattctcttggagcaagcagggaagcagaggagcagcagggtcagggtgctgggttcctaaggtgcaaggatgcagaacagaactggcctcattctctgtgctcttgccctcctgatgggtttcctgatggtctgcctgggggccttcttcatttcctggggctccatattcgactgtcaggggagcctgattgcggcctatttgcttctgcctctggggtttgtgatccttctgagtggaattttctggagcaactatcgccaggtgactgaaagcaaaggagtgttgaggcacatgctccgacaacaccttgctcatggggccctgcccgtggccacagtagacaggtacgtgctgacaggcagagggaccaagaagggctgagatgggctgagttgtgtaagatctgagtaatttctgatcctactatggagcgacttacatgtcccatgggctgtctgtctagaaccaaagctttattgtcagggaattactctggggttgttattaggaagagtggcgccatctttggggaaaaccatgacgcaggggcaactcatctcagagaaaccctaccaccacccccagtgaaaacccacctaagccaatttagaaacccaggctcttttgttatatcatggcagctgtcattaattagtggcaggtgatggttagttacttcccataacctggctatgaggttctaaggaaagcaagtcccagaccaaattctgccacacaacaaatgaagaagcaggcataaaatgagtcctggaatctctgtgagctcagaaaagtcccagtttactgtccttttaggtgttgtgatctcaccttgcataaaacattccttcaggggaaggtgataatattctagaggcaagattcattctttctcgccatctcatacattaggatagttatcatcaaaaaacaaaaccaaacagctagtgttggtgaggatgtcaataaattggaacgctgtgcattgctggtgggaatgttaaaatggtgca

SEQ ID NO: 12106 - DNA, 6000 bp, Homo sapiens
tcctatctccacctcaaagtcttcgcaagtgtaacctaatataacattccaatttatccttgctacttaggaggctgaggcgggagtatcacttgaactgaagagtttgagcccaccctgggcaacatagtgacacgctatctccccttgtccccccagatttacaatttagccaatcatggagggtaaaggagagatgacaggaggcaccaataacagaatgtgctgagcattaatgagaagtgcagtgaagccccttacagcattgccatacttaattcttataataactgcatggtctaggtactactattattcccttttaaaatgaaaaatggaggcgcctcagagaggctgagcatctggttgtgctagtgagctacagcacgtgatctgactaaagagtctcaggtcttagccagtgtattaccctgtgtgaatgcacagttacaaccaggaaaaaaatgcaaaatgtgggcatcccactcactgtggggcgttctctccttatttggaagaaatagcacaatggtgaggatgtcacatacatgtaagtgggtgtgttagtctgttcttgcattgacaaaagaggtttaattgacctcgattctgcaggctgtacagaaagcatgattctggcatctgctcagcttctaaggaggcctcaggaaacttaaaatcatgcaggggagggagggtgggggcaaagtgggagcaggcacgttacatggccagagcaggagcaagatagcgagggaggaggtgccacacacatttaaacgatcagaactctcaagaactcactcactatcccatggacagtaccaagaggatggtactaaaccattcatgagtaatctgccctcatgatccagtcacctcccatcagacctcacctccaatgctggggattacaattcagcatgaaatttgggtggggacacagatccacaccatatcagtgagtgacatggagatgcactgcccagatttgcttgcaaagaaggacttgctgccgagctctgggtgctgtcagcaactggcccttttggagactgcctcagctgcagggtcgccttgaccaaggtcatgtcacgtcccaggatgaacgacatccaatgactgattcaggagggtatctaatggtccagtcatttaggctcaataattccaatgggccatctctcagatcccccagtgggatcaatgaaggccattgggtacaccccagctactccctttgcccatgctgcttcctgcctgtcccccacaggtgaaacatcttgtcagtgtctcagagcctgcttccctgagaactcaatctgtgacatcagtcccattgatcagagaagtctgtgtcctcttactttgttggtttccttcatagcttcctttcacatcagtttcctttgattttttttttttttgagacggagtctccctcttttgcccagtctggagtgcaatgatgaggtcttggctcacttcaacgtctgcctcccaggttcaagcaattctcccgcctcagcctcccgagtagctgggactacaggtgcgtgccaccatgcccggctaatttttgtatttttagtagaggtggggtttcaccatgctggccaggctggtcttgaactcctgacctcaggtgatccgcctgccttggcctcccaaagtgctgggattacaggcttaagccaccgtgcccggcctttcctttgattttttatgttccagataaatatctaaaaacaaaagtttatacaattctcaaagataggccacacacagattcaatccccctacccttttttttttagttaacagactatattttagagcaattttaggttcacaacaaaattgagcgcaagtgtaaagaggtctcctacacccctgttccccactagcccactccactatcaatcaacatccatttcccttggtttgggcaataaatacagattgtggaaataaataagtcctttttaaaaccaaaaattttattagactaatgtatataaatttttaattgcttgttttgttttgttttgtttttttgagatgaagtctcgctctgtagcccaggctggagtgcagtggctcgatcttggctcactgcaagctccacctcccgggtttacggcattctcctgcctcagcctcccgagtagctgggactacaggcgcctgccaccacacctggctaattttttgtgtgtttttttttagtagagatggggtttcaccatgttagccaggatggtctctatcttctgatcttgtgatccaccttccttagcctcccaaagtgctgggattacaggcgtgagccaccgcgcctggcctaattgctatttttaacatttgagtggtttgcagacttgattccaagaggttcttactgtgtggccttgggaagaccctttaaattttcaagtcctactgtcccatctttaaaacggaaataataattagtgggaggatttaattagacaacatatcccataacatatcctaactccaagcaaagtgcctggcacttaataaggattcaaaaaatggatatttgtaatataaagttggcccagcacaggcctcctatgctgcaacatatcacccaaactcagtgtagcttacaactgaagtttattctttcacacttctggaagcaggagactgcgctcagtttcactgggccaaaatcaaggtgtcagcaggatcttgctcacttcagagtttctaggggagaatccttgcctctgtgctggcattccttgccttgtggaggcatcgcttcaatctctgcctccacagtggccagccctcctctgtgtgtgctaaccaccccctttccccttataaaagtacatgtgactgcagttaggacccatcttgatcatccagaataatctccccaactcaagaagacccttaattgaatcacatatgcgaaggccctgcttctgtctatgtaaggtaatatgcacaagttccaggacttagaacctgttatctctggggagggaacatttttcagcctagcacacgggtgacacagtttctatctttattaagcacaatccaaaacacctttggaccatgaaaacagtcttttgtcccttccatcttgttattcaaaactatgttccttattttaaaaacctttcctccctgcctatcccagaagggacagcggctctcaaaggcagctgggtgaagtttctgtaagatctcagcactagctcgcgctgctgttttggaggcatctttccaaggctttaattaattagaggatgcattctagccctgtttcccaaacttacatattcccgatacctctgattcagtagattgcgcgacgtctggcaatccaattttttctaagtgccccaggggattcttatcatcagccaagatttggaaacagtaatttcttatacaaagtcctgaactaatacccttgaaataggggattccccttcactgccgggtgtgtcgcggttacaggactgagtttgttgagggaggaggaatgaacaaccctgaaaactaaactatcctaccttgtatattattcactgaaagagtttcctggagggaaaacttccaattccaattaaatcgaggatgacgacggcccggatttggcagtcctgcagctgtcactagctcgggacctcgtgcgtctgagtgatccagcccgggccgcgccctcacccagagccaaggctgtgagagcagctccagcgagggggcagggtggcggcggcagggctgcttcagggccggtgccggtgtcctcagagcggcgttttggcactggggtgggccggggcgtggctttcggcgccacctctgcaagcggccgccactccagagtggcgcaggtagggggcgtgggaagacctaagtatatttattccggcctgcgagcgggatgctggggttgctccaagggaccagaagagctgccctgtgtcccagagcaggctggttcttctgacagcgctgagaacctggcgctcgcgcctggccaggtaggggctgtgactggacgctcagaacatttgtgggagtgtggaaatctctttacgggtgatggggctcaaagtctgacgcagccgagggttgatggggtgcagtcacgctcagccaggggactttgggggcgcagtgtcaggctcagccagggagtgacaggcgcagtaccagccttatctgggggtgctggaggcacaggctccggttcggccaggcgggtgtgcgcgcccaggaagggtaggagcctgcagccgcagcggggggcgctggctggggctctgccccgccggcagtgcgctcgggcgctgttccagcgcgcggcagcgagtggcgctgagcctccgctttcgcagctcgcggggagcggggccggcgggaggggccgggcggggccaccgcctcctctgatggcaggctcctcctctccctccgcctccctcgctctccaccgcccgcccgcccgcccgcccaatccacagttcccggcccagccgagccgggctgcttgtctggccggcggaggctgagcgcgaccctagcaagccgcggcgcccgccgaccagggacaagagcgactcctgggaccccactctgccccgcgccgccgcctcctcccctgttgtcgcggggacgctcaggcccgcgccgcccgggccacgattctcctcctctttctcccggaggggaaggaacggagaaagccgagcggcggctccgggagagagcgagccgaggcccctgcccccgaggctcggggcaggaggaggaggaggaggaggaggcggaggcggagggaagtgcgcgtcactctcgggaggagagtatttcacctccaggcagaggctgcggctgccagttgagtacgagcggcagctgcgggcgccggcaatcgagtggcttcctggccatggagaggagatctggacccgaggacgccagggactcctctccgtctccctggaccgctgtgtaggcacctgagttaacggacgctaagcggggtaggggaaggtaagaagcgactcggtcacccgcccccccaccccgctccacctcgtttgctgccctcgggggccactgcggggacgcagacccgggtctcgcccaccttttctgctcccggcggcctggccggctccggcgttgggcatttctgccgaaaaggaaaacgtcctcccgcccttcccccgtgcgcctcctttcccggtttcatctctggattgggactgacccgactccccaggagtcagtcctctcttcttaagaaagggtcctcgggaacggtgtcttgatttctttctctccactctctcttttcattacgtttacggggaagggaacaatggacctttcaaagtcggtgcgaacagccttaaactttctggagagggatggggtgaggggataaaccccacagtaagccgattacagtgaaaggttgatggaatgtgctttgcagtccgggcttcagtgcgcgcgcgcttgtgcgtttggggtcatctttgtctccttacaattcccctgggttggtgggtcctccgccctccgccccctgcctctctgttagctgaggtaaggtgaggctttaaaatcgtgtacagcttcctttaaatctggggaatagccttagccctggaccctattcccagcttttctctgcagagttgggagatcctggtaaaggaggggggccctctctgtgaggacccagagtgctgctgttaatagcactagtggctacacccttagcgataaaaccaaggtcctgaattccctggatgctctctgctgagggttgatgagtgtcaccagacttcgacctggagcggaaacagctcacttgaattctccgcaggttaggaaaacagactttgatatatatctccttttatcagcagttgggattaaggatagactgcctaataatttttaaaactttcattgtgcacatgagctact

SEQ ID NO: 12107 - DNA, 6000 bp, Homo sapiens
ccagaagttcaaatgacataatcaacactaggtatttgtctctatctttctccacatataaggcccaggtctctccgtgatggccataaacagcttgaggcctatattctcccaatatgggctgccttcataggaaaagataacttttctgtctcagtagttccagggattgtcctataatggagtcttactggactaattgggtcatgtgcctctccctgaaccaattactatagcctatagaattggacattgtaacaatttcttatggctgttataacgaattacccaacctggatggcgtaaaacaattgaaattttattccctcatagttctggaggtgttcttccaaaggctatagcagggaaaccgttccagcttcccgtggccgaagacatccttggcttgtggccccatactccagtctctgccctccgtagtcacatttgccttctattttctgtctcaaaactcccatttcctttccattataaggacacttacggtttattcatagcctacccagataatccaggataagagccccctctcatgatccttaccctaattacatactttgccatataagataatatttaaaggttctggggattagagcatggatatatctttggcagggggcaactgttcagcttatgacagatatttaggattgaaaagtcagggagaaatagttctccaaaaaatgatgatgttggtacctgagaaaggaaataatggatactgaaagcaaacacagcaagatatttacagcaaatactttttagtctgttcaattcaatttatttcatgcagtttacccttgaacaatctacgggttagggacacccccatctctgcacagttggaaatctgcatttaactttgattcccccaaaacttaactactgatagcctactgttgactggtagccttactgataacataaacagttaacacatattttgcatgttatatgtattataaactgtattcttacaataaggtaagctagagaaaagaaggcagcatttaagagcaatgaactaggatatctagcagaagaaatgtctaagcagtaaagcattcaaggtgttgcatggattgttttggctgcttacagtaaaattagagaagaaataaatgattaaaagatgaaatttataactaaaaaggaagcagaaaaaaattttgaaaattttcagcctggccaagagtgcaaaggcatgtttgggagagcctcataaagatgtaagtccttgtagggatatagtccagtggaccccttgctaaagagattaccatggctagaaaggagtcaggtgctattcatcaagacaagaaagaccccaatggcatttcagagattttttaggttgccccttccatcacaggcccagagcaggaccttgaaggcaaggtttccagagacgtggccacaggacctcagcatttgctaccaggcactgcctcaagtatctgctccccgctttccagcacagcactccacagctgttgcagctgtgtggctcaagtgggcccagctgtggcttaggctactgttctagagggtgtaagtggtgggccttggcggcatccatgtggtgctaattctgaaggtacacagagttcatgagctatggggctatggcagcctccacctagattccaaagaatgtactggacagcctggggatacaggcagaaacttgccgtaggggcagaactgccacagagattccctaccagggaaatgcctagtggagccatggaagcaaagccatagcagggaaccaccactaggacaatgaccaatggaactgtggggttggggctgtcccagagcccccagaactgtagagctaccagtgtgcaacacagcttggaagagctttagacatgagactacaaaccatgaggttctgtgacatgactacacccagccaagttatacagatggggcagcccaagaccttgggggtccaactcccaccctagtatgcttagaaggtgagatatagtcaagaaaggctattctgaggctttgggatttaatgttattttttccctgttgggttttggacttacttgggaccagttacccctttatcttacatatttctccctttgggaatgtgaatacctatactgtgcctgtgccaccattgtattttggaagtaaataatttgttttaatttcacaggctcattgctggaggaatttgtcttaggatgaattgtgccttgaatcttgctcatatctgatttagatgagactctggactttctagttggtgctagagtgaagaccttagggctgccaggtgcagtggctcatgactgtagtcccaccactctcgaaggctgaggcaggtggattgcttgagcccaggagtttgagaccagcctgggccacatgtcaaaacctcatctctacaaaaaataccaaaaaaattagctgagcatgatggcatacacctgtagtcccagttactcaggaggctgaggtgggagaatcacctgagcccaggaggttgaggctgtagtgagccatgatcacaccactgcacttctgccggggggacagagtgaaaccctgtctcaaaataaataaataaataaataaatattaaagcctttagggctgttgggatggaataaatgtattttgtatgtgagaaggatatgaactgggggtggtggggggcatagaagcagaatgctatggtttgaatgtgtgctccataaagcacgtgttgaaaactgaatctccagtgcaacagtgttgggaggtggggcccaaagggaggtgtttaggtcataaaggctccactcttataaataaattaatgccaattatagagggtttgaggctgcaagttcaatttcacatacaccctcttgcccttctgccttccaccacaggctgatgcagcaagaaggcccttgcaagatgccagcaccttgatattagacttcctagccttcagaactatgagaaatacatttcttttctttataaattactgagtctgtggaattgtgttatagcaacacaaaatggactaagacattaaggaaaggatgcttaacaggcaaaacatggatgcttccttcaaccaaccactgtagccccttgcacattgtttaatcaaaacccatccaattgaattttcagggccagcaactgattagcttttttataaggaatgtaaattatgtatatagatatatataaaactgcatcttaaaattttcaacttttgtcataaagaatctaacgaaaaggactaattcatcttcaattaaaatatagctcattcagccagctgccttagcacctagacatatggacctgttccataaagtgtttaagaatcactgagtgagtcgctaattagttgctgataaatgagagactaatggagaccctccttagagccaaatgatatagaagttacagtccaccagtctaagaatgtaaactatactaagagagctaaaatgggcaagaaagggaatttcctgtacctgtccccgattatggttatttaagctcactagaagatcaaagtgacacaacttaagtctgcaaaaccagggctgacatctgatacagcctcagcttctgaatgctttggtctgaccctacaacagtttaacagttgcagataacaaaaatatcattttggaatatagtagaacattcctctaaaggggtcatgtatggtcagcttctaattcagctaagaggttttagctggtaaagatacgtttcctgcagttaagaagctccatgctcaggtagcaatagggtatcttgatcaccttttttaaggtgactctttgttctggttaaaatcaatttcagctgtgagcattcctttaggtgttcatgtatttacttgtttttttattgtgatttgagagaggcgcagaggaaggagtttcctttcccagacaccagagctaggaagacatgaagacatgattctaggaaaactgttctcaatcttggccgtatactgtattaggattatctgggaagctcaaaacaaacaaaaaatatcaagttcactttgaactctggaagtgggaccctggttcctaaatgctctaaaagctccccaaataattctaatggatggcaggtgctgccagagttaagaaccattgctttagaattttctagcatggtttccctgtaggtcactagttttgtggcattctctccgggaggtacggcctcatagggcttctcaaacatcagtgcgcctgagcgtcatctgaggcgctgtttcaaatgcagctgcccgggctataagatcacacccgaaggcgtccgggaatcttcactttttccgttgctagcagtggaagggtcacagaccaaacactaaggcctgagcggtgacaaccgaggcgagatgatggtcaacagggaatgcctcgtgggagaaaaaagacaattttgtgagtataagccccctaaaaacctgtttttcgttcgcttccttctctgggcagttttgacccgacgacttttataaagaaggtaacgtgagtgtggcgctgggtgcggttggctgttcgggaacattccctcggggcggaacgtgggatgggggctccccccaggtaccctttccccacagccgcttccccgctccgcgtcgctgctcaggcgccagctcccgcgtcggaaggggcgatggggtggcccgggggaaggggcaacgcccagcggcgagaactgggcgcacgctggcgttcctgctcccgccgaggggcggccaccggccggggcgcgcgcaccgtggggccgggagtccgcgcggccccggcagcccctgcctcgcttctccgcgctcgcggcgccgcctcctcccttcgcgccgccggcgctgctcgggggcggggccttgccgctgcggaggccggagacgcggcggcgctggacgcggaggcgctgggcgcacggcgcggagccggccggagctcgaggccggcggcggcgggagagcgacccgggcggcctcgtagcggggccccggatccccgagtggcggccggagcctcgaaaagaggtgagtgggcggcgcgcggccccaggctgcccgaaccgcggtccatcgcttcctccctcctttgcccagggcccgtaccccgcgcgccgagacctcgcgtcggtccccggagcctccccgcggcttgcgccggggctgcaaccttcgctggctgcgctcggggctggctccgcaccttcctgcaccgagtagcccgcggctgcctgggcccctcggctcgctccccaagaccgggcgcgcggcccccttgccctgcgatgaggggcctcgcgaggattccctgccctgcagtctcaggcgatgcggggcctgtctttttgttctgagctttgtcacgcgcgtcggcatccaaagtcaaaagcgtgcaccccctaagtcgcactagttccagttctgcagcgtgatttgcaccaggcgcgggaggctggccgagccgcgagtctctcggctcccgccgcctcttcctcccctccagccccaggcgcgctccggccgccctggggtccacgttgccgctgggcctcgtggctggtgaccccggagcttgggctccgggtcctcccgccgcgcgtccagagcgcggctgcatcccgttctcgtggatgctcggggttttctcgcatacctgtgtttccacctttgccaacgtggaggatccacacaactttgccctgctgtaaaaatcatatcccatttaatatttttaatgatttgcttttaagaaacaaaatgtgaagaataacaattttgatgaaattttttagcaaaatttaagaattattatatttgaaataccatgatgatgctggacaatttcagatgtcccatagccagatttgcaaaactaaacttgtgtgactttcacgattttgaggttttctttgtctgatttggggtccctaggccctaca

SEQ ID NO: 12108 - DNA, 6000 bp, Homo sapiens; identical to SEQ ID NO: 2589

SEQ ID NO: 12109 - DNA, 6000 bp, Homo sapiens; identical to SEQ ID NO: 1346

SEQ ID NO: 12110 - DNA, 6000 bp, Homo sapiens
gacaacagagaaggcatttccaaggaagtggcatccacagggatgagacaaagtcgtttgagtgaagggagtgagcgagagcatgctgtaggcagaaagaactgcttgctaaagcgccccctggtgaaagggagttcatgctttctatgtttttgagaaaatgaaagatcagaatagctggaaagtagagagcaagaacatagcacagaatgggcctgaacaggtaaggaggtgtcagatccccagggctatgaaagatttcaggctttcacttaggaacaggagcaaggcatttggcagaagcatcgttagctttagtttgaagagatcttcccatatatgggtggagaggagactggagcaggtggaagctagagatggaaagactagttaggaggctcttctccaggcaaacgagacaagcatctccggctagggtgatggtgatagagagagaggacgggaggcagagggcattgggtggagaccaaaggccgtgatgctaagtgcacataggagagagggcaaggagggggttgggcttctgatcttgtggaactacacggatgatggtgccatcaagtgcaggagggaacgtgggaaaaagatgaggtttggggcagggtttggggtagggcgatgtagagcttgagtccatgatttaaataacttgagtttgaggtgccattgggacagtcatgtggaaacgccaggcaggcagctgcaaatgtaagtttggaggtcaggggagcatgccaggctggagttacagatttaggaggtgctgggcacataggtgacattggaagccatgagcttggaagagatttcccaccgggagagtgtggagcaagatgagaggatggcagaggaccaagaccagcataatcaccaagtggaagaggttaaggtgcaaagaagaacaaggagaaatggctaaataagtagaagcaaaaccaggagctcttgatatcatacaagccgagggaaaacatgttttgaagagggaatggtctagggtaaaatgctgcagagagactgcgtgagagaagaacaaaaatgtatgttggttcagtacatggatgaccacacccagctgcttgtgtggattcagggtggcagactggcaaggagtgtggagtgaggaaatgaagccattgtgtttgacacgtctggcgatttatcttgtttgcagtgggatatttgtagagctccctgctagtggagcagaagggtacaattcagctgaggatttcctaactgaaaaagtaataagcaagtgaaaaactctaccacactggtctgcatgtattcctcacaaaagcgcggtgggcccaaggccttggactgtagtcacctactttccacgtccacgcagtgaagtttggtatgcccagatactccatatcgtttttttttttttttttgtagcgggggaggggtctgatttggtatttattgaaactcaaaaagcactacctacaaatgaaagaatggataaactggacttcagcagaatgaaaaaccgcaacttatgaaaagacatcattaaaaaaatgaaaactagccagaaactggaagaaaatatatctgtctctttgagttttcactcagaacatacaaaaaagagctctaaaaacttttttttgttttgttttggagacaggatctcactctgcagcccaggctggagtgcagttgtgcaatcatagctcactgcagcctcgtactccttgggcccaggtgatcctcccatctcagcctcccgagtagctgggactacagacgctcaccaccattcctggctaattttaaattattgtttgtagagacaagctctcactatgttgcccaggctggtctcgaacccttaggctcaagtgatcctcccacctcggcctcccaaagtatagggattagaggcaaaagccaccatgcctgggcaacacttgaaaagaagaaggcatccaaccttatgaaaaaatcagagaagaaaagaaattccatgatttgagggagacaaagaataaaaataaaaataaatcagcaaaaatttgactagacatctgacaaaagaaggtaggctaacggccaataagcataagaaaaaatatagaatatgactcctcatcaggaaaatgtgaattaaaccacataatttaaccacccaggtctcagatatcccaggatacccctggccttgaaatcttcacactggctcttcactccagctcaaatactcttcccagatatgtgcatggctccctcctttcttaaggcctgcaagggcttgttcccgccggtcttgctagtatagaccctgctcattttctctccctcttgcttgctgttcatcacaaggatgaaaatggctgtccccatacagctggtgtggtgtcagcctccagtgattcctatctcttggtatatataaacctgtttagtttccttctatgacaaagggcccacccatggagccaatagatactgcagaaattatggcatgtgacttccaaggctaggctataaaagacactgtggcttctatctggctctcttttggattgctcactttgggagaagctagaagccatcttgtgaggatgcccaagaagcccacgtggctacaaactgagtcttcccatccacacctagcactaacttgctgagcatgtgagtaatccaccttgtgagactcctctagccccagcgagccttcagataatggcagcactggctgacatctgactgcaacctcctgagagaccctgagccagcaccatctagctaagtctctcctgccttctcgacccagagaaatggtgtgaaataacgaatgtttactgtttttagctgttaaatcgtggggcaatttgttatgtggcaattgatgactaatacagatggaaaggaatatgttgctccaatttggccttggacgtaagccatattctcttaaccactgagaaagcttgtattttcatccttccaactttgctttttttgtttatccttcagttcagaacctacagaaagggaaggagagagtgagagagaaatgccaaaaaagaaagctttaaaaggcttttaagaaatcatatgcaatataacccacatttctgactccacccaagaaactgtcagcaaaatatatgttgctgtttaaacctttgagttgggtttgtggggcctcagtcatgtgaaaataacacacagatgggggcatgatgaggtcattttcctgaaggtcacacaaaaataaatggcagggctgctgatgaaatggttctggagccacatgctcacgctgtgtgaagtggaaagcaaaggtgctgggaccaccttctccgagctgcacagcaccacggaaaggacacagcattgctgagggaggggttttccagggcaggttcaagacccttctctgcagcccctgttgggttttccctagatccagaagagaggggtgtggaactaagtgcttcagcacctactcttaaaacattactctaaaagcatccttaaggattctaagggaagctaaagggaggaaaaccccaaagataaacccctggcagtcctctaaccactggggagagcagcccccccgttcagacccgcaccagcctgggcagaggaacagcctgagcccgtctaagaagtttggtaataattttgccatccagttgaggaggggctaggatcttctcccattctcctactggatttacagcagctcctgggaatgagaactgcgtgagatatttccctacacaaattgggtagagatagccggacgcctaaatacttttaacagaggtaacaagctagagctggcttagtcattttgtccgcagaccatagcaagagagtttttatttctggccacgtctgaggcctcacgtctggcacccaaggccagggctctccctaatgccctccaattaacagagcttggtactccagcaaaaacaccaaacaaactgctggataatcagttaaaagatcaatctcatggaacaagcaactgagatgctggagaatccaattccttcctctaagaggaaaaacaaagacatttgcatgtgctgagcaaaaccaagaataagcaagaaaacatgctatttgaattccgttcaaaatgtctctaataagtgaagcaaattctgcacattctgggcctctgcagagaacaaatagtgttctgcctttaatgggtaaaattatacaatttgcttttaacagtaaaccaaaagccgcggtggcttcggatagcatcgcgctcccgagggctccctccacgcagctcgacccctggcagttttgagcatttcgggggacgcgcttgtccccaccgacctgggagggcgccggtgccaaggcggcctgtttgttttcctgaacatttccttttgcaactttcgcttctcctcttcctgcctcaccgctggtgtctggggctgggtggctctcagatttgtcccggtgcgcagtgcagcctggagttactgatttgtgacctagatccccgggtgtgtcgcccccgaaagtcgggggcacccgctctgggcgcctctcctgcgtgggcagacccgccgaactccggctgacgcccccaaggcgccacctttgtgttcaagcgttccgaggcgcaggcccgagggcgggcgcaggaggcaggtccggggccccagctgcagccccagctccttgggtcccgcccgccgcccgcgcgttcccccggcagggggcgccggcgcaagcctcgctctgcccatcggggcgggcgagcggggaccctgcctcctgcgcgctcgcccgcggtccgccccccgcgctcgtcctggcggccggcgggacgccccagcccgcgccaaggaacctccccagccagcccttgccgtggccggagccgagcggcgcatccgggccggagaagaggacgacgacgaggtcctcgaagtggacccgtttgcgaagcgccagggagaaggaggagcggacgcatcgtagaaaggggtggtggcgcccgaccccgcgccccggcccgaagctctgagggcttcccggcccccactgcctgcggcatggcccggggctcggcgctcccgcggcggccgctgctgtgcatcccggccgtctgggcggccgccgcgcttctgctctcagtgtcccggacttcaggtaggatctggcgttccggcttgtgcgcagacggtagctcacggctcgcttggccagcccttccgccgccactatgctcccggccgctgcgccggcgcccatgctcctgaacgaggggcgccaggcagggccattcgcatctcgcccgacgccgctcccggcccgcaccccggaccccctcgggctggttacaataagccgcgctctggggacgcctaagtgtttccagagtctgggggcgggcggcggcggctgggagcctctcggtggcgcttcccgagggtcgcgagtgggagtgcgagtgtgaatgtgagtacccgccctgggcccgggacccgagtccgcagatgtgccccgagggtcccaggacccgggcttcctccccgaggtcttcctccttcaagggcacacggccccgagtgtcccccgtctgtctcggagcgtccccccacccccagggcggcctgatgcctggcagaatcctggggtggacgtggccccggagaagcggctcttgcggcgggggtgggggcgccggcggctcccgggtcctgactttcccagcccgcgggccgcttgatggaaacgggctctttggcatcccttttgttggtccctgaaacctcctctcccccaccgctctggggtggccgaagtggtgtgtgatctggattgaaatggtttgtgactgggatcgcgggtccctgagcggctggggcgcggccgccttctggccgcgccggggggacccccgggacctgtaggaggctggcggcgggaggggcggggcccggctcctaggtgggtttcctcccg

SEQ ID NO: 12111 - DNA, 6000 bp, Homo sapiens
ggtaccaggaagtgggtgctactttaataaatacctcaaattgtggaagtgactttggaactgagtaataaatagaggttggatggtttttgaggtacttgagagaaaagtcatagaatttcttgaagagactgttagtggagttatggattttaaaggcaattctggtgagggaacagaaggaagtgaagagcatggtagagaattcttccatcatcttagaaatgtatatctcatcatgagcagagtgttagtagaaatacagatgttaaaagtggtttatgttgaaggctaagaaggaaatgaggaacatgttactggaaactgaaggcaaagtgatccttgtgacacagtggcaaataacttggatgaattgtgtccttaggtggacagcagaatttgtaggcaatgaacttggatatttagctgaggagatttctaagcaaagtgttgaagatgcagcctggtttcttcatgctgtttgtaatgaaacagaaaaggaaataagcaaattgaggaaggagctgttaagcaaaaagaaacaacacttgatgattgggagcttctcggcctattcagattgcaaaagatgctaaaattgggaaactcactgttgggaaagtgtactctggatacagggccgagggtgtgcctagacaatattgtgctgaagagatctgctatacaactgatggatccctcaattatctcacggatccaaggatagatccagcgttatccaggaaagatctgtgggggttcttttatctaatggcatggatccctgtgacatacatgggagcctcaaaagttcttgagaaggttgtaccagaagaaacactgtcagcttggcctgaaggggctgagacaggacaaagtgaaagagaggctgtcagatatgcacaattcttcaggcaagaagaggactgatagaactactcaggtatcagcatgtgctgcccttcaagaaaaaggaagaatcactatgaggacagggtcatgggcacaggggtagaggctgaatgttcaagagcagagacctaccaagttgccatgagcaaagaggcctatgaagccatgagcccaaaagacacagcttcaagccacagaggattattcccagaccttgaaaccaaatgactttgccttgttggatttctaacttgcttgggattgatgacccttttattccttctaatttctctgctttgcagtgagattgtctatcatatacgtggcccacctttgtgttttcgaagcaggtaacttcttttctagtctcactagtcaatagatgcagaggaattttgcccttgcatagctcatacccatagactcacctacacctgattatttatatgtgaatatttgagactctttgaattaatttttatgatatttaggtgagagttaagacttttggagatgttgagacggaatgaatgtattttgcacatgaggcagatgtgaatttggaaggccagaggttggactatagtaggttaaatggtagagcccaaaaagacatgttaacattcgaatcagggaatagaacctgggaacatggcctatttggaaaaaggttctttacagatgtaactaagttaaggctctcgctggaagaggcaaaaaaagtcttctccccccagagcctttggagggagtatagccctgtcaacaccttaattttgtacatctggcctccagaaatgtgacagaataaatttctgctgtttcaaggcacccagtttgtgatcgtgtgttacagcagccctaggaaactgatacagaggccaagcaaaagttccaaatcaagcaaagtcccacggtgtattccttccagttatcccaaaatataacaatcccaaaacagtggcttagaacaataacaatcgtttatttttgcccacacatttgggtgtcatctgggcttagctaggcatacctcactcagggtctctcagtggtggtaaccagatggtggctggaactggagccacctcgaaggtgtcgtccctcacacgtctggtacctggactagtaagactcaaacagccagggactggggcagctggggccccttagtcatctctttccccttctatgtggttctcacatgatctttctacatggcagctgtattctcttatagaagctgccacaaagatatgccttttgatgagtgtgtaaaagaatttgcagatagtaccattgactcagaattgcagagagtatggtgaagttcacccctcagagttgtcttgctaagtagggcaaggaagctgcaatatttatatcccagctaccatcagtaatccacactggtaagtactgcccaggagaagatacattctcagatacttccaactctccaggagagcaggaaacgtgggaatggcagccttcaagggggtcctctgagaaatgcaggcgtggctgctggaaggaaagcacccgggggaggaaatgcacgcaagcacaggactgtgagcagagcactgacacggactccatatcgccagcttatgtggaaatgtagcacatagtgtagcggcatcattatctggggtaatacctgaggttcattgtcccacagccatggaaaactaggacgcgacacaccacagtgaggttaagagcagaagtttaataggcaaacgaaagagaagagctatctgtgcagagaaaggggtcccagagaaaatgggttgccagttctgcggtgaaacgcacagggttttatagatgagcttgaggaagtggcgtttgatttacgtagggaatgaaagactggttggaccaggtgtgccatttgcatagtgcatgaagaagctggccttcccaccctaatattttattctgcagatggcttctctacctgactgatgccatgttgcctgttccttcactgtacacgtggtgacaaagaaaatggaagatggagtctccatattgaacatacctggcttccaggtagtctttttctatcggcacaactgccagcattctcccgtgcactgccagcttgcttatctatgtttgtagctcaatttttcaggctgctctttgcaaaaaagaaataattttggggttgctttttgttcagaaagaagctctgctgaggactctcttaccttcactatctgcctaaataatttctttttggctcctgtatcaatagcactggtaccatttcagaattctggggaaagtcagggttactcaaataaatggcactcaaaaaattgttattcctttagaaaaaaacataattaagtcccttaactctcattatccaaaaatatagtttccagagtaaagagctaattgcaaataacaacaaactgctgcaagaatggttggaaaccatagatgtggtgaagaaggcctttctaagcaatatgcagatccagaggcaaaaaacagactgaagcactacataaaatttaaaattaaagtatgatgaaagagcagaaacaactaggcggcaactgagcaaaaatatttttcacatatgaaacagaaaaatataagatattcagaatgtatagagttcctacaaatccataagaaggcaaaaataaccaatagaaaaatggattaagaatatgaattggcgattcatacagtctataaatgccaataaacatataagaagctgcacaacctcatgagtaaccagaagcatcaataataaaggatagtgaggtatcattttatctccattaaactggcaaatttttttaaaagattgataatatccatcatggactagagcatagaaaaacttccaaattattttaattggttgagccattttggcagtacttatcaaaattaataacgtgcatagtcttcagatatatcccatgttgaaaaaactggtcagaaaaactccaacatgcacagaaagatatacacacaaggaacatcgacagttatggcagcattatttgtaataggggaaaggtgggaacaacataagtattcaccaatagggaaacgtttacataaaatggaacgatgaatatacataaattattccatggaagtcttcagccattaaatatgagatatattaggaaaaaaatgctagaaaaaaaatttaaaaaaagttgtagaaaagtcttgtccctatgatctcaattatatttaagaaatccaatccaattaagtatgtgcgcgtgcatactgtttgcatatgcattggaaggctctaaaaggttctttaccaaactgctatatgatttaatacctgcaaagccttggcctatgtctgacaaaacaggaagtgctatatgggttggctatttttgtgtataattatgcatttcttaatgataatgcattgctggattacttatgctactaaacgtaaacgtattggccaggcgcggtggctcacgcctctaatcccagcactttgggaggccgaggcaggcggatcacctgaggtcaggagtttgagaccagcctgaccaacatggagaaaccccgtctctactaaaaatacaaaattagccaggcgtggtagcccacgcctgtaatcccggctactcgggaggctggggcaggagaatcgcttgaacccgggaggcggaggttgcggtgaaccgagatcacgccattgcactacagcctgggcaacaaaagcgaaactccgtctcaaaaaaaaaaaaataaagtaaacgtattgcaatcattttaactctctgcgcccagctgatgaccaagtgtaaggcccgttcattactactttctccatcctgaatccagcagggagggtaataggacacaaggtaaacaattcttggaaaaactgcggcatcccacctgaccccgtccagcctcctgtcaaccagtgcgcaagtgcgagtaggcggtgcccagcgctccgccgccccgccctctgcggaggtgataacgacactgagcagcgacgcgcacttttgggacgcgcttgtgacccgccttccggaaggaagcggctaactatggcgaccgccacggagcagtgggttctggtggagatggtacaggcgctttacgaggtgggctccgcgccattagcggtccgcgaccacacccgggcccggggagggtgggaggacgcgtgtggatttgtggcctgagacctcggcgggactggctcggtcacgcccagactcggtgcctcttgctggaaggactgccgggagcttctagtcccagcggttgagtgtagggaggaacgggcgggggcgggggctgggactgagggtctcggtttgaattcttatgctccgggtcccctggaagctccggaaaggaacacgtgtaaggggacgcaggagacaggtctgcaaaaaccagagtttagacggacgataaaacggagtggtgaaaatgagtggaacaccttcgtctgggaaggtcctaaggaagtcagctctttggaactacggtacagttcgttggggaataaaattgtaataaattggagtttgtttttgtcgaaaagaaatcaagtgacttaggatttgtgaataaaaaatagtttgtcattcttctgcgtacatcagttttctgtcttataaagatacaactagtttagtcgatttttatttatttatttttgttttttttttttgagacggtgtttcgcacttgttgctcaagctggagtgcaagggcgtgatctcggctcactacaacctccgcctcccgggtttaagcgattctcctgcctcagcttcccaggtagctgagattacaggcatgtgccaccatgcccggccaattttgtatttttattagagacggggtttctgcatgttggtcaggctggtctcgaactcccgacctcaggtgatccgcccgccttggcctcccaaagtgctgggattataggcttgagccactgcacctggccgtagacttttaaaggaagaatagttaagagttttttgaagcctagttatttcagatacataagataataagaaaccagaatgtcaatct

SEQ ID NO: 12112 - DNA, 6000 bp, Homo sapiens
tagaaaaaaactaaattggccgggcgcggtggctcacgcctgtaatcctagtactttgggaggccaaggcgggcggatcacaaggtcagaagatcaagaccatcctggctaacatggtgaaaccccgtctctactaaaaatacaaaaaattagctgggcgaggtggtgggcacctgtagtcccagctacttgggaggctgaggcaggagaatggcgtgaacccaggaggcggagcttgcagtgagccgagatcacgccactgcactccagcctgggcgacagagtgagactctgtctcaaaaaaaaaaaaaaaagtaaaaaactaaattatagcagcctctgaacaggatagttgtttttttgtttgtttgtttgtttttccttactcacacctaagaagtctggaggtgggcagcccagggaggcctgtgctgcaggcattgtggatgcaggttgcttctgtcttcagctccactatttgaggctcccatggccaaggtctcctcacggtccaatacggctgttggagctccagccattacatccactttccagccagcaagatagaggaagtaataaagaatggcacaccccttctgtttagggttccttccctgatgttgcacacaacattttcattgccagaatgtagccataagggtacctctagctgcaggggagagagaaatgcagctctgattctgggaagccactggtgcagctcaaagtcagcagcctgtgactgagcaggaagaagagaacagatagtgggggatgactactctctctgccactttgctgtggcagctggggacaagagctttgctaggcacagatgtccataaatgcaaagtggcatcagccccagcctggcccctgggagccccagtgggagagacggatgcacaaacaggaaggaacagagcagtgtgtcagggtgcagcagaggaagcaggggccagcctcctgctcctgcctgttctctgcccgcagtgcagctggacccctccacatccgctggcctggcctcgcttgctctgtagacgatggcatcccactcccgaatgcagatggccataatccacttagccactcccttgtggtggacgtccactttgtttctgttgttctgtggccttctagggccagctgtgcctcgctgtgcagcctggacacattgcttctctgtggtggacagcatgagaggctctcatacctgcgtggtgctcatctcccatcacctcgccccttatcatccttgacctggctgtgcctcccctcccactgagccctgcctggtgaccttggcaagtccctcggctctctgagcctctgccatcccatctttagtgtggggatgatggcatggcacctcctcacaggcctgggcttccttcctctgtccttctggaaatggggtggccacgctacacacccgcctcccttacctccctgctctgtacactgacccagtgagagctgtggtccctggggaccgcctgatagaaatgcagactcctgggcccaccctgatgccaggtaacagctccttcaggtgggtggggaatggatgggccacgcctggtgctggcaataccacaggcttccagggagttgccattgccctgggccgactgccagccccgtcctcctcccgctcatgttagcaagagcatgtgcaggcgggcaggtgggcatgcagagctgggtcacctcgggcatgctgcgccaccttgccagactcgctttctcccttggtgatgtggaaacggcatacctgcctgcaagcctctccgaggtggaggaggccagggactggctgcttctgaaggctttctgtaggtgaaaacatggtccatctgacccatggacctttcaacagcttggtgctttcaccgcatgttcccccaggtctgagagacacaactgtactccccatagtacgcggtgggggtcgcttagaccgtgcttagtcccagctcctaggacagtgggtgagtagaaggtccaagcctccggtgtgcctgttctctgccccactggggtctcattcttggtcagcgggatggagccacctgcttgaggtggcactgtgaggagcacgctggggtgacacctccatggtcctcacatgccatcttgccttatacccactttacatatgaggaagcacatcccaagccagaaggggcagatctgaactcaacacaacgccagccccagaagaatccactagagtctttgatgggggagagggatgcaccaagcctccctgggcaccagagaggcatcctgagataccctgtgggctcctccacagaggcctggggccctcgtacatatacagtgtttgtgtgtgcacacccacccacacatagggctgctctgctggggcatctgccagcccgttcctcccagccacacccctcctctgtgtctctcctggggacatgtccctcagctcagggtcagcgtctagaaactggtcttggacagctcatgcactcatggtctccaggagaacttgaaagtaggtggttgggcccggtgcagtggctcacgcctgtaatcctttcactttgggaggctgaggtaggcagatcacaaggtcaggagatcgagaccatcctggctaacatggtgaaaccccgtctctactaaaaatacaaaaaattagccaggcgtggtggcgggcgcctgtagtcccagctactcgagagcctgaggcaggagaatcgcttgaacctgggaggcggagcttgcagtgagccaaaatcgcgccactgcactccagcctgagcaatagaacgagactccatctcaaaaaaaagaaaaaaaaaaggtagatggaggtgacacggggtacactgtgcctttaagacttgtcctgggttggatccagcagagaacagttgggtaaacagcattgagcacagtggggaaaacagacactacatactcaaatgaggatgacggagcagacgagggaactccagcgctgcagcctgcctgagccctgacacccacacgtcctgccagcagccccaggagctgaggaaactgaggctgggagagggtctcagacggccagcacagagcaggtttacaaaccccgaggctgatgtcccaactgtcactggtgctgcgaccctcccggcttcctcttagaaggtgggaatggggccaggcgcagtggctcatgcctgtaatcctagcactttaggaggctgaggcgggcagatcacctgaggtcaggaggtgatctggccaacatggtgaaattctgtctctaccaaaaatacaaaaattagccgggcgtggtggcgcacacctgtagtcccagctactcaggaggctgaggcaggagaacggtgtgaacccgggaggtggagcttgcagtgagccaagatcgcaccactacactctagcatgggcgacagagcaagactccatctcaaaaaaaaaaaaaaaaaaggatgggaatgatgaaccacactgcaggagctcccacatggcacaaaggaaagaatactctcaggacggggtctccacctgccaagccctcctacttcggggcctctctacacgcccttggccttccaaggtctcagggctcccctgcagctcccagggccctttctgggtgtgacgtattttctctgtggtcccacacctcctgcccctccaggaattgagccctcgtgggcaggcactatcccccagaatagggatttgtcccatactgtgagagagttttttgtgtgaatggtgctggatttccagctgctggtgaacactcaggtgtgccaacagtgccctgattatgcgaggacaacagcaaccatccccgtcgtgggccaccgtgccagaccctgtcctgcagatcccctctgaggcagagctggggcagtgacagcctgagcctcagtttctctgctgtgaagtgggcccacgacagctcctccttcatgggatgaccccgtttggaggatcagggcaagcgcaatcctgctgccctgcccatgcccactcactcctacctcctgtcccggtggcagcctgactggacagagcctggggtctgagctggccttccttccactgcccttctggaaatagagtggccatactgccgcaagctgactatgctgtggtcaggatgaactcccctggcctcccagggtggccgccacatgctctcgacccccaggcccccagatgggcaaagtgctgaggaatgaacatatggagaaacagagaccaaacaaccacttcaatcatacaacaggtgggggcccgcctagcatctggccagggctctgggcactgtgctgcccccagcccaccccctgccacaggtggcacagatgggcccatgagtcagcgcacgttcatcccctttgtgcctcccccagcccctccagcagtctgtgccctcataacccccatttcccaggcaggaaaacctaaggtcagggagtgggaagccctgtgtcagcgtggcccgcaatcaggggaaccccggactctctgacgctgttactaggggcgcagcaggcgctgtgctggagcgatctgcggttcccagggcgaaccccgcctgggaaaaacccagcgtgggcgccagcggcaacgcccgctcgctttcatgcagtttgcctggtggccagggaaaggtcgttcttggcctcattttgtggattaaaagtgtccgcgacggaggttcagagcaagacgcagcgcagggtcctctggggccatcggcgtcgcgccccctcccttgtggggccccgcgggaccgtctcaggcccgaggggttggggtcgccccaaactgcgcgctctcagcgtacagcctccaggccccgggcccgccccgggtggaggcggagtctggggcagcagctcgccgccgggcgggccgggggcgggccgggggcgggcgcgcagctggagcctgcggctgaggctcgggcgcgctcaggcccggatcctggcggcctgggcggccgcaccatggactcgggaaccgaggagtacgagctcaacggcggcctgcctccgggcacacccggctccccggacgcctcggtaagaccttccccccaccgctgcatgatcttgccaggccctgtcctttcggggcgccgcggctccccgggcacctgtgtgcgccgcgtccgcactgcagagtgttgggggacgtcccgctctaggccaagtccttcccgccccatcagggtcagaacgatgcccccgggagctccagccacccccggcaagtgggcgggacgagggggcgtgggggcgcagggcgggctggcgtccccagccccactaagcagcgcccgcgcttggctgcacggcggagggggcctcggcgcagctcctcgggctaaggactgccggcgcccggctttcccgacctcccccccactctcgcgcgggcctctctaacttcagcctcgccgtgccggctcctccgcgcactttgcccggaggcgggcggaggggagtcacagcctccgggctccagaccagctgcatgcagacagttacgtcaccccacgctgaccacacaatctgatgcgtgccttgatgggggaacttggggcccgctgtggtccctattccactcacctgccttgagaaatagaaacgtcacacagccttcagtgtatgccgccaccggccctccagaacttgccctgcccggcctgggagggctgtgggcagggggcaggccctggtagtggtcccgcttcagaattcttcatcccaggactcagcacttactgagcaccttgtgtttgttgcaaggtcctggcatggccctctggtgacttgtttactttgaacattctttccttttctaaccccctcagggatgggggcagggaacagcagcctgttgggtttttccaggcctctccatggcgtggaccagactggggcaaagacactctgcccactcgctggtgaacagtcctaggccggtgct

SEQ ID NO: 12113 - DNA, 6000 bp, Homo sapiens; identical to SEQ ID NO: 2596

SEQ ID NO: 12114 - DNA, 6000 bp, Homo sapiens
cattagaattgatattgcaaataaaagtgagcccgatccacaaaaagagtataacataaactcaattgtgaagtcagaattagctggatttaagcactaaataaacttaaaaaaattaattagggctgggcatggtgactcatgcctgtaatcccagcactttgtgaggccaagacaggagaatttcttgagcccaggagtttgagaccagcctgggcaatatagcgagagctcatttctacaaatcccatcccctcccctcccttcccctcgcctcccctcccctcccctcgcctctcctttcctcccctcctctccccctgctttcctcccttcttgtcttttcgagacagggtcttgctctgtcacccaggctagagtgcagtggtgcgatgtcagctcattgcagcctctgcctccagggctcaagcaagtctcctgcctcagcctcctcagtagctgggattataggcacctgccatcacgaccggctaagttttgtattttttagtagcgacggggtttcaccatgttggccaggctggtctcgaactcctgatctcaagtgatctgcccaccttggcatcccaaagtgctgggattacaggcataagccaccatgccctgcctaccaaaagtttttaaaaattagctgagcatggtggcatgcactgtaatcctagctactcgggaggctgaggtggaagtttcacttgaacctgagaaacagggtttgcagtgagctgagatcacaccattgcatgccagactgggcaacaggttgagaccctgactcagaaaaaaataaaaaaattagttaaggccgggtgtgatggctcacgcctgtaatcccagcactttgggagggcaaggcgggcagatcacctgaggtcaggagttcgagaccagcgtggccaacatggcgaaactgtgtctctactaaaaatacaaaaattagctgggcgtggtggcgcgtgcccataatcccaactatgcaggaggctgaggcaggagaattgcttgaacctgggaggtggaggttgcagtgagctgagatcgcaccactgcactccagcctgggcaacagagtaagactccatctgaaaaaaaaattagttaaaaaactatttttaaagagatgggatcttgctatgttacctaggctggagggcagtggctattcataggtgcaatcccactacgatcagcataggagttttgacgtggaccagttcattccttcttaggcagcctggtggtcttctactcctgggagatcaccatattgatgccaaacttaaagtggacacctgaatggcatagcgcactacagcctgaaactcctgagttaagcgatcctccctcctcagccacctgaatagctgggacttcaggcatgtgccatcacacctggctaaatactaaattaaaaggtatctaggtcttgccgtcattctcacaaaaagtgaaatttttatttgttctctccttggtccaccaggaaaatatacctagatagaggtcttaaccataagatcttacttggaacatcgtatcactaaaatgaaccatatttcaataaggacaattttgttctgaccggtagtctcatggagcttgtaagaaccttttaaaaacatatgacaggagtttgagagaccagcctgaccaatatggtgaaaccccgtccctactaaaaacacaaaaattagctgggctgtggtggcacacacctgtaatcctagctactcaggaggctgaggtgggagaattgcttgaatttgggaggtggatggaggttgcagtgagccaagatcatgccactgcactccagcctgggcacagagggagaccctgtctcaaaaaaaataaaataaaataaaaaataagtatcagccgcataggaagatagtgagatccctatcacaagagtgtttaagaaagcagaggctggagaaatgcagcaacaattcaaacacctgatgggaaggaaagatgaatagttgcatcagtgatcttaaacatccttcctaaacccttaagctgctttatcaaagttccaaagctgaatgcctacaaggaccagagaggtaacaactgttagaaacgtagggagtcacagaatcacggtaaactcaagcatatgtacttatctaaagggagcagctgttaatcagctccagttaattgctgccatgagggtaggcaagtccttttctgatttcaccaaaaagcaggtcacgccaatcgctgttactcctggggatctgagagttttctaagataaatttataacggatgagctggtatttgtcttgtcatcgacaaggattattggttcaaattctgcccttgagagaacatattaatactttcttaattatggtaaagcacagctccttacgtctttattttgctgacaatttgagttaaggactggcagaaaatatggaggaagagggtgttgtgagacacttcagtcatgtctgagtctaacagtcatgtcagaagaactactgtcatatccaggattatattaaggttatttgagagaagctacaaaatagaggtggaggtgaaaacatgggaggggagtaactgcacttgggttctaggcccagttgtatttataatcagcagtgtgtcctcaggctatgtcagctttctaggtttctgtaaaatgcaaaaaataataaggttagaccatgttcacattcgttcattcaacaagctgagtgacaactatgtgctaggcactgttctaaactctaagacctgtcatttttcattctaagtgatcagagttttaggcacatcagaaccacaaaaaaagttctttataccctttgaaaaatacactaaaaatgtgatctctgttttatatatatgtgtgtgtgtgtatatattatacatatataaattatatatacacatatataatatatataatatatatacatataatatatatattatatatacatatatattatatatataatatatattatatatataatatatatgtatatatattatatatattatatatatacatataatatatatacatatataatatatattatatatacatatataatatatatattatatatacatatattatatatatattatatatacatatattatatatattatatatacatatattatatatataatatatattatatatacatatattatatatattatatgtacatataatatatatattatatgtacatataatatatatattatatgtacatatataatatatatattatatgtacatatataatatatatattatatatacatatataatatatatattatatatacatatattatatatattatatgtacatatattatatatattatatatatatactttttacttcataattcttagcacttagcacagtaacaggtatatagccagtactcagtagatgtttgttggatgaaaggtcacaggctgagtgctaagtccaaaaagtgagcaggatcaaagtttaatttcttgaataatgagttcatacttacaagtctctgctcttttaaaatttcccatttcaactatctttgggctctgtcaggggcgtggacaagagataggagcactagtctaggagttaggccgccttggtaagagtattggctctatcactgtctaattttgtcaccctgagaaagccattatgcagggctctttttttttcttaagaaaaaatgtattttttgcccctttaagaaaataaatcattttttatagaaaaaagtcaaaaccactttgataaagtgctataaaatgcaaaggtgtcatcatccttgcctaattatacaacaagcccgtgtaataaatgctctaataattataaccgtacaaaactagaggtactgcagtcacactcataggaagagtaattctgattaggactaaagggttggttgttcgggaagttctcagagatggtgacatttaagatagcattccagagagagaacgggtaaggccattccaggcagcaggaaagctgaagcaaaggcgggagcagggagaaccacaaaagcacagtgtgcctcctgggtactaagcagagatcgcgtgggctcctggacctcactgagtgtttgcagaagaagccgcagagctacctggggccaagttaggatcctcgactgctttgctagggaatttcgtaattatactggaggagcgatccacgccttagcagcaatcactcacacagttttccagtttacgacgtgctatcccatcccgtaccacatctactccttacaggagccctcagagacaatcagggataagtcattgactcattcaactgaggccccgagtggtggctctgactttataatgcaggaattagagcagaaagaagaggcagcgggcgaggaggccaatgatggaggctcaggccacagcctaggccaggaaggccgtgagtctgcagcaggggccaaggcggtgcggaccgaatgatctgagcctccccagccaggccccctcctactcaccctcgcctcctccaggactgacgtcccgggggcggctccaggaggcgcaacccggaccgggccgcccctcctgccgggccggtacactatatccagccaggtcagaccccacggcgctgaagctagccgagcccctcaaaaggccgcccgaggctttcggccgcacatccttctgggaattgtagttcccatcctctgaagcaccgcgtacacccgccctccgcccttctatcccacaggaccccgcgcgcagaggactcagtggaccggggccgagagcccaatgggaaaggaagttctagatgacggacgacgtgcggggtgaggctagtgcaggactacatttcccgaagtgcaccgaggtgggcaggacccggaagtgagggtgtgagaggcctctctggaagttgtcccgggtgttcgccgctggagcccgggtcgagaggacgaggtgccgctgcctggagaatcctccgctgccgtcggctcccggagcccagccctttcctaacccaacccaacctagcccagtcccagccgccagcgcctgtccctgtcacggaccccagcgttaccatgcatcctgccgtcttcctatccttacccgacctcagatgctcccttctgctcctggtgagtgagggaatgacagacccatcgacaaacgcacgaacggcctccggccctcgcccagggggaacactgctactcctgcccctgcttttccgtcttttcctgcagtgttttggagtgcaccctcccccgctgccctcactctcgcctgtcggcttccaggcgcggagtccccgaggcctgagaaaccagtgtcgggggagaatgggagaattagccctgagggactgatacgtagtcacggcgtaggagcttccccttctccccgaagtccgggggtttcggtttcgagggctagtggacctggtggtagcttgaatcggaaaagaccaagcatagacctagcgttccttcccaccctctccatttgggaagagtgtgaggtcgacaggtgctggggttgtgtgactctcactgggtctagatccctgaagcggtgcccgggttggcagatccctctgttgtggcttgatgcgattggttgggaacccggaactggagactggtttggattccactgggagaatagagtttgaagggtggaaggtgtggttacctgacaatctcagctcaaggcctccctcaaatcttattgcaacgtatttccccatggaagcagatttcttcttcattgcgccttatttgaatatgcattcattcctaactgcctaacctgctcagcatcatcccatcttaaaagaatctttccctagtccctcttgccccagagtacgtcttgagtgtgcagactaattgatccaggcttcaggtcaaattgagacaaaagcgaaggactaaacacgtatggca

SEQ ID NO: 12115 - DNA, 6000 bp, Homo sapiens
ttatgtgtttaacagacttttcctataattgatagaactgaaaaaaatcagtacagaagaagatgtaaatgacactatttcctacacagatcttagctcatgattaaagaacactacccccaacaattgcagaatgcatcatctttttaagtgcatatgaaatattccccaagacaggctatattctgggccactaaaaaattgtcccaacagattttaaaagaatatatatatatatatatatatatatatatatatatcctttaagatttcattctttaaaaatatttatatatcctttaatatttaatatatattctttgagtttatacatatagttaatgtattttatatatattaaaagaataaaattagaaatcaataaaaatacctagagaagccccaaatatttgaaaatttaaaaatacatgtctgaataacatgcataaagaataaattacaaggaaaaattgaaaatattttgatctgaatcaggtagtcaatatgacctgtctggtagatgtgaatcagcttctttagtcaagtagtgcttgtttaatgggcctatgtacaaaatggccatgtcagtcgggacagattctgaatgatttcaataattgtactgatcaatttcaataatgtgctgattttgctaccgttcatgttaagtgctcaaactgtcaacagcaatgatcaaatgctggttctgtgatatggctttatttcccagaagaaccaaccagctagctggtgccaggttggttatactgcacatctattatcgggggggaataaccatttgtcttctgtagagatttctgggtaccaattttctttcctaggccacagcacttctgctaataccactattcatgaacttacagaataagcgtaccattgccttgctctaccacatattacttttgcccaggggacccattttacagcaaaggaagtatgacaattaactaatatctttggaattcagtggtcttaccatggatcccatcaaacagaagaagctggtattattaaatggtgtaatggtcttctgaaggctcagttatgacaccagctgtgagacagcaccatgagaagttgaggtgctatcctcaagaatgcagcacgttccttaaaccaatagccaacgtgtggcataatttgccgatagcgagaattcagacatccaggaagcaaagatatattcttctcactattacagcaaaaaacttactacagagatatttttttcttccaagccccacaaacttagcaggtttggaaactctcatatccaaagaagaagtacttccaccagggaattcacagcctattgagctggaaactggaacaagaaaagaaaggcaccactatatagccttaagtaattgattacaataccaatgggaaattagttgctgctatacaatcaaatcaaggaggactatatctagaacctagaagttcattaacaagtccatgtgagtacacacatatccaatagtcctgatcagtggaaaactgaaggaactcagtaacaagagatgcaccaagaacctaaatcttgtaggatcaaaggtttgggctgagcgcagtggctcacgcctgtaatcccagcactttgggaggctgaggcgggcagatcacttcaggtcaggagtttgagaccagcctggccaaaatggtgaaaccccagctctactaaaaatacaaaaattagctgggcatggtggtatgtgcctgtaatcccagctactcgggaggctgaggcatgagaattgctggaacttgggaagtgaaggttgcagtgagctgagattgcatcactgcactccagcctcggcgacagactgagactgtgtctcaaaaaataaagtaaaaaaataaaataaaataaaaaagtttgtaaagagcctttacaaagagccttgtaggaggcctctgtaaagagccttatacagtgaagtgctggcagaaaggggaatgtgcaatgggtagtggaagaagaaagctatgattctcaacttaaatttcatgaccaaccatagaagtagggattctaacagttatgtttcgtattgtttgtcctccatccccactcttcccattaggaagggtaatagtaacgattaatattttatgtctcaggtatatgttcaaattcaattactctattatgacaccatagttactggaactttttttatgtgtcccaaaaggtttgttcaatttttatatgaacaaagtacaagagaagatgttcagagtaagaagactttactggatatcttctgtttatgcctcctggtcatccagtcagctctgtgtcctgggaatttgagctacatggattgcatcaagggctctcttgccctctgatttctggttgggttcagccaatgggagacactagcaggagataagatggcagaagaaagtagagttatgctatttattctcctggctctttccctgatgggtcaccataggttcactgcctcattccattagtgacaggtcccataggatgtctccctttttacaattattcttttgttgttttaatcactgtttccttactttgctcatcaggcctaggataagtaatagttccttggtatcaagccctagggtatgcactgcactatgccttattggttttctttaatttcacccacacctttgaaaatagatttttttcattatcctgttgtagtgtgttatttctggccaaagcctaaccaatgaaataccctacttgcatagaggttaagatgtttactataataattgtaatagtacccactactagtgtctaacctcttattttattattcttcttttttttctatttttgctttgctttgagaagaaatatagcatgttgattaagagaatggactctgaagccggatttcatcagtttggattttggcttttcctctttctagcagtttgggtaagttacttagcttacctgtctcatggggttgttggagtgattaagagttagtaaaaagcactcaggacagtaacagccatagaaagtactagggaagtgtttgatcttactatttaaaatatttatcaatacctgatatagtatgcatttatttgcttattatctattgtccacccaaatgtaagctccctaaaggcagagacttggttttgttcatagctgaatccttactctctagaaaagcactatctcatagaactttctgtgatgatgggatgttctatagctgtactatctaatacagtagcactaaccacatgtaggtactgagcatttcaaatgtggctagtgctactgagggactgattattacattttatttaattttaattaattaaaatgtaagtagttacatgtgactagtgaccatgagattggacagcacagacattgcctggaacatcataataggtactcaatgaatttttgttaaacaagtgaataactaccaaccatttatagaaagctagatattttgacaggtagaatgctaagcactttatatacattatctcatgtaaacctctcaacaaacctatgagggaaatatcactgtccccaatatatagatgagaacattgaggcacagaggagttaatttgtcatagccagtaaatagattagaccccagcactgagccaatgacagtgaactgaattcaacttgtgttggttacaatcctccaatttcggaatatcagactcccattttttctcccaggaaatgaaactaccttcccaagctccctttctgtgctatatccagctctcatactttccagcctcagatataggttttccagcattcctaatgacaaattccttgagtgaaggatccacacctcattcttacttcattgtcatctatagtgatggcagtatgtcagaaccattcttcagtaaatgctggctgaaagagtagatgatgaatgggggctcaggtgggtgtttgtaaggttctaaaggaagttaatatctagtatcaattttacttacacaagaagaaatcatatgagcatttactggctttaatgctttatcttgtgaccactgaacagaccttttagagcaggtgttggcaaatcaggcagtaaatattttaggttttgtgggtcataaggtctctgtcacaactatccaactctgctgttctttcatggtagcagccatagacaatatgtaaatgatgactatgttgcagtaaaactttgtttacgatcatcaaattttgaattcatataattttcgtagccctgaaatattcttccatttttaaccatgaaatattgcaaaaaacattcttagcttgtgggctgtacaagaacaggcagcaaactgtagttgctaacctgtggcctagacaggcaaacctaggattagaagcactgagtaaggccgtacaattgtgtgctgaaaacccattcagaagggaaagtccaaggtggaatgtaggaggctgttacttttcttttgacccccacatttttcctccctcggatcattccgtatctttttcctatttgctttgccgggattgttctcaatcaatgtgcatactttctcatacctcaggcgttatgtctctcgtggccgtttgtgtttaaattgagggtttggggaagactgaaaaacattcaagacccaaagtaacagctttctcatgaagcgtttacacgcattgagagatatcgttccattggtgtgaataagtctctatgtacacacctgatgaaatataatgctggcttctagtcccctcacaaaagaaacaggcttcctgtttgcgtgacttgggggcgactcctgcttttccctggctgcccatcagttggcgccttttgccgtcctttttccccaagccgctttgggggccgcggtctctccgcagctcgcgggtcacatggcccgcctgagcaaggggagccctgcgcctgagctgcgaggcgggaggaggtgaggctccggcgcacacccaaaccgcgctgcgcccgctccttccgggccccggagatggcgcctccaccgggatgagctagccagcctgggcaataccagaggcggccctcggcgcgcgcaggggaccgagctggtcgccccaaccgggtaggtttctgttgcgcacgatctgcccagcccttctggcgcggtggtcggagccctggacactagagcgaggggacaaggattaggggtggccacagctggcacaagcagggcagctgggggttggggagagtcatcgcagagggcctgtgccccgggcagtgcgcctcgggcaggcgggttgcctagcggccctgcccgcagctccgaccgcttcctgccggaggattgcgaggaccccgcaggggtccccagggcagcaggggcccgcatcagtgcggggatggttgagtgtctcgggggcgcctccctggcccttgcctgcgccagctgcgctgacaggtcaatagaaggacgcgagcggggcgcgtgccagtctgggtaagaccctcgccgagcctagcagggccgaagcgccaaggggcctggcgcctaatggccgcccgcaagcaggggaccctcgcggcgcgtccacaccttaggttcgccgggcgcgccgagagcgcggcagcagtgttgggtttctgcgggcgacctcgcagccaagggctgggggagggcgactgggcagaggaaggcgtccctcccaggaccaggaaaaaccagcagaagggaaggagcgcagcgatggagacggtcagctcggcctacgggtgggaaactgaggctcaagcgtggcagggactgcccaaggtcagcgacagacactagatccagggccctggacatcgtcccccattctttttccaagagggagggttaattagatccacctgggtgtgtctcgccctctttctggcccttggctccggcgtcgctagtgtcgcactgcgctcgcggtgtcttggggcgtgagctcctgcagggtcgttgtga

SEQ ID NO: 12116 - DNA, 6000 bp, Homo sapiens
caatacacggtctactgcacaaataatgatggttcctggtacatttttatttgaccattgattgctcgatttgtttctgtgtctaactgtgtattggaattaagctgactcaatttgaactgcaggtccttttatccctcttattttttatttatttatttattttattttaaggcatttctcactctccagaaaatctctaagatttcagctattaggcatttgtctttttttttttttttttttttttttttgagactgagtcttgctgggttgcccaggctggaatgcagtgtcacaatctcggctcatcacaacctccacctccctgattcaagtgattctcctgcctcagactcccgagtagctgtgactataggtgcaaaccaccacgcccagctaatttttgtatttttagtagagacaggttttcactatgttggccaagctggtctcaaactcctaacctcaagtgatctgcccgccttggcctcccaaagtgctgggattataggcatgagccaccgtgccccaccaggtcttcttaatcataacaaattcatcttaaaacatcattttaaaatatattattttttattcttcattgacttcctgcattactctattttttcagagtttctagcaaccagtatcattggtattttaaacaatgtgtacatgtacatttatgcagatgagttaacatatatcaaagcaacctccaaacaatgccatttaggtaatctccaatttaaaagcctcaatagaatgataagattgagcttttctgtagttccatgacctccagcagagtctgcaaggccacagctgcctgaaggttgattctgtaattagaagatgccagggtcatctcagaatagaacctcaagccacccaggctacatttacagaatcagcctctccagaaaaacagcaacaaaggagggccttcctatgtatttggaaggagtcacctagaggagggacttggggttttggtgttggtgtggggggcagggatgggatggggagggggaagcttattgaaatatactaaaagacaaaccaacctaagggctggagggaagaaaattcacacttgtaagcttcttttttaaggggcatctcttaggctctagcttttgagattcagtatatatatatttttgagtcttgctctgctggagtgcagtggtgtgatctgggctcactgcaagttctgcctctcaggttcacaccattcttctgcctcagcctcccgagcagctgggactacaggcgcctgccaccatgcccagctaattttttgtatttttagtagagacggggtttcaccctgttagccaggatggtctcgatctcctgatctcatgatccgcccgcctcggcctcccaaaatgctgggattacaggcgtgagccaccgcgcccggcccagtatttttgttttatgaagatattacatttgtaaagtatgagcttggtgtcagcaaacttatatccctgtgtacaaactggccgaatcacttagccactttgggccaaatcacttagctcttctaacagtaagaaatcaacaagaaaaataaacatttcaaacattacaatgtgttcatgtattcactgtgggggatgaccagattctcgaaaccacaggttgttcttagtgaaacaagtttgggttggggccatagacttgtgtatttagaatcaatggctgttctctctctgggactttgatttttttcttgggctcatcccctttttgtagtatcttatctttgtcttatttgtataggacttaactgttcccattcccttattagagcaatctaagtgattaccttcataccttttggaattatatgcttcaaaattccaaaaagaatgattttgggctgggcacagtggctcacacctataattccagcactttgagaggctgaggtggatcgcctgaggtcaggagtttgagaccaacctggccaacatagtgaaaccccgtctctactaaaaaatataaaaaattagccgggcatggtggcaggtgcctgtaatctcagctactcgggaggtggaggttgcaatgagcccagatcgcaccattgcactccagcctgggcaacaaaaggtgaaactccatctcaattaaaaaaaaaataatgattttggtggtcgacttcaaataggtaggagaagaaggagagaggagatggagggtcagggagatctaattactctctaaaatcatgctaggaaagataacaccttttaataacactctctgcttttataacatcattctgccaaggagctcaaaggtttcaacaaagttcactttcagaaaacccctttgaggaagacagaatatacatcttctctccattttaaagatgaagaaacaggccgggcacaatggctaatgcctgtaatcccagcactttgggaggctgaggccagaggatcgcttgagctccagagtttgagaccagcctggataacatggcaaaaccctgtctctacaaaaaaaatacgaaaattagatgggtgtggtggcatgcacctgtggtcccagctacttgggaggctaaggtgggaggatcgcttgagcccagggagtcaagtctacactgagccatgattggatcactgcactccagcctgggtagacagagcaagaccctgtctcaaaaaaaagaaatgaaagagaaagaaagaaagaggagaggagaggagatgaggggaggggaggggaggagggagggggggaggaaggaaggaaggaaggaaggaaaaaaagatgaaaaaagaaaaaaacaagatgaaacagaggcagaaagactttacgtaaattgctcatcatgtggttgtcaagtttgaccccaaaacccaatttattgaccaaggttattctttgactgaggcaagggggtccgctctcctgggccttgggctttagaaagctcatctctggcctttctgagatccatccctttctttttatttttcttgacacggagtcttgctctgtcactcaggctggagtgcagtggcatgatctcgactcactgtaacctctgcctcccgggttcaagcgattctcctgcctcagcctcctgagataacaggcgctcgccaccacatctggctaatttttgtatttttagtaaagactgggtttcatcatgttggccaggttggtttcgaactcctgacctgaggtgagctgcccaccttggcctcccaaagtgctgggattacaggcatgagccactgcgcccagctcagatccatccctttctaagggcaaacagtccatggtgcaaaggggccatgccacccagagttatgagtacctgggactccagaattccttgcctggtggcctccacatgcacttccagggcctgcttgggcctcttctatgggtctgtcctgagtgttgatagaaccactgatgtgagtacctgggcttgagccgtggcctggagatcctgttgactgtagcatggagggggcttgtgcagctgaatgtctgtatgcaggtggtgggagttctggaatatgatggagctggaggtgggaagagaagtaggcttggggcagctctctcatgccacctcattctggccaaaactcaggtcaaactgtgaagagtctaaatgtgaatctgcccttcaaggtggctacaaaggtatctttgtcaaggtaggagaccttgtggcctccacgtgcacttccagggcctgcttgggcctcttctacgggtctgtcctgagtcttctatgaatctgcccttcagggcagattcatatttagactcttcacagtttgacctgagttttggccagaataaggtgacatttagtttgttggcttgatggatgacttaaatatttagacatatggtgtgtaggcctgcattcctactcttgcctttttttttgcccctccagtgttttgggtagttttgctcccctacagccaaaggcaaacagataagttggaggtctggagtggctacataattttacacgactgcaattctctggctgcacttcacaaatgtatacaaactaaatacaagtcctgtgtttttatcacagggaggctgatcaatataatgaaattaaaagggggctggtccatattgttctgtgtttttgtttgtttgtttctttttttgtttttgtggcctccttcctctcaatttatgaagagaagcagtaagatgttcctctcgggtcctctgagggacctggggagctcaggctgggaatctccaaggcagtaggtcgcctatcaaaaatcaaagtccaggtttgtggggggaaaacaaaagcagcccattacccagaggactgtccgccttcccctcaccccagcctaggcctttgaaaggaaacaaaagacaagacaaaatgattggcgtcctgagggagattcagcctagagctctctctcccccaatccctccctccggctgaggaaactaacaaaggaaaaaaaaattgcggaaagcaggatttagaggaagcaaattccactggtgcccttggctgccgggaacgtggactagagagtctgcggcgcagccccgagcccagcgcttcccgcgcgtcttaggccggcgggcccgggcgggggaaggggacgcagaccgcggaccctaagacacctgctgtaccctccacccccaccccacccacctccccccaactccctagatgtgtcgtgggcggctgaacgtcgcccgtttaaggggcgggccccggctccacgtgctttctgctgagtgactgaactacataaacagaggccgggaacggggcggggaggagggagagcacaggctttgaccgatagtaacctctgcgctcggtgcagccgaatctataaaaggaactagtcccggcaaaaaccccgtaattgcgagcgagagtgagtggggccgggacccgcagagccgagccgacccttctctcccgggctgcggcagggcagggcggggagctccgcgcaccaacagagccggttctcagggcgctttgctccttgttttttccccggttctgttttctccccttctccggaaggcttgtcaaggggtaggagaaagagacgcaaacacaaaagtggaaaacaggtaagaggctctccagtgacttacttgggcgttattgttttgtttcgaggccaaggaggcttcgggaagtgctcggtttcggggactttgatccggagccccacatccccaccacttgcaactcagatgggaccggaggcggtgttaaatggggagacgatgtcctagtacgagctctggtgaccccaggactctgcgctgctgcgcttggggcttgcccgacggtggagaccggggagcatctctgggcgtggagacccgggcgcagtaccccgggctcagaggggtcgggggttcccgggcgtgctgagggcgctgctgccgggtggggagagctgcaggtccggcaccgagcgctgctttgttcggagggccctgagctggctagaaacccttctggttgcaggtcggccagtacctacggagacaaatgccagcactgagtcttcactcggttcttaagaagctggtctgttctgacctgggaattggctatatgctccccgggactggagcggcacagtcccggactgtgaatccgggaactcgagttggaggtgtcccaaacggtccgtggtgctattgctcactagaggccttgggtctttgtttgacctgaggggtagggaggtcctgcctacagtctccgtgcgctcagctgagctggtgtccctggcgcagagcgcggacgagttttgtttccttttctttttcttttttttctttcctttaagtctcggtctgtcgcccaggctggagtgcaatggaacgatctccgctcactgcaacctccgcctcccgggttcaagcgattctcctgcctcagcctcctgagtagctgggattacaggcgcg

SEQ ID NO: 12117 - DNA, 6000 bp, Homo sapiens
cttcctgagtacctgggattacaggcgcccactaccatgcctggctaatttttgtatttttagtagagatggggcttcaccatgttggccaggctggtcttgaactcctgacttcaggtgatccgcctgccttggcctcccaaagtgctgggattacaggtgtgagccaccgcgcctggcctctgggtgtttaatatatgttattctccaatttaatctttactgccaccttatgaacaaggatcatgcaccatttatagctgaggaaactgagctcagagatgctatgtaacttgtccaggattatacagataataagtggcagatttggaatctgaatgcatgtcaccctgatttcattttcacatgatcacttcttctgcattgtacatactaccttacacacaacgcacataccacattgtaagcactggactttgtacaaagcagatactcagcacaccttagtaaatgtttgtggatacacttggagagctctaaaacagacacaatgctggagaatcgtctccctgcctgtgtttgtaatatctctggtggatgttatcttgataccttgggagtatcagttgtttaagagataccccttatcttttctaggacaaaagtaagagttaccccaagagtcactgtcagattctcaccatgtcagagacactgtgctgctgcttttatacatactttcttatttcaccttcacagcaaccatttttataaatcaggaagctttctgtttcaagtaatagaagcctaaccaaaactggcttaaatgattacaaaattcattcattcatgcaactggaaagcaagaggcagtgtggtctccagggtcagcttgatccacgactctgaatgtctttcacttctactgtatcctgcgtgccgatggaggctgtttgtccctgaggttgttggagtgagttgtcatgttaaggtcaacagagagaacccaagtagcctcgtattttggaggagacacctaaaatcatatgaccttgagatttgagtggacaatgggcttctttctcaaatttagtttttaggtcctatgttccagtattttaatttttctctgttctcaaccacatggatgctcagtagaaacatccccagctttcaatttcatctctcgcaggaagcacagacaggctttttttgaaaggacgccactcattcattcttttgctcagcaaacacttagctcctactcagtacgtcctatgctgtgccaggtgctgggcccacggaaatgaagaaagcccagtccctgctctcaaggggctctgtagggagacagacacagaaaccactaactttgactgcagtgtggtgaggacaatcacaggaggggtgagtgaaaccctgtgtgaacccagccttgtgctaggccacataaagactagtctagttagattctagtgcttcagccttcatttctgttagagttccattgactagaaatgctgagtgacacctgtcagtcctacggctttggccattagaacaatcttgaaatgttcagcaattttcactttcactgagacttggaagcaaagcaccatgacagggcatttttttgatttgctgagttgttgctaaactgtggcccaacacaatttaggcaggattaacaccccatgtcctgtcccgtttcggcttgcatccactgataaatgcttctgttgcgtaacttgggagctctcattttgtaactagaggaagagagtctttggttggagtaggacagagaggagggttcagtctttgttccctcactgacccattggaagggttttgaacccatgtggttagaggactgaagtccagacatggaaggaactattcacgagaggagttataaacactgggcattggcggggcactgtggctcatgcctgtaatcccagtactttgggaggctggggtaggtggatcacttgaggtcaggagttcaagaccagcctggtcaacatagtgaaaccccgtctctactaaaaacacaaaaaattagccaggtgtggtcgtgtgtgcctgtaatcccagctactccggaggctgaggctggagaatcgcttgaacccaggaggcggatgttgcagtgagctgagattgcatcactgcactccagcctgggtgacagagcaagactccatctcaaaaaaaaaaaaaaaaaaaaaaaaaaacccaaaaaactaaaaactaaaacattggcacactgacctgctttagggcttgggtgacaaaatatttgtcaagtgagggagaaagacttcttccccttatcaggattaaacccagctctgttttggtaccttgagggttagaagtttgggagtatgtaggatttggggataatgatacaggcactggaaatcttccgatgggcactagactcagtgagctgtgtgggcagcagggtggttggtagcagctgactcatgtctctgggtatatgtgaggtaccccttttgggacccccccatagaaatcaccaaggactttttaggaaggaggttgaggcctttgctattatgtagatgggagcttaagtcagtgtaacatggactgaaggcaaatgtgaccatactttgtaatcataatcccagaaagcctgaacaaataaagaagcaaagtacaatgtaggaacaactgaaagaaaaatatttacagagtcaaactgtaactgagtaccctcattttttctgagacagagtttattttttctttctctcttcttttctcactcccccagtttctcccttcctacttagccctttaaaaaggcaaatgtaggccaggtgcggtggctcacgcctgtaatcccagcactttgggaggctgaggtgggtggatcacctgaggtcaggagttcgagaccagcctgttcaacatggtgaaacctcgtaaaaaaaaaaaaattagccgggcatggtggggggtacgtgtaattccagctatttgggaggctgaggcaggaaaatctcttgaagccaggaaatggaggttgcagtgagccgagatcgcaccattgcactctggcctgggtgacaagagcgagactccgtctcataaataaataaataatttaataaaggtaaatatagccttttacgttgtcttcaccagacagtccctacagggcaagttcatctaactatgtgcttaggagctccagaaaggaactcaagagataacatccaatttctacaaaactccctcccaccgggagactgccttgagaaatatgaaactctcttccatctgaggggtttttggcttagtcctgccaacgaaggtgccagcagtcaccagcttgaccacccagtagataaggcatgcagacccctcccccgacaactgcttgcttccttcgctttaaaagtgcctgctttctgctccacaattgaagcagtagccttagggaggaaacctgtacttcttcccctaagctagctttggaatacatcactttctttataccagaccttgctcttgttaattggaatctgcaagtggtgagcgactaaacctgcgttttggttataaaactccaaaggccatctgaaatactgagacctaaaacttacaatcgagatggatagggaattactttttcctttacttcctttactaaatccctttgtctccaaatctatcaagcaatagtttctttatctgcaaactgtggattatgttacctgtcttgtctgctttagaagggaaacaaaaattatgtagaaattaataggaatactattgaaacaggaaagggacaacttgcaaggtttgaagcaatcacatgttgagtactcagtcaaggctttctttttttttttaaatcaaaatgttgattgggatattttatgggtagcaggcttggatcccagcacttttccaataggggaacagaagcaccttgtaccgccccagagtttcccttcccccacacaataaccctaaagcaaaagctattattattatcatcgccatgtgacagaggaaaacttgagattgggggcttaactgacattacatcaagtctcaaaaagaaacagtggcagtttgagactttgatctacgactcttttaagagtttagattgcgtccacagcgaaacctgcacaaacagttgtcaacagcggctgcaaattacaggcttatgaggaacgtttgaaaaatgccaagagttctttcctcaggccaaatactatggtagataaaagtatagcctttggagccagaatccctgagtttgaatcttgcctgtgccacttggtagctgtgtgactctggctgcgtacttaacggctctgtctcagtttttctgttggtaaaatgaggataataacaccttctttgtagggttgttctaaggattaaatgagttaataggagtgagccacttagaatagggcctgttatatggtaatctctatttaaaatcctgtcagatacaccaaagaaaacactttaaaaatatctgttaaataaatcagtaaaacagaatcggggcattggttctttaaaagtactcccccacggtattctagtatgcagcttgggttttaatatctgaatgtggcgccttttgggatctcgcctcgcgagaaattgacattaacgaatgagtgaaaggagcttccccccccccccccctccaggaagatatagaccctgcaaacttgttagcaggaccttgcggacaccaaggaggcggaggcgttttccccatttccccttcgggagttgtagtttcctgcaagcgcttggtgggtctgtaaaccagcggggaactacaactcccacaatctcgcgcgcctcccgccctgcctcccgcccgcgtttctagcccgactcccattaccgcccctcgggggcggctgtggcggaggaacgatggccgacggcggcggccctaaggacgcgccaagcctgcggagctctcccgggccggcgccgcgggtcccgcgcgcggtcgggccgagtggcggtggcggggagaccccgcggaccgcggcgctggcgctgcgcttcgacaagcccattaagcaggccttctacaacaccggggccgtgctgttcgtgtgcctgtgctgcggcgccgcggtgctggtctacttcatcctggaggccttcctgcggccgctgctctgggccgtgctatgcggcacttttctgcaccccttcaagagctcgctgacgcgcctgggccgccactggctgcagcgcctgcaccgcgcgcacacgcccatcgtcctggccgcgctgctcctgccgctctgcttcgtcgactacggcgtcgaggccctgggcgagcaggcgctgcgccgccgccgcctgctcctgctgctcggcgccggcggcccgctcctgtacggcctctactgcctcggcagctacttgggcgtgcaggtgctgctggtgcacgctgccacgctcatctgccgcgggctggactacttcagcagcctgtgggtgagtgagcggcagtccgcccccgtcccccgcccgtggtcccggcgctctggggtgcaatcctgcagctgttcctcccggtgcaggggcgacgaggggccacacctgtgctgcagtgaccgtccgtctccgctttccttctcacacctcaggaatttggcggacattcttccaaaaagggggcgggcgtgatttgaaacagcctccctgcttttcgccttgtttcaatcctaataggccctcttagggggacagtgccctggattgagaatcgttatttcgctttgcagagagaggcctcagagcatggcagtggggcttggttttacttctggttggagagggcgggggtgcttcggccaccctcagttctgcgcatctgaatgtcagagctggaagggaccttagagattctaggccaacttgccatcctgcagataggaaaggtgacctcttaccaggctagggctacttagggacaaagaggggtttgggtgtcttagattt

SEQ ID NO: 12118 - DNA, 6000 bp, Homo sapiens
gaaatggttcattgggcccgagtttcttgattttatttaatacaatcggatttaataattttgtggccagtaaaattataccattggcatgaagctgtgaaaaatgagaaattctacctttaccagggatatctgttctactgttttaaaagttcctctctattttattttttatttaacatgaagtaaaattgaaatttcttcttggtgtatagttctgtgaattttaacagaaagatttgtgcaccactactgcagtcggtacagaacagttccttcactcccaatagctctcttatgctgtccctttgtagtcagctccttctagctctaatcctggcaacagttctccgtcactattattttgccttttctggactgtcatataaacagaatcttatagtacgttccctcttgaaatgctttttcacccagcataatgactttgaggttcatccatgtcattttaaattttgaattggcaatatatattctagctgttactagatgagcaatttaaaaaggtgtagctattagtgttgtattttttcatttacattaatgtaatttccattcactatgtgttgataaaaatcttaaccatccctagagttttatatttccaaaaatatgccaaaaggaaaactatgactgtatgattattttagcgagagtcatatttgagatggtgttctgagccatagttctctaacatctccgtctacatataacacaaaacttttataaattattttaacaaagattaaaatatactgcagggcaaataatattctctaaaacacaggaactgcttttcgtaaagaagactgactagatgcatctttctttgaagctgttctagtcctcctctagttaacttagctttatgtagaatttctactgtatttaatttctattgaagcccttctgtattttaaaatgtaatatactttgtaccatttataaaaattgtgtgatgaatgaatcacatgttcgttgttataagtgttaacctttttttgacaattttgtgggaaagacattctccactgaattttaactttccttgagactttcaagaatgcaggtctcgtttgatgaaaaaaccgacttcataacccaatgttactagttagcgacattgtgctgaatttctccttgaactttttaactttatatgtaaaataactttgatcttggtcatttgaaagatcatttccaggtctaaaattccatgattttgtatttaattcttcctgagaacagaagaggggaaagcaagagaggacggttttgtgtctttatgaactttgttacttaagtactccattggagacataatttttctaattagtggatctttttccactggaaagtgtgatagctcattgctaatttttcattcatagttcattgcttccatttgacctaagattggccatttgttggtgtgaaaatattttcttttcagaaatagtttactagtgattgaagtacttttcttatttttgcttcctattataaaatggcgtggggggaagggggaaggatggagatgggaggagagggtaaaagaatagtactctgattttttaagaattagtatctactatcttggatatttgaaaaaaaattggttgaaactatgtttaagttttatgtgtgccttgtaagattgttgtaaaattttttgtgagcactttgagatttttgctgggggaggggtgttttgtgaaagtgatggttattatttatattatttattcctgttcagtagcacggaatgatctccaaacattcctaggagagtgtctgtttgcatgatatgtctaaaaattttcaggaaaatggaatctttttttaaagttcaggtatgacaaagtatagaatttattcatttaacatattcacatttagtttatgtttctgatatgacagaaaaatgaaaagtgtttgagttcagcctcttcatttactccatttacatataaaagatcttgaaaaggtagttgttacttcgttgtcagagaaaaacacttgccctttttcctgggatgtaactatcttacatgtttacataagaaataataaactggaggtgggaatggagaacaatgtgttttgtcttcatctttgaattttaaaggatacaatttaaaggatacaatttctcctgactatacattaatcattcatctagcaaatacttcctgagtccttacaatgaaatataagttaggtatacagacaaaaattcctgctcttgtgaaacatcttagtgaagggagacaaacagtaaacaagtaagtaaaatccatgtatgtcaaattttgagaaggaatttggagaaaaatcaggaatagggagtaccagagaagggggatggaattgcaattttaaatatggtggtcagcgccgggcgccgaggctcaggcctgtaatcctaacacttagggaggccgaggctggcagatcacttgaggtcaggagtttgagacaagcctggccaacctgatgaaaacccttcactaaaaatacaaaaattagccgggcatggtagcgcttgcctgtaatcccagctactcgggagtctgagacaggagaatccgttgaacctgggaggcagaggttgcagtaagccaatatcgcaccgctgcagtcagcctaactgagggagcaagaccccatctcaaaaataaatatggtgaccaggacacctttgaaaaatctcggattatcagaaatatatattcttctgtctagtgaaatgtaaatatatccagtagaatagaaaaatttggcctggactggtggctcacgcctgcaatcccagcacttttggaggccgaggcaggcgggtcttctgaggtcaggagttcaagaccagcctggccaacatggtgaaaacccgtctctacaaaaatacaaaaaagaaatttagccgggcatgatgacgggtgcctgtaattccagctactggggaggctaaggcaggagaattccttgaacccaggaggtggaggttgcagtgagctgagatcacaccattgcactccagcctgtgtgacagagtgagactccgtctcaaaaaaaaaaatatgtacatatatgtatatataatgtgtatgtttatatgtgtatatatacttatatgtatctatatatgtgtatatatatttatatgtatgtatatatgtatatatgtgcatatatgtatatatgtgtgtatatatatatatacacagtagggtggaaaacaaatatgtacatgtaaattacctatcactgtccagttgaaattactgaaacaattattggttgttaacagttctctaggcctggcatatgtttcataaagagaagagaacgaaaaagataatgtgtggaagaaacgtcttcgatgtggccaatgaatcttttttcaaaaacactgatttttgcctgtcattcagacaaatataataggtaataactatatattttgttaaaactgtagaagcaacctttccatattctaatttatcgtaggtttacttcgatatttttgttgttgggcatctgatttcacattggaaagtgccttgagtttaattacaagtcatggtcattttttttcttcttttttttgttgagacggagtctggcactgcccccccgcctggctgtagtgcaatggcgcggtctcggctcactgcaacctccgtctcccgggttcaagtgattctcctgcctcagccccccgagtagctgggattacaggtgcccgccaccacacccggctaatttttgtatttttagtagagccagggtttcactatgttggccagactggtctctaacttctgacctggcggtccacccgcttcggcctcccaaagtgctggtattacaggcatcagccaccgcgcccggcgtcatggtcattttctagcctacattctttagtttctcatcagtaacaaggggtacattgtatctgtcttctaggatcactttgctaattaaatgaaatgtaaataaaactaaaatatttaaaattaaatatcacctaacacaggacctgcctgacacatactaagtagtttataaatgttaattctgatatccctattccaagtctgtttcatctataaattataaactgtaagaataattcttaccttagttcgctgtgtaaaaagcttcaacaaatatttgagatatgatgccagaatttgtgcttaaattttttatttttgccagcttttgaggagctcagagctttcttccccccctcccccccccactttggactctttgtctagaaacagagttttctctttaataaagaagtgagatgtggaagtgcctgccaaatacatgttttcttcttgtttttgtaatggggagattacttgacatctttgtaaagggattgagggatcctgtcggcatgtcatcacaggagtgtgaagaagaatgtgacacagatgtatcagattctgctcaatggattccacgcttttcacgaagggagttaagacactcgctcaaaccagcgtctaggaagccggctcaaggcgcagatgaatgtgcagggaatttcccatcaatcccttcggcttgcctagtccttctcacagtacctcccacagtgctccggggctcccttgtcacgtgatcggggtggatccgctgaggcagagggaagttgattcgcagtttgggtggctggggctactacgctttccttccaactcccgactcccgggcttgcgtaatctcgcgttaagtggggagtaacttctcgcgagagctagatcgggatccctccaggtccgcctccgtggtgaggaggaggaggaggaggaggcggaggtggagggaggaggaggaggccccgtcgcggccttcgccgccgccaacggggctgtccctgtagctcccgatggagtttgaggtcgtgaaacctccgccgagctctgccccggcgagacgaggcgcctccgtcgccaagccgcgccgtcgcggggctcccgggagcggcccttagcgaccccgcccgggccccctcaggtagggcgggggcgggcacgatgcggctcgggccccagcccgggtgcctggtccccggcggtcgggcgggagaccagtctcagccctggggcctgtgcgctgtcgcccctggtgcctcgagggttgggaactgagggccgcacctgacactcggatggaacccgggccctgcggaggcccctctctctggtagggctttttcgatgcggagcgaccggctcaaatggccaccttccttcgacactggccgagcggacgcctctgacccctaacgaacccacccaagcaaaggcccggcttcactctcccttttctacaccagttagtaagggggtttggaagaggtcctcgaaaccaagtcttctcctagcttttcagctttctgccctggggcttcccgagaccctagcgtagagggtggtggaggcgatctgagtggtaaataggaaccccggccaaacaatgccctgggagggcttaacctcccaggatggggacggccggacctgagtggttgcacaggggttgtggctaggagcaatggcatgaaacacagccaggaaattctgctatggctttcttctttccctctctcatttttcctttttggtgtagcctcttgaggagactcttccaccatcttagaagaatggtagaaagcatctttgtttcccagagaagcagctgtacttttttctatccttagctttcaggatgggagaagatgagggtagctgtcatttccatccttcaaatcccaaggcagccgtttaagataccggcagataaatccttcacaccaaaattgactcaagtaatcactggcataaagtaaatctaatccagtgatttatttatattttcataacccttgggttccctttttaattcctcctctccccttacccacggccttcctttttttcatttctactctccccctac

SEQ ID NO: 12119 - DNA, 6000 bp, Homo sapiens
gggttgtgatgatcagttctgaatatgcaactgtccacttaataaggacaagtattccagtatctcttatgactgtagtcataaatgatgttggaatgtacattttgtgaaatagttggtatccctttactatgattaatttttgttattccaggaaatacttgtgaagccagccaattaataaagcactttagcatctgttcaggtagttttgaaaacccacttttccccttcaggataagaacttccaggttacctaaaaatgcaataaaaatctttatagtctaagcttcttggcatataatttttcatcagggttttcttttattaattgagcacaatactgttttgatttaatttttttccctcaaaccacccagctccttacatagtttttaattatatagctatatgaaagaggtggctaagacatttgctgcacacacttgaactaatgttgggtcagtagcttcgtgttactgccctgatcccagtgtaattcaggtggaaaggtatttttatctcacagggatatgtagctatgtattttactaattgtgaaacactggaaattaatgatgcagacaacttggtgtggtctttgaacagctctctgcagtatttttttttttcctgttaccataaattgtatttaagtgcttgctttccacttaagttgtactaatagaaccggtaactcccagccctccctgtttgacactccttagcttagattgatgtagttgtttttgttatccctataatgtgacttttatttttaagtcattgtgtactgcatttgtttgtcactagttgggcacgtgccaataatattctctccattccttatctgccatctctgttttgcctgatttctcttcaactgaataatggctttttgcatggaaaaaatagtttttactattagacgtgtaaagggaagagagagctaatgtattggactttgtgagcctacaaggaatattttggatccctccaataaataagggctatgtactatatgtactatatagagttatcatgtggtggaagatacttgcaagtcatagatttatgggcaggaggatttgttactccctatatctaggctgaatgtaaaatcccttatgttgtatcaatgggggtaaaaactatttttatttgcctatgatatacttggtttctaataaagtgccctaggctctagtgagaactgtctactttgaattgccatttactccctttcctcctttggccgatatgctcttggctagctttttataagttaatgtgtttccccaaaaagtttcactactttatattcatttgagtgtgatcctaaaacacctggatcaacagtacatctcatatgcaatctgcatcagctcctattctgtctggatgtctagaactgttggaagattttgacgtcttaagccctaggttttgctttgggaaataaggtttgaaatattgttcattgcattaagatttgtgtgtgtgtgctttgtaagcccagaaccaggttttggaaaatgcctgtactgtgaaagcaaattaggactctttctgagcctctttcattgtcagaaatagaatcactttccatcagcttccaggaaattgtgtatctggagtcgaagagatttgacatcaagaatccagatttttaaatgtaattgttttttaaatgctaatgtttgtaaagcaccttcagttcttcggatgaaaggtgctatattccctcagtgtaaattaataaaaagattacaggaagtttgtcaaaaaattcaatgcatagtctgtagtatgtcctgacaagaagttagcattttatataagaaattaaaaaatgcttattcctccacttggttgcttgactggtgaacaaaagtgaaacctttttttttttgttttgcatttgactctgagctaagtgttccaactctttaaaggcaatgtttattgttacaacctcgatccagtgcccagaactatgcttcatgagatcatcacaactctttaaattgtatatttacagtgtgtagtgatgctgacgaaatacacggtagtaaaccaaaaagaaacatttggaaagtcccctagcatgatgccagacacactagatgcttggggaaggttggttctgcattcccctcctgttttctatttccgtatcaatttattggtgaatttgtgccctcatgagagtaggcttatgctggcttagatcattcaaatgttttcttaattcaaaaatgcatgacatttatagatttgtgttgtcaacaaaaatactacataagtatattccactcaatccctaggcacccactatgctcagcagcactgtgcttttgtatataaatggtgggttataaaagactgcatggaggcattatggaatagcacaggctttgggatcagatctgggtgaaaaccccagctctgtcatgcagtaatagcaactaacctgtatacagcatatgtgctaaattgttatgttctctattttgtgatgcccttgctgtatgggtctatgactatattaccttttattttttttttttcttggtagagatggggtctccctatgttgcccgggctagtcttgaactcccggctgaagagatcctcctatctcggccttccaaagcactgggattacaagcataagctactgtgcccagcccaaacttcaaaaaaattaataaatcttgttcatccttctctagaacttttctccccctagatgaggaaataggcttagagaggataggtgacttgtctaacgttgcacaagagagctggaacttgaatccctagagggcacaccagagtatttctttagcgctctattttaagcaatattggttattgtagttgtgtgaccctgaacagattgaattttctgaatcttaagtttctgtgtctaaaataagagaatatcaggcagggttaatctcactattaaaaatagcacacacaaagcacccagtatctggtccaaagctgccttttattaagggctcatactcataggccatttgttcaaattcattgtagttgggaagaataatccaaggcaatgtataattgctaacatagtgtagattttgtaagtacaacacatctggacaaggaaatgtttgatgtaggatggagtaattggggaagataaagaggaagtgtgaattaagtgtggactggaatgatgggatttgtatgtcttacagagttaaaataagcagagatcacttggacacaatgtgaagactcgaggatcctttttgggaaggcgtaagaaatgaataggtcctgttttattgacaatatctgccatatatcagtgaggattggtcaattatggaagatgctaaaaagcaggcaatggatttttaataaggaatataataaatgtatttcaagattacttccctagtgagttgatgatcccccttcgtctgacacaaattattctcgagttctttcctctctctggcttgataatatgggtggaaactgttagttgagattgaggtgatttgtggttctgtgactttaggattacgtgaaatactaatttgggggaccaacagagatttgacattttttcaaagcaatttttcaattcctactacaatttaccgtcagtattacttcataaatggaaagtcattttaccattaaagatgtaggtaggaccatctcagaagaaaagacaactctttacaccaaatacatttggttttgtgaaaaactagtatcctaatttttgccgcttatggagatcaatgagagattttccccaccccaatgttgacatgtactactcgacgctgtcatattattgaggcataaaagatgttctaataaaatggaagtgacttaagagaaagttttatgcctcctcccaactctgaacagatgctgagaatataccaaacaagttcacacaggagtagagatttagagaggccttcccaccttcaagaattttataatacgttaatgagctgagtcttattttcaaggatggctttgttaaagcagaagaagggtaactatgcttatgaaaggcagttttgcatgcctgtttgtcaaaaaatacagtacaatttattttaaaattgattaattggtgtagaacttgcaatggtcacacaatcaggatggtcagcttccattcagggatcaaatttgtccaggcctttcaaaatggaacacgttgcttttagtatggcattggttctgtttgtagtgctgatttttctttcatggtaattaaaaaaaaatcttactttcttaaaagcctgcacccaagctagtgagcttttctgcagaggattgagcatccaaaccatgctttattttggtggattcttagagttttctggctgggtcctttttgaggggtagctgtgagctgtgagacaatttcagcaagatgtagggacaaggatcgcattcgaggtggcttaaaaggaaacacgtttgtgagagttgcctcactgtctcacctgctagaagaaattgggagatttcagggcttgttttcggtcctggcgtggtgcagaggtggaggggcgccagcaggtgtgtggtatgcaggacgcagagccaggagaacctggggcaggtgtctggagccgggggtgcagttcctacttttagacgcatggtggcgctagggtctcctccggccctgctagcaatctctaaggcacctccgccgccacctgcagtctcaaccaaacctctgggtgggcagcgcgggatgtgacgggccgagcgtccaatcgactgacagatttccgtccacactactgctctagccaatgggagccgaggagaggcgcggaggaggcgggccccgcggcaagcctggcagaggcgcgaggccctcctcccgcctctccgcctactccagcctccgccgcctcagcttcccgagcgagccctgcggccgccggagcagctcccgcggcggagcaggagccggatggtcagaggagcccggcagccccagcagccgcggagtcgcctggcccccaggtgcgggggctgggtggaggccggggttggggatggggtgggggccagggagcgggcccaggggcagcggctcggggcggtggagcattcggggcgcagagaccggaggggcggggggtgcaggctggggggaccttgggggcgcctgcaggcggcggcgcgggctgggcgcgatcgcctcctcgaggccaggtgagaggggcgtgtgagggaaggggcgccgaggggtgaggctggcggcgcggggccgggaggggcaaggcgggcgcgcccccggaggggccgtggaatgcgggggtcgccgggcccggagaggcggggcgtggagggggcagtgcacggtcgggaacgggtgggcacaggaaaggggaggctaggggggcttgcgggggtgacgaggcagacaatgagtaggtggaggtgggtgattttggggagctgggctgtgacgagcaggggtcgaggatggggtgagggaccaggaaggtttgagctcagggggaattgggggaacggtgagtcccaggaatgctaggtcttggtaaataggggaaacagggcatgaggcgtttgtaaggtcagatctgggcttggcgagcctgtggtcccagagggtggtctatttagttcttgactggcacggtagcgccgggagatgttttcttgtatgttacttttagttaccgtcttatttgtttggtctgcagactgactggcacagtggagaaaccgcctcgaaaacggagaagcaggtaaggcagtgccttcctattttgcttcatgtttttctttttgcttggctgcacctgtgccgtactgcataattgtatactgtcagtagatgaagtttcttatttatcccccttttaaaagaatataaccacatgcatgatttttcttttgaggacttcaaattactacctctacagtcgattttttttttct

SEQ ID NO: 12120 - DNA, 6000 bp, Homo sapiens; identical to SEQ ID NO: 1353

SEQ ID NO: 12121 - DNA, 6000 bp, Homo sapiens
cacccaggctggaacacagtgacgtgatcacagcttactgcagccttgaactcctgggctcaagcaatcctcctgcctcagcctcctgagtagccgggactgcaggcttttaccactaagcctggctcaaatctgcatttataagaagcttccagaagaaacaagaccacactttgagtagcaacagtctagggcatgacattttatggccgagactcgttggtgggtaacaaaaccaacagatgagcttgtgacgagtagtgaaagaaaatgcaacaggttgggggttactggagggcatcacagccgcaaatctatctacaggaccacaaaatgcgtttccattatttgagtctgagtcccagggtctgtgttgggacgtgacaccagggtcgcaaaggtttgcgaaaacctggcttgggagtgagggtaaacaaagaaggaaggggccagcaaccaagcctgggggaacaaggaggaaccagggaggagacagataaggtgaccagggaggtgggaggaaagccaggacagaatgttctggaagccaagggaaaaaggcctggatttcaattatcctctgcctcttcccagccctgtggccttgcaaacctgagcctcagtttcttccatcgtaaaatgctgacatgacagcctcagccactgaagtggctgcaaagtggcacttggcacagggccaggcaacctcatggatggtggtgcaattccaattcttgtcttgccctttgaactcctccagaccagcaggctgccctccccttgtgcagatgaagaaactgaggctcagaaagtggaaagatctggctgggtgcggtggctcacgcctgtaatcccagcactttgggagggtaaggcgggtggatcacttgaggtcaggagttcaagaccagcctgggcaacatggtgaaatcccgtctctactaaaagtacaaaaattagccgggtgtgatggtgcatgttcccagctactcgggaggctgaggcaggagaattgcttgaacccaggaagcggaagttgcagtgagccaagatcatgccactgcactccagcctgggtgacagagtgagactctgtctcaaacaaacaaagatcctgcctgatgccacctggccagtgtagggcagagcctgggcaccctgctccgccctgtgggtctggccctgctgttatcaatggcccctggctccaggccagtgctggagacagtcagccgcctggtgggtccctgggggccgcctgaaattccttcagtggccagtggccagggtggacgtgctctgtcttttcctgcagccctggccttcctggccagccaggaggaagaaagagcagaaagtgtgcatctgccctctgtggggtccaggcacaggggcctggccatcagccacgcgtctctcgggcgtgtggacagacggcacctgaacacatccgtatcagtcaaagccccggcaggaaacagatggcacgttccagtaggatcattagaggagagtttggtgaagggtctgtttacacaggtgtggtcggggtgtagggaagccccaagggacggtgcagaaccccagggctggcagcggcgtgggctgtgaccaccctcagcctgaagaggccaggggaggagctgagtccacagctggacagagctgggtggagggggtccccaacaggaccgtggccttcagtggagggaggccaccagtatgcagtgaccctgcagggaaggggctggaagacggaccctcctcctcctgcctcctctgacctctgcaggggtggggaagtggatgtgtcccacaagagggagagtgcagctgggggatgtagaagacagctaccccaaggcctgtgcccagcagggaggccatgtggccaccaggcttcctcgggcaggagacccagtccaggactggccttttctcctgggaaccaatgacaaggcccacttctctgggcctccatgacccccacccctgccttgacttctagggtccctcatgctttcagcaaatccatctcaagagctgaaaggccctgggctctgtgctggggacacagcagtgcaaagggtgtcaaagtctctgccttcatggggcttctaatcaagtagagagatacatgcagatggctgcacacaggcttaggtgtgacagggaaggtcaggatgctgtgggagccagaggtgacttccgcttcaccccccacccgcggtggtcccaatctcttccttcctccatgaggtgtctggggtcggggccccagttcttcctggagtccatctggagtctctcctactttctagagaatccattgggtcttgtttacaacgtggatggggacagactgtgcagcgtggagggaaggggagggagggagttttgggaagagcctcctgtggggtccctgtcactgccccagatgcccccaacaccctgtgatacctgcagcccctgccacatctgtccctcactccaaactcagctcaggggatggtggcagggaaggaggtgagcttggacccaggcagccctggggtcaccaccctccagctggggttcctcctctgtaaagtggaggtataacggtacccacctcctggggtggctgtgaggattcagagctgataaggtgaacgcctagggcgggccctggtgcagagagagcgctcagctcctagggctggattaactgtccctggggcacagatctcggtctggggcctgtggaaacctcagagccacccctgaacccccaccgagccaccctttgcctcgcagtgcccatggccttgtctccgaggttacaggaaaaggcagaggagatgcccttctcagggtggccctctgggagaggacactctcccttgacctcaaagccacgcttggctgcaaactggccaggcagccacaaggctgggcaagcaaaactatccctaatccccacccaaagagccacaccgaccctcccagccgctgtgacagctcctgcagagacaaacacacggcctactcttgtcacccgggccggccaataagcacggagaggcaaggcctcagaccctggacagacatcctccctccagaggcacccagggcctcagccttctcctccctccctgggcctcaatttctccacctgtgacccagggcaggtggatccagggagaagaaccttctggctccatctcaccgtgggtcctgccagcacacacaaagatttggcctctcaaagcctagctctgccagcgtccttctgctcaagaactctccatgactcccagtggccctaaggacaaagtcctggcatttgaggccctcccaatgcagggccagactctgcctctccagcttcctgtccccaccacacccctgctggtctcacggtggtccgactgtttcctgcttctgtgcctttgcttagtctggcacccctgcctggcatgctttcctcaccccttcttctccccaatcccaactcacccagtctttcaaagggcaggcctaaataccaggccctccaggtggcccaggattccttctctgagctttcatgggcctggccctgggtgctacctgtgagtagtcccacggtgggtacatagtaggtgcgcttactgtttgcagaatgaacatgggacagtttggggactgtcacccagctcagggagcactgatggggaagcatctcctgtatgtcccagggctcagtgctgtagtgtcctgaccctcagaaatctcataatggcttggtcaggaaggcatcgtgccccactttgcaaacagggggtgctgagaattgaggggccttgtccaaggtctcatggctaggagcaagcagaatcggatttgaacccagggccacgtgacttcagaagtgccattaaagtccccataatttggagctgtcttctttttttttttcttttcttttttttgagaccgagcctcactctgtcacctaggccaggagtgcagtggtctgatctcagctcactgcaacctccgcctcctaggttcaagtgattctctagcctcagcctcccaagtagctgggactacaggcgcacgtcatcatgcccagctaacttttgtatttttagtagagatgggttttcaccatgttggtcaggctggtctcgaactcctgacctcaagtgatccgtctgcctcggcctctcaaagtgctgggattataggcttgagccactacactcggcctggagctgtgttttgtcggtgaaggattttccacccatgaaggggtcagacgtgaagtgtgtggccctgggcagctcctctgagcccagagacgccagccctagccgccttgctgtgccactttgggacttccctccctagcctgagcttcagttttcctgcctgttaggcagccccatgtcaactgcacttagtaggccgggtttgatgcccgacaagacgtgaagtggtggaggtgggcaggatcccagcgctaccatcttcttgaaccagtgatctcaacacatcggatttctgtttcctcatctgcaaaatgggatcagtgagctcaggtgggtcacaaattctacaggaactactttagccaagaccggccccctgaaagttcccctcggtgggctgttagggtgattgttttcatctgtggggctccctgatgcgtcccacccaccagccttggagagggtgggatgggagggtggggtgcttggggagacaagcctagagcctgggccctcccaccccactgcctccccccatcccagggccccccacccagtgacaaagcccgtggcacttcctctacccggttggcaggcggcctggcccagccccttctctaaggaagcgcatttcctgcctccctgggccggccgggctggatgagccaggagctccctgctgccggtcataccacagccttcatctgcgccctggggccaggactgctgctgtcactgccatccattggagcccagcaccccctccccgcccatccttcggacagcaactccagcccagccccgcgtccctgtgtccacttctcctgacccctcggccgccaccccagaaggctggagcagggacgccgtcgctccggccgcctgctcccctcgggtccccgtgcgagcccacgccggccccggtgcccgcccgcagccctgccactggacacaggataaggcccagcgcacaggcccccacgtggacagcatggaccgcggcacgctccctctggctgttgccctgctgctggccagctgcagcctcagccccacaagtaggtgtccagggacccagggtggggagactcggcctccggtgcacggaccaggccccaagtattcccggcctccttcctgtatcctgagctcacgcccagcagagccatccttggggctctggagggtcaccaaccctcccagtttgctggaactaaatggttatgcaggactttcagtgttgaaagaaagcctcgggcaaactgggctgactctttcactttaaccctggtctctggcgtctgctcacccagctgcgttccattactccccgggaagcctaggtcccagaatgctgtgcagcgacgggagagtttcctggcctctctgggccttgagtttccccatgaggaatggatgggaaggagggcccacagcctgggctctgagcaccgtctctgggttcaaatctcacataggcacttccttgtggtgtgatcctgggggactgccttcgggcctctgagcgaagtggggaagagaacagacttccctctcagagctgctgaggaggtgggtggtgagggatcattgcagagagggctctggcagactggccacttctgtgttgttttatttttagctttaagttcctccagctcaccttccccagggcctttgggcagctcctcaaaccctttgaacaggccaaggctgcagggccctgccctgcctccctcctacctccctgatccccagaaag

SEQ ID NO: 12122 - DNA, 6000 bp, Homo sapiens
agctgcggcaggtgaggggtctcttagagctctttccagaataccatggaagggaaaaatcctaacggctcaaagaagtttgctaagggtcaggaagcaggggatacacgggcctctcctacccgtgtaggaggcaggaagggtcaaagcagaggccagctctcccagactgtgggggaagggctgggggggggaggcccacgaggactggccacagccaccatgcaggaacgtcctggtgtggcctggcctggctctcacagacccaaggcttccgtgtagaatatgtctgtggttattaaacagacaggcctagtggaaacaaccctgccacctgcgtgttctctgagcctcagtttcttcctctggaaagtgggttaaccgcagtacccaactcataggccaccataaggattcaatgaggtgtgtttgcaaagtgcctggcagagagtaagctgctctgtttctcatccttgttattactgttattgagatggttgctgtcgttcttggggcccaagaagggaagccagccctgaagcaaatcctgctggagtgagcctgggcccagagacatggcaggcgggacaggcagctccaggcccagatgctgtccaggagcagggccaaagcaccctctcacttctgggtgtttgattcgggtcactggcctgggttagtgagaagggctggggacaggatgtttccctcctggtgcagcccccagcgccctgggtggccttgggctagaggctctgagtcctcagaagtcaagttcatcaggcctcctgcctgtctgaccgccctgcccccactccatggttttccatcctgtcacttgtagggcggggtcggcgacctaggagggccatgggtggagcttggtctgaggctcaggaagcggatggaggtgggcaccagggacaggaagcctccaatccacccttgcgggccaccccctccctgcctggtgggcagtgcctttatggcctaaaggctggaccctgggggactactgctgacttttgttttaattggaaacaaactggtattaacttcccatataagtacagtgcaaacaacctagaagtttataaagggaaaagtgaaggtagcacccaaccgtcctgccccaccttcactttaacagggaatcaactgctggtagtccttgtgggtccttccagacactttatgtgtgcatttacaaatattatgcatagttatgtatttttaaaaggcaagcaaaggccgggtgcggtggctgatgcctgtaatcccagcactttaggaggccgaggcgggcggatcacaaggtcaggagatggagaccatcctggctaacacagtgaaaccccatctctactaaaaatgcaaaaaattagccgggcatggtggcaggcacctgtagtcccagctactcgggaggctgaggcggaagaatggcgtgaacccgggaggcagagcttgcagtgagccgagatcgtgccactgcactccagcctgggcaacagagtaagactccatctccaaaaaaaaaaaaaaaaaaaaaaaagcaagcaaaaaattatgctatatattgcagtttgtttttagaaattaaaaaaatacatttttaaatatataaaaatatttaaatatatataaaaattgtgtgggctgggtgcggtgactcatgcctgtaatcctagcactttgggaggccaagggggggtggatcatttgaggtcaggagtttgagaccagcctgaccaacatggtgaaacctcgtttctactaaaaatacaaaattagccgagcgtggtagcacacgcctgtagtcccagctactcaggaggctgaagcaggagaatcacttgaacccaggaggcagaggttgcagtgagccgagatcgcgccattgcactccagcctgggcaacacagtgaaagtctgtctcaaaataataataataataataataataataataataataatgtgaccattatcttaaaatttttggaaaaatacagttaaaccaaaagaaaaaaagcagccccagatcccatcattccagaaataaccactattaacactaaacactggccaggcacagtgcctcacacctgtaatcccagcactttggaaggctgaggcaggcggatcacctaggtcgagagttcgagaccagcctggccagcatggcaaaaccccatctctactaaaaatacaaaaaaattagctgggcgtggtggcccgcgcctgtagtcccagctactcggcaggctgaggcaggagaatcacttgaacccaggaggcggagcttgcagtgagccgagattgaaccgttgcactccagcctgggtgacagagcgagactttatctcaataaaaaacaaaaaaccaaaaacactaatcaccgtgataggcaaaaggcatttccttatttatttttttgcatcttttaaaatattgtgatatggtgtcatatttgaaagtgataaagcataaaaatatcatgaacctcttgaactcagtccccacttaaagaccagttactgtaacttgcatacctctttgattcctcccccattgttcttgacttttgcttttatttttatttatttatttttgagatggagtctcgcactgtcaccaggctggagtgcagcggcacgatctcggtcactgcaacctccacatcctagggtccagcgattctcctgcctcaacctccagggtagctaggactacaggcatgcaccaccacacctggctaattttgtatttttttagtagagactgggcttcaccatgttggtctggcttgtctcaaactcctgacctcaggtgatccgcctgccttggcctcccaaagtgctgggattacagggctgagccaccgcacccggtctatttttattttattttattttattttatttttttgagacggagtctctctctgtcgcccaggctggagtgcagtggcacgatctgggctcactgcaacctctgcctcccgcctctcaggttcaagcgattctcctgccttagctttccaagtagctgggattaagtagcgtgttccaagtaagcatgtgccaccacgcctggctaatttatttgtatttttagtagagacggggtttcaccatgttagccaggctggtctcgaactcctgacctcaagtgatccgcctgcctcccctcccaaagtgctgggattacaggcatgagccaccgcgcccggcccctattgtgtagtttttacttatcttccaatacctctttttcactccttgtgtctctaagattcatccatgtaattgtagatcattgattttaccctgttacatattattccacagtgtgaaccttccattgtataaaacaattccattctcttgttgatggatatttggggtttttccccatagcgatgctgctatgaacctccttgggcacatctgcaagaatttctccagggcatgtgtactcagctgtggaatgcaaatgtttacaactttgtttccaagacagtttttttttttttttttttttttttttttgatagggagtttagcccttgttgcccaggctggaggctggagtgcaatggcatgatctcggctcactgcaatctctgcctcctgggttcaagtgattctcctgcctcagcctcccaagtagctgggattacatgtgcccgccacaacgcctcgctaatttgtgtatttttagtagagactggaggcggggtggggtggggggttgggggagggggtttcaccatgtggaccaggctggtctctaactcctgacctctggtgatccacccacctcagcctcccaaagtgctgggattacagccactgggcctggctggcagttctttaacttgctttcttcacgtaaatatcctataaatatcctggccatcctttcctgccaagacatactgacctgcatccttcttttttttttttttttttttttttttgagacggagtttcgctcttgttgcccaggctggagtgcaatggcgtgatctcggctcaccgcaacctctgcctcccaggttcaagcgattctcctgcctcagcctcccgagtagctgggattacaggcatgtgccaccacgccaggctaattttgtatctttagtagagacggggtttctccatgttggcctggctggtctcaaactcctgacctcaggtgatgcacctgcctcgacctcccaaagtgttgagattacaggcgtgagcgaaccaccgcgcctggcccgcatccttcattttaacagcctcctcgtgcacttcggcaggctgtgccttaacttaagcagtcccctagcaatggctacttaagttatttttccctatcacgtagagtgatgtcatggatgccctggtaattacaagaaggaacatcttaagttttcccagctctgtgaagttattcttctccctattttccagaggcagggagaagggaagttatgcgctaaggctgcgcagctggcgaatggcagaggttaacttgaatctgagggtgaaccctaagtttgcccaggtgactacagggtgcaaggcagggagctggaggccctctgtggggagcccaggtagaaactccactgagtgcaagcacagcgtgctccggaactcagtttccccatccggggtcatggtggcaataaagagagctagaagtgggcccgatccacactgcagggagccgaaaggctgttgtattttggtggtcaccccgggctgcccagtggggtgaccgaggcgctcaccaggcggcggcacccgggtccgcctcccctttcccttccccgcccgcgccgcccgtgggcggagccacccgcggccccgaggctccgcccacctcccaggcctgggccgggccgtgacggcggcgctaggacccggcgggccgcgggtgcggcgaggcctgggcggcctgaggagcgcggaccccggcgctcggctcccggcgccatgtgagggggctcgggggccgcggggggccgggcgctccccgccggaggtgagcaggcgccgcgcgggagcaggccgcgggggcgggggcggaggcgggggctggggcggagggcgccgggagaggagattgctaatcgccggggatggggatggatgcgggtcccccggcggcacccctagaccccttcccccttggtagccgcgccccgaggttccggtcctcgcgcccagggtctgtcgcggggtccgctgggcctcttgccgccgactaccccgtcagcggtcctgcctctcttttcttcccagctggggttagggctccggacccccggagtgcaggagttggggagggggatgaggcgaggcgcgcgctgggtgagccccccaccaggtggacgcacgggctcagcgtcccgcatcgtcttggatttaggagcccccctcccccttctccctggagccctcctcccacgcgggttcgtgggggcgtcccgatctgcgggaggactcccggggctggaagaaggaaagcccccaaacagagggcagggtgtggcccccaccctcggctcccgctcagctcgcctgcacgtccagccttgggctgagtccatgctcctggcccagcgctcggggctgccgcctccccagcgtgagcaagccgctccccaacaggccggcacccctagacccccgccctggtgcctgtgccgagccacgtcctgggcacacactccatggcctctgacccgttccagccgagagggatcctccagggagacgaagtcaggctcagccctgggcagctccctgtaaacaaggctctggagccggctctgggcggccccgcaaggcgctttgcctctctgaacctcagtctccttatctgtaaaatgggcaacaagagctcctaccatgcattgcctggattcagtgcgtgggtgatgcttagaacgcattcccacacattccttgatattccgggaaagtcgctgcactgggg

SEQ ID NO: 12123 - DNA, 6000 bp, Homo sapiens
gctccgcaagcggctggagcacctgtggaagacactgcgctacccaggccggaccttctccactgtcagcccggctcgctacgcccgtcgcctctgccagtgggtggaggcgcacacggagtgacgggcgcccggccccactctccggatctggacgatgggctcacgccaggaacgccggttcccccgggcccgggcatctcgcctgcgcttcctcctgatggtcgccagagggcagcatcccctaactaataccgtaaccgcgcagtcccgtttgacggtggtgccgtgcccagcatcgtgccaaggactcccctactttagctcatttaatcctcaaaaaatgctattattctctttttacagaccatgaaatggaggctcagggggtgaagggactgatcaagatcattcagcaataaatgctggaaccaggactcaaccatggcttttggattccggagcctgtattcttaaccaccagctcctgcagcttggtcctcatgatctgggcaaggggggaggctgaaggctgcagccctcttgtcatccagatggggaaactgaggcccagagactttaaggggcgtaagcacgggtaagtggcaaggtcggccctgagtacccaggcctcccggccccctgctcctggcctgatactctagggatgcaggtgggagaagcaggggtcctgggggctgcctggagctctgggaggcattctgaacggggtctactactgatctcaggtgagctctgccctcctctgaaagtcacttttctcatcagttaaatgggggcaagggtccgtggtccgaccaaggtcttggcttcacagacatcaccaggagcctgcatgcccctgatcactccttctccttcctccaggaaactccagcctggcctctgaccccagttcaatccgaccatgcccaagcccaagcgggcctttcctccagaactgctccggggcctggctgtgtgactggagcaaggtgctaaacctctctgtgcctcgctggtctaatctgtaaaatgaaggaatggaaacagacctcattaactcattaaatatttgttgagcacctgccatgtgacaggccctctgctggtaatggggacctggggatgaagcaagtggcacagattctgccttcatggaactcgtggaactcacagtctgggggaagggacccctacccgatcatttgatggatagtgttgggggaagagctttaacttctactctgagaccagagaagagtctgacacgtccctaggagggtcccaggctaagagcacagcaagggcctggggtgagagaaggaaaacatttcagagtgggagggggccatgtgggccaagagtggacccccaggattggacagtgcaggacctcggggaagccattcagctgcaatgcacactgccactccactgacctatcagatcccaccaaagaaagatggctgaggggccgggcacgttggcttacgcctgtaatcccagcactttgggaggccaaggtgggtggatcacttgaggtcaggagtttgaaaccagccgggccaacatggtgaaacctcgtctctactaaaaatagaaaagttagccagctgtggtggcgggtgcctgtagtcccagctacttgggaggctgaggcaggcgaatttcttgagtccaggaggcagaggttgcagtgagccgagatggcaccactgcactccagcctgggcaacacagcaagactgtctcaaacaaaacaaaacaacaacaaaaaaagaaagatggctgagggggaagggggaggaaggagagagctctggatgcagggttcctggaatatttggtttttggttttttttgagacagggcctccctctgtcacctaggcgtgagtgcagtgacatggattacagctccttgcagcctcaacctcctgggctcaagtgatcctcccacctcagcctcccaagtagcggggactacaagcatgtgccatcacacctggctacttttattttattttattttattttattttattttattttattttgcagagacagggtctcatcatattgcccaggctgatcttgaactcctgggctccagcaatccgcctgatttgatcttcccaaagtgttgggcccacaggcatgagccactgcacctcaccagaatatatgtactttaaatattgatatcactcctagtcgtctgggtgaccttgcctgatttctcaacctctctgtgctggcatgagctgagtggaaatttcttgtccttactttagcaggaagttgtgacatagagtgttgtcacgcccatcactcaggaggtgatgggccagggaaactcggaggtggcagggaattgcagcaggaactggagtctgactccacatttccacccatctggatcccacagggctgagtcagcgccacagagtcctgctctcacacataaggatgactcagactctctccacctttgggtctctggccgtgagcctagccgggacctcaggctggaaaggaaagtgatttgtccaagaactcatgggacccaggctctcctaactcatgcattgatagacgtgacctagcacctagtgtgtgccgggcactgtgcaggtgctggaggtgtcctgagcacatggctggtctgactttgcccacatggagcttagagtctgtggggcaggtggaccataaataaggcaaccagttaatacacagggcaatttcagagtgtgacaaatattatgaaaaactgagtcggggtgaggcaagagggattggggtgcagcgttgggtagggtggctggcaagggcttttcagaggaggtgatgcttgagctgaatggtaagagaagccaccatatgactagcgcagtccagcagaggacacagtgagggcagaggccctgcagtaggaatggcttcagtaatgattggcggtcggagggtggccagggcaggtggagggtgactgaaggagttcacactgtgtaggatcgtgtaggttgtggtaagcagagtaggtttttgccaaaagcaaagtgaagatctttatctggggctgtgggacttcctggtcacagttctactgtggacttatgatcctcatctaccctgggagcacgggccatttgggcatgtccctgtctccatgtggccctagcaaggatggagttgcctctccggggaaggaatcatcacctcaccagccattgtgggcagtgagtgaatccatagggaacttctcaccattgtgccctcagggttgggcctatgaggaaagaaacttgaagaacgaggactgagaggaaagggctctggctttggggacccactgccttgtgtgagtgaggggccatggtgactgagcgtgaaccactactccccatgtgtgtccaggctggagtggcagtgacaggagagtttgtgctcaaaggaggcccctagggggcagggccactacagcagccctcctcccagcccctggataggggaggcactgaggcctagagcaccaggcccaggggtgatttggctttgaacctggagcagggtagactgggaaggttgctgagctggggacagataccctggcatcctgcccaggcctgagcctctgagaaaaaggaaaaaggagtttgaaatggagaccagggcaggagcccaagctggttcccaggctagctccctgcagaggaggtgggtgtggttgggatggtgaaatgatctttctggccaattcaacattttgcacaaaaaatcataaacaagggctgggcgtggtggctcacgcctgtaatcctagcactttgggaggccgaggcaggcaggtcacttgaggttaggagttcgataccagcctggccaacatggtgaaaccctgtctctactaaaaatacaaaagttagctgaaaatcgcttgaacccaggaggcggaggttgcagtgagccaggatggcaccactgcactccagcctaggcaacagagagagactctgtctcaaaagaaaaaaaaaaaaaatcctagacaggaagtgtgccctctcacttccccataggcccacccctgctactgtcccagtgctttctgccaccagcctggcgcttgaaggcagttgcctctgagatcccaagggaccccaataggacacactgcagcatctgcctggggcctgagctgacttgacttggatttggaggacattccagcgagggagccttcgagaggtaagagtaggtggtcacagccccgggtctggagtgaaacttcctgggttcgaatcctggctgtgacaggagctgcctctacacgtgtgtctcagaggagaaaaacagactcaggtgactgtcacactgacataatcataataaaataatcatattgaaaataactcatgtattcgttgtttatctgaatttccaatgtcactgggcgttctgtatcttacttgataaatgcagcaatcctaccagttgaaacgtgggctgcctgacccgaagccctgcttaatttccctccccaaccaccatttcagaaatggagacactcaagtccggacagccaggccgccactgcctggtggcccccgacaccctctaggtctctttcccctgcggcccgacagcctcgcccaggcaggagcctgctggaaattcggcaggaccgaaaagggagatgctggtactcagactccgccccggctctgaagccccgcccccggccctgaggccccgcccctagctggaggcctcgccgccagccattcacgtcccgccccgtcccggccgcgcagagccctccccaggtcgcgcaggccgcgctcgtaggatccgcctgcggcgcgcaggccccgcccccggcgcgcgagtctccgcccctcctcgccggccccggccccggccccgccccctgcctctggccgcgcggatcagcttccagcccagtcggcccggcccgggggccatggagctccgagcggcggatcgcgagcctcctgcgaaccccagcctgcacgcccggttagcattcggccgggagatgcggcagtggaatctggaagggcggtgaaaaacctacgtcctgccctcgcccggcctctccattcgtcccccgggtagagaggtaggatggatggggtggaattccgggcttctggctctctctgccccagacctgatgggtgaccttgagctgggggcgcctcctcgctgcctcttcctccccatctgcgcactgggaattgggttggcaggaggtctcgcaaacgtcgctgattcctgctcctttaggatggggacattgccttccggtgtttggagacgtcaaggggttggattcccgggtgccatgtgctttcaccccggcctgtaccctctcctgcctcagttttccctatagcttagaaccccacctgccttacccctcccggctctgagtttctgggtcttggcaggtgcccggctcccaccccttcccagccccagccctggagacagcagcccctagactactgagggacagcgacagcatgaaggctccggtaagtgggaagaaggaggacttccagggaacgcagaggccccgactggcggagcagctcagcagcctctccaccccaggacccactgccacttctgacctccctactgctgagcagagaagggcagaatggcctcaaagtccaaccctgttcttgcagaccgtgtggccccaggcaggtggcatccactctgcagtgtcagtaccttgctatccctgtaaaacggaggtaacgctacgagctcaccaggcaaagcctacgtggaactggggttgtgaagttcagttcagccgctcttgtctttactgcagaagccccgggctgtgagagagagagctggatgtggggggcagttcatctcgactgcctgagtcaaggtctctggttcctcatgggcaggggagcaggtgccaggcagaactccctcccctgcacag

SEQ ID NO: 12124 - DNA, 6000 bp, Homo sapiens
tgtagagatgcctgtggctgagggggcctctctacctgtgtccccactcactccaggagcactggctttggtcacgtcttagcagcagggccttgctccgttgttcccttgccctggtggtgggggggccagaccacctccggaatcctgccacctgtgactgtctgactgcttagtgcttcagctgtcccttccttgtgtcctgggggacctgctggcggcctcttcctgggagccatgacctcagaccccacccacactccagatcgagacccctgcctccccccggcaaatgtcctcccgctgccttgcagcctgcactttgcacatgctcacccccagcacagtcccactggcccctcacctccccttccctgagctccttcccaaggactcctggtcactgcctgctgtgcagtcagaggcccagggtccagcagcccggcgggaacgggtgctgcctcttcctccagttagctccagctcaggtctgagacccgtgctgagaaaggtctgagcaccgaccgtgccctctgcccagggctgggtcctgagcagctggttttcctgcaggaaggttggagcaagcaaagtccttctctgccctcagggtcagctgcccagactggggcggatgccagagaggcaggtgggctgtggctggactggtccggagctggcttccttaccagaaaagcctcagccttcctctggaagcatcccccgttctgggcaagggggaagggctcctttaaggggtgtgctttcccagtggggagcagtctggccctgccccctactaaagcctctgctctcagcactttcccccaagtccttgtaacttgcttgaaggtgggttctggctgccagccagtccctggacaaactctcctgccccttttaaatttcactcattttgtataaacccagcaggctggtgtttacttagccctgtagcttttttcattttttctttccgtctttcttcttgagttcacggttcaatattgcctcctcgccctggtgaggggaggtgctgcttttctgccccacctgccggctggttccagcagcgctggggcccagctggggggccgggatgggggcttctctctctgggaggggtgcaggtgccctccccaggctgggagggttccttccctagctccccatctgcccccgctggtgagagttgggcttcttggtcttggaactccctggcattgggaacagagcatttccagcatttgttgttgttttactcacctaacccttagaaaatgaatgttagaaggtgcctgccgaggcgggacagagtgttcgctcgcgctggagaaggctctgctcagccctgagagtcccttcctgccccaccgatactggcactttaaaaaggaagctgaccgcacagtgtccagacgaattggcccccagaagatggggagttctgtcctgcccttctgtgtctgcgtgacctcacccagcctaggagggaggtgcattcagggtagatttgcctctcattcaaagttctggggctttgggtggaaaacagccagctttggcgctgttggggagactcctccagaccaggaaccccagaaggagacagagcctgccacatcctcccacgccaggccctgggccagggtgattggactgagaatttggccacaaccaaattgatgctggctggaaccagaggccagaaagcctggccttgtccccatgtgggagccctgtcctcagccctcttgtccccttgagctcagtgaattcccaccaggtgcccacagctcctggacttcaaattctatatattgagagagttggagagtatatcagagatatttttggaaaggagttggtctatgcaatgtcagtttggaatcttcttgaaagtttaatgtttttattaggagatttaaagaaaataaaggtctacaatatctttaggttttttttttttcctgtttaccgcacaaactgaccacatggcatgtctatcaggatggagggtgtccatgttctcctctgtctttagggaggtgataaggagatgggcggaggggtgtttttttctttgactcccctcctttctaacagaatgttgccaccactgcttgagtgggctgtgtttgttcctctgtcccagcttctgttgtagaaaataacattgttaggggaactcaggctagtgtcagcgtcttggtttggggagaaaaaattaaatgtttcggtttttgtttcttttgctgttttgtttttaccttgttactttatcatattgactttagggtcaaaggcaacatcagaagaagtcagatatgtatagtgacattccaggggtggggaaggtgtagggatccagggttctcccggtcttggccacaggcacaatcatcaccttcatcgttccagattcctggggagaaaactgagaagatcgttacctgccagcctcatacggagcaaaagctctgtcctcagggccaagttctaaccactgctctgtagaccttctctgcaatcaagtggcctctaaggagcatgcctgaggacaaataactgcgcctcagtttcctcacctgcagatggggttatcaaataacacgagtgtgcagcctgacctgtaggaggtgtgagtgtgttcccaaactaaagccccaggctgccatcatttacaggcttggcttgccccgggcccctcacccccgtttctgaccatcccaagtctctctgggacaggcaagtcactctggttctttaataagcttggaggtgttgggaagcttcagtggtactggccaggccaggaggaatcaggccaccagggctccatctctatcctgggatagcattcaccccactcctcctcagggctgaccccgactcatggcccctttaaaccctgaaggccgattctgccccttcctctgttatatgcacaactgaggaaggaggtaaaagtgggctcctaggtgagcccaaagtctcctgagagataagggaaaagaattggactgtaggtttaaaaaagttgctcttggccgggcacagtggctcacgcctataatcccagcactttgggaggctgaggcaggaggcagatcacctgaagtcaccctgaccaacatggagaaaccctatctctactaaaaatagaaaaattagctgggcgtggtggtgagtgcctgtaatcgcagctactcaggaggctgaggtaggagaatcgcttgaacccaggaggtggaggttgcaatgagccaaaatcgcgccattgcactccagcctgagtgacagagcgagactccgtctcaaaaaaaaaaaaaaaaaaaaaagttgctcttgtcagctttgggagggcagactccatagttggagatgggcttccaaccaaccaaggagataaatgccagagggagcgaaccatgccaggctcaaagcacatctctccccaaactccccaggtggggacagcaggccaaaggcctccacataacccctcagggaggcctggagtccagatgctgtactccagtatctaaacaatcactcaatcttaaagctgacaggttcaaagctcttactttgggccgagcgcagtggcttacgcctgtaatccaggcactttcggaggctgaggtgggtggatcacctgaggtcaggagtttgagaccaacctagccaacatggtgaaaacccatctctactaaaaatacaaaaattagctgggcgtgttgacacgtgcctgtaatcccagctactcggtaggctgaggcagaagaatcgcttgaacccaggaggcagaggttgcagtgagctgagatcatgccactgcactccagcctgggtgacagagtgagactcccgtcttgggaaaaaaaaaaaaaaacaaaaaaacctctttctttgggccaagcctccactgagtgccagggatacagcagcaacctcagaccctaccctcggggctgacagggctggatcaacaattgcatcagtgaattaaaaggcacaggaggctgggcaccgtggctcacgcctgtaaacttttggaggccgagttgggaggatcgcttgagcccaggagttcgacaccagcctggataacatagaactccgtctcaaaaacaaacaaacaaacaaaaaaaacgttcccgactggcttccctgaggaacgtggcgtcccagtgagaccggatgggtgaggagcagccggcctgtgagtggtgggggaccgcgttcctatctcggagctgaagaagcgtggaagatgatctggcccaacatctctttgttctcagaggaagggccttccaagaccggggaggggcctgtgcgtgggtcccggtccgaaacgtgtctgggctgctgcgagagacagtcggtgaaggaagggaggggacatccgaagggtggcccgggaggccgggcgatggtgaggagggcgcctcctctccaccaaatcctccccatccatgcgggctagggacagaccctcccccgcccaccctaggctggaaagtgaacgttctctgcacctctcccacctacagactaagtagggcacccggtttccgtgtcggcttcaccactgactcggaatgggatctacctttctctgagcctcacttttcccatctgaaaaatggaacttccgatcccgcactcccatcccactctggccccgggactctgggatacttagagattggcttttggtggggcggcgacaggactgtggccatgaaggccagggagtctgggtccccaactcggtcccattccctagagagattcgggcagcaaccggccccacaatgctcttgagaactacacttcgccgatatgcaaagaagaggaggcggttcctgctcgtctccgacgaggtgggcccgagcaggcctggggactacgactcccggcgtgctccgcagtccaaagccggaagagcgtggacccggaaccggatgtggcttgcggctcgggtggctgagcgcgcggggaaatggtgagattggcaccgtgtgccggagataggggcgtctgggggtggggtcccgggtctgctcaggagctggggcatgggcacttggaacggggattgctctcccgcccccactattgtacggacgacaacgcggaggcctagcattctctcccagcctagaaactgatccctagtcagccctctaccatctgttgaatgggaagcttagaccgtgatcgggccgcgacgccccgcttccattagtgcgccgaaatagagggtcacttcgtcagctgagacctcccttttctccaggccacggggacagaccaggtggtgggactcggcctcgtcgccgttagcctgatcatcttcacctactacaccgcctgggtgattctcttggtatgtcattctccccgtccgctgctcaccttccccgagccctggcaccgccagagcaactactatataggctctaggcacggcgctggcttcattgcctgcctcatctcttgaactctccagaacaactctatgaggaagatgccagtggtaccgcattttatagatgagatagctgaggctaggggagaaggatctggcccaagattgcatccttagccgctacacttataactctgtttccggcttgctttgacttttgggggagttctgttccttctgggttagcctgctgactcttaggcatggcaaacgccagtgatatttgtgaaggcctttaggatatttttttcttgtgggaaaacttgttggttattgcttaagaagtgcagtgtgtctggaagtgcagaacttggtatcctttagagaaaaaatattagtgaagaagccctggaggcccaggttgggagtcagtcgaggattcctcaagtaccatttgctaggctgtgaggtgccttagggcaggtctcttgtgccctgttctcttgtccccaccaccaacctatagcaggcaccaaagcaagtgcccggtaaataccaat

SEQ ID NO: 12125 - DNA, 6000 bp, Homo sapiens
gagcaactctgacctcagggattgctttctcgtctatcatgtgacctggcatgatagcagtctgcaccctatgtgcttcatgcctttgatgcttttgagagctgaatgtaagcggctgcctttaaaaacccagagttaataattctccaaggcagaagccaggatttgcaccctggggaggcctgacttcagattggatgattccacaaagcgtgccgggaagcctgtgcgacatctggtccctggcagggtttccgggagatgtaggcgactgctgcttcctcctttcccatcctggagacatgttacgattccaataacctctgcagctgctgagaagatagcagaccgtgctctggggtcttccaacctcagagcacacactggacaggatattggaatgccggggttgttagggccagtcccgccccacctgggacctggtaacttggtcacaccagtctcctctgagcatctataacgtggggtgggggtggggataggctttttgccttatgaatgtctgtgtagcactcatttcctgggaccctcaccactggggagcttatgcagataaaatctaccctcaaacaagaacatctcaccagcagctggcggtggacaggcaggcatccagagactggagcagatgtttctcagctctggccagtgagtgccccttgatccctgtggcccagcctggagcttccagggacccaagagaccttccttcccaggttccttcttgctctccctgctctgtcctctccccatggctgcctccccttgtgccatggctcagggggaatgtccttcctattcccaatggccaccttctcgccctgatggacacgtctccacctgtttctctgtggagtgtgagcatcaggaaaccctctgtgctcccagcgaggctgccggtgagtggaatctggctttgggaagcatcttgagtgcaggacaccaacagcatcagaaatttctgaacagcacctgccttctagcgtgtaacgaggtgccacagggagagccccagtgcttggcacactgtaggcatgtagcagcttttcgtggaactaagggacaaaggtgcgacttgcaaggacacagtggcttttcttcttttaggagagcccagaggtgctccttaggcaggccaataatgggagctgagtgagggggaggaggaagagggtggctttgcttccctggggtggggggttctattccctaatggccattggaaatcagcattcatacttggcaagaaatagctaacctctaccttggggagcataggcttggagaggatgtgcctactgcaaccactggctttcaaaagactgggctttctttgctgatgctggatcaaacgtactgagacatggccacagaagctctgctgctttatggacatgaaaggtgggtgacaaagccctgaagaggggactagggtatcctaaattctgaaatctgtccccagatgcacaagcctccacgtggaaaagggagaaggactgcttgcatggtgtacggccttgggtgcagtgacggatggcgcacacctgccccagtgccctccattgaggtttggagcagtgacctcacctctgcacagacccacctgcagggtggggggataggacggggctatctcaagtgtggggggcaccagggcagggcaccttggaagtattgccaggataactaactgaagaccagtggttagggcagggcagccctgcccctgttctctgtcctgtctctcaggaactggcgtgagatggggagatcaggtgcacagtgaggggcgtagctgtggattgaacatagcatggtcaggcttctgtcttttattatttatttattcatttatttatgatatatcatagttgtacatactttgggggtacatgtgatactttgatacctgtatgaaacatgtaatgatcaaatcaaggaaattaagatcttcatcacctcaaacatttatcttttttgtgtgtgggcggcaagccacccaggcaccgaggcaagagacagaggacacgagctcttccagtataataaaatataaaacaagaatagttataccagatatagatcttagatatgattatatatgactatcattaatcattagtttgtagcaattactttttattccaatattatgataatcctcgctctataatcatagcctaggaaaaaccaggccatacagagataggagctgaggggacatagtgaggtgtgaccagaagacaagagtgcgagccttctgttatgcccacacagggccaccagagggctccttggtctagcggtgacgccagcatctgggaagacgcccgttaccaggcggatcatggtccagcagtagcaaaaggtgtcaaggaacaacacctgctacttagcagaccgggaaagggagggtgggggtctccctttccccgggggagtttagagaagactctgctcctccacctcttgtggagggcctgacatcagtcaggctcgcccgcagttatctggaggcctgtctccctgtgatgctgtgcttcagtggtcacgctcctagtccgccttcatgttccatcctgtacacctggctctgccttccagatagcagtagtcaattagtgaaaatactaatagtccctgatatgcagaaataatggcgtaagctgtctttctctttgtctcctctccctctctgcctccgctgccaggcagggaagggccccctgtccagtggacacgtgacccacgtgaccttacctatcattggaggtgactgacattctttaccctgccccttctgccttgtatccaataaataacagtgcagccagacattcggggccactaccggtctccgcgcattggtggtagtggtcccccgggcccagctgccttttctcgtctctttgtcttgtgtctttatttctacactctctcgtcgccgcacacagggagagacctaccgaccctgtggggctggaccctacagcgccctgtgtcacctcggcagcttaagcacgtgcaactggttgctctgtaagctgctcacatttggcaaggctgcgaggccacaccagcaaagccaggtggctggagatgctgacccagcagagcatcgcgctccccgccccgggccagaccctcctactaagcccagcaggccaaacacggacccgcccccctcaagtgcctaggtgtccccggggcctgaacacatcaagttacattttgatggagttagaatccggaaaatcaagagtgtggaagatcaggagcaattaatgtaaacaggaggaggatgaagctgggaggagcaggagctagcaagcaggagctagcaagcaggagcgtgagagtggcgctgggagaaggcctggatagggatagagtagagcacagaacatgggggtcaccctcaaccacccctaaacactctaagctcgagcagtccctcaactcctggtctgtaaagtggctgaaggaagtgggtggagcaaaacccatatgggcgagtgtcccagcagctgcctcagtttccctatctgtaaaacggggctggggacctgcagctctcacgggactggttacccgctcgcgggtgctcgccctgcatccgagacagcacctacaactccaaacccactcggggcgggtcgaggtgggcccttcggtcccttcgaagccaacatcccgattccccttcccgggaaggcacccccggaaacgccaaggtcgctccagcagtctcctcgggtcacccgcttccccgaagccgtcgtcctcgccttccgctctcgtcttcaccggcatactcaggtccccgctggggactgacactgcgggctcggtcgccgcaaggactggaaggaaggtggaagatgcggggcgaaagcggagcgagaagagtgggacgcggcggagcagcagagccgggactcagagctcccccctcgccccgcccctctccccgcccactctgcgagtcccgccccctctcgggcgccgggcggggccatcccggggctgtccgcggagacgcctatgcggtggaggctccgggcttcagctagggcgggggagcccagcagaaggaccgagcagcctggcaccccactttgccatcctctccctggaaatctcggggtcggcgggccggccgcttcgcgtgggcgaaatcagagacacgtggtttccaaggccccttcgggttcgggaaaattttatggttcgggtcacagtaggaagcggacaatgaggcgggagggcagagagaaccgcaacacctggtgccgggtcgggtcgtttccggggctttcagtggccggaagtcgcggcgcctgtactgactctaggaagggctggagttgttttgaatgggcgcccgtaagagaggtgggcaagtacgtgttacagacggccacgccgccctttaggcggtcaaggtggggcgaggagacgttcgcccccctgcagtcggccgggtcactacccaagagcctttggaggcggaagcatggaacggtctgcaaacgttcccgagcgggcctctgcggctctggcgggcgtttcgaacttgggcgccgggcacacgcccagtcccgagagcgctgagggttcccttagcgtcgccctcaccccggccaacccgcggggcgccagagtcctggccctttaaacgccgcgcgtgcctcggcgtcttcgtttcgcgcgcccgcccgcggcgccggcggagcgaacatggacccggctgcgcgggtggtgcgggcgctgtggcctggtgggtgcgccttggcctggaggctgggaggccgcccccagccgctgctacccacgcagagccgggctggcttcgcgggggcggcgggcggcccgagccccgtggctgcagctcgtaaggggagcccgcggctgctgggagctgcggcgctggccctggggggagccctggggctgtaccacacggcgcggtggcacctgcgcgcccaggacctccacgcagagcgctcagccgcgcaggtaaggcctggcccggccggggatggggatgctgatcagcgccgaactcgggactcctgggaacccgcagggtcaggagttgcctctgcctgcttgtgaccttgggcgagtgacttggtctgaagtctccgaaccctctgtattcttttgtgtaaaataggggcactcctgatgcctactacctggaattgttcgagttctcataaaatcgttcttctaccgtggttttttttttttttttttttttggtttgtttatttatgttttcgagacagggtctcgcattatcgcccaggctggagtgcgatcgcggctcactgcagcctctgcctcccaggttgaagggatcctcctgcctcagcctcccgagtagctgggactataggctcaccccactgcgccctgctaatttttgtattttttgtagagatagggtttcaccatgtcgcccaggctggtctcgaactcctggcctcaagtgatccgcccaccttggcctctgaaagtgctgggatcacaggcgtgagccactgcgcccagcctttaccatgttttaaggagactttttttttttgagacggagtttttttttgctctgttgcccaggctggagtgcagtggcgcgatctcggttcactgcaacctccgcctcctgggttcaagcaattctcctgcctcagcctccccagtagctgggattacaggcgcctgccacccagcccggctaatttttgtatttttactagagacgggggtctcaccatgttggccaagctggtctcgaactcctgacctcaaatgagccacccgcctcggcctcccaaagtgctgggattacaggtgtgagccacggagcccagcctctaccgtgttttaagacttttttgattaagagatgggagatcacaggaaagggaaagcctttttcactttccaaacgttcatcatcctctctcccca

SEQ ID NO: 12126 - DNA, 6000 bp, Homo sapiens
atggcccagggccgtcctggctgacacctgtggtccccgcacgtctatcaacagtgccttgtcatccttaagagctgcctggttggaataagaaatgatatggtgggctgggtgcggtggctcacgcctgtaatcccagcactttgggaggccgaggtggatcacgaggtcaggcgatcaagaccatcctggctaacatggtgaaaccccgtctctactaaaagatacaaaaaaattagctgcgctaggcggccggcaccggtagtcctagctacttgagaggctgagacaggagaatggtgtgaacccaggaggcagagcttgcagtgagcacagatggtgccactgcactccagcctgggtgacagagcgagactccgtctcaaaaaacaaaaaagaaatgatacggtcacaccctttataggccaccgtgagtgtgtggattttaccctttatgtgaggttttaagcctgggcatcaggacccaattaagcatttctggaagctgagcactgactcctcccacagcctctgtgaagccgaggtcccctcttctccaccccctgcagggcctggacctggcctctctctcccctggctgacagccccctgccactggccacccacaggacctgggcaggaagggcatcaagtggtttgcctcagaaccctggtgggtcgtctgtgcctcggagggaatgagggcagtgcctgccagcagcagccaacactgctgaaccttattctgtgtcccaggccccgggctaagtgcttcatgtaccttccgcttcctcagaaccctggcaataatccatttcacagacaaggacactgaggctcagagaggtgaagtgactttactttttatttttttcagacaaggtctcactgttgcccaggctgagtgcaatggcacgatcacagctcattgcagcttcgacctcctgggctcaagcaatccttgcacctcagcctcccaagtagctgggacaacaaacgtgcacctccatgcacatctaatttttgtttttttgtagaaatggggtctcactgtgttgcccaggttggtctcaaattcctgggctcaagcaatcctcccactccagccacccacagtgttgagattacaggcatatgccaccatacctggcctgacatgacttattacctcaaggttgccacagtaaaggagggaaaacaagatcctcagatgtgccaggtgctcctcctctagctcgctggcctgatacttgccatttcctgtgtcaggaacactctagttcctgctcatcccatcacagcacctacttatctcatggggctgaaattgccttgtctcgtctcccccactggactgtgagcaacaagccacatcaaggctctgctgtagcccagcacaaaacctggcacatggagggctctccttttaaaaacctgtggccaggctgggtacagtggctcagcctgtaatctcaggactttgggaggccagggtgggcggatcccttgaggtcaggagtttgagaccatcctggccaaaatggtgaaaccccgtctctactaaaaatacaaaaattagctgggtgtggtggtgcacacctgtaatcccagctactcgggaggctgcggcaggagaatcacttgaacccaggaggcagaggtcacagtgagctgagatcgtgctattgcagtccagcccaggcaacagagcaagactccattgcaaaaacaaacgaacaaaaacaaaaacctaggtgacgggatgagctgtgcagcaaaccacagtggcacatgtttacctatgtaacaaacctgcacatcctacacatgtacccctgaacttaaaataaaagttggagagaaaaaaaaaaagaaactaattttgccgctcagcaccttcaaacatgacctacctctccaaaatagactgatgtctaaaccataaagccattttactgagtctccctaagaaatgtgacctctggccgggcacagtggttcacacttgtaatcccagcactttgggaggccgaggcaggcggatcacaaggtaaggagttcaaggccaccctggccaacatggtgaaatcctgtgtctactaagaatttttaaaaaattagccaggcgtggtggcacgtgcctgtaatcccagctactttggaagctaaggcaggagaattgcttgaacccaggaggcggaggttgcagtgagcctcagatcacaccagggaaacagtacgaaactccctctcaaaaaaaaaaaaaagtgctgggcacagtggctcacgcctgtaatcccagcactctgggaggccaaggcgggcgggtcatctgaggtcgggagtttgagcccagcctgaccaacatggagaatccccatctctactaaaaatacaaaattcgctgggcatggtggcgggtgcctgtaatcccagctacttgggaggctgaggcaggagaatcgcttgaacctgggaggcagaggttgcagtgagccgagagcccgccattgcattccagcctgggcaacaagagcgaaactccgtctcaaaaaaaaaaaaaaaagtgtggtgggatgggaacttacaattgtgatccttcctctgtccatttgagatgagtgtgtatctcctacaactcagaagtgtctttttcaaggacctgaaggccattctattgaaatgtaatatcaggaaggacagagcctctgtctcccagtctctgcaggagaacagagtcctaactttcaccattgccagcgagcacgcggagctgcctaatcacatttaccatgaccaaccctttggaatttttcatttcccttattctgctgaagccctcaccgtttccctccactccctcattctccctttaagccagacatggtggagcacgcctgcagtcccagctactctggaggctgagggggaagattgcctcaggtcaggagtttgaggccatagcgagaccccatctcaagaaagcagaaaaccaaaaccacaaaaaacatcagtcacctctgcacaaacagaagtttcagttggttcacactgggctctccgccctatcagtagtatattgttaattaaaatctggccttactatttgaactagtgttgggatgtttgatactagcacagtgcctaacccacggaagcttcagaattatgtgctgagtggataatgtgctggatgtccccactgagcacatcagatcctgcacccagtgcagtagtcaagacttagctgcaaatgacagacacccaactcaaacatctactcaggctagtcaaaggtgggaattggggccaggcatggtggctcacacctgtaatcccagcactttgagaggctgagttaggcagatcacttgaagtcaggaattcgagaccagcctggacaacatagtgaaaccctgtctctactaaaaatacaaaaattagctgggcgtggtggcatgtgcctgtaaccccagctacttgggaggctgaggcaggagaatcacttgaacttgggaggtggaggttgcagtgagcccagatcgcgccactgcactccagcctaggcaacagagtgaggctctgtctcaaaaaaaaaaaaaaaaaaaaggtgggcattcattgactcttgcaaccaggggatgcagagtcagtatcagcttcagggacagccggatctagagggctcagacaatgttgttcagaccatctcttgctccctcctttagtgctgcttatccatctctatgtgtctttataagttggtctcattttctccagccacagacagggtaagccctctccgcccagcgtaaagacggctcccagttgccttatatcccattccttaggcttgagatccaaaagaatgctccttcctctcagcatctagacagtaatctcatggaaggcctgtgattggttctgcagagtcgaaagcccacagcctgccgctcgccatcctatggggtgaggggcagtccctccaatcacatgggatgggaagtcgattccccaaccaaaaaaaggatgttgagctgagaaaaacaacagatgtcagaggagtatcctggaggagctgggatggggccaatcagagggaggcggaggaggatgctggtatcagtgggaggtgctgtggaaaggcggggctgagtggagaaggccctggggacacagggaaggaggacagcctgcagcctccggtgaggaaagtccgcctgtaggtggtggctcacagcaggagaggcaagacagtcccgtgctagacaaggcgcttccattatttaatcctcccaaacaccttaggaggaagacactattgtaatcccccttatagagacagaaaacagctcagaggggctcagtaactcgcccagggtcacacaggtaggaaggggcagtgctgggatttctgactcccgcctaagttggatcacccatagtcagaatgtgcaccacgtacctccacttttctctcgtccgtttgcaatatctgagaatacatagcaaggaggtaaagctgtcaccacagagcaaccttgggcgagccttggccctctcgagactttagtcatcacatctttgaaatgggtacaattttgcctcccggactcacagcaagccgctggatcttcgaagcgcccagggagctacgcgcatgcgcgaggctgcgagggcgggcacaggggaacgcgggggagggcacagcggagcgcgggggaggtgcgcgcgcgctccggcgctttcaaaagttacctggcgggtggggctggagttgagggagttaccagctgcgcgcgcgccggccccaccctcagcctcttcaggcacctgttggcttgagggtccattcggccgcagatgccatccaataggcagcctccctgacccagtccggccccgcccaacgcctagatccaccagtccccgggcggcggcgttcccctccctcggagggcccgcccctctgggcgcttcttccgggtggggccccgggccgaggcgatggcgccctgggcgctcctcagccctggggtcctggtgcggaccgggcacaccgtgctgacctggggaatcacgctggtgctcttcctgcacgataccggtgagccggaccccgagcgaccccggacccacccgatcccgcgtacttccccagacgttctggtcacactgggtctcccgcctaatccctggagatcctgggattggcccgatctccaccagctcctgaagccctctccccatctatcattccaagagccacctgctctctgtctgataccccgttgatccctaattaatcccagcatcttcctgatcattgccaaatgccctgtccatcccaggacccagccggtgcccaccagatccaaggaccgacttgagccccatgtcccctgatcctgggacccacatgatccttcccaggaactgaccccaaatcttcctatccatacgattaggaggctcaactagatgcaaagattggcattctgcccacacccacaccccccacacccccatggccactagctgcccaagtccaggcaaaccctcaggccagagaacactccatggggtgcggcctgtctcccatcttcccacagattcacccacccacccacctccatttccctcattcctcttagtagccccctacccagcgcctcacctgccacaggcagcctcccccactgtcccccacagcagaccccagccctccttccatggcggtccagcctcagtttctggactggggccccttctggctttcctcccaagacagacctcctccaccaccttcaccctttagcctaaaaacttgctcaggtctccgtatcagaaaacccccctcaaaacccaccctttcttctctgctcccccttacaaccaagggacacaggatttgtctacactctgctgtctggtggtctcatgccccctcactccttgccctgcaccctacctccccaaaatcctgtcacctccctgggc

SEQ ID NO: 12127 - DNA, 6000 bp, Homo sapiens
cggagtctcaactttgttgccaggctggagtgcagtggtacgatctcagctcactgcaacctccgcctcccgggttcaagagattctcctgcctcagcctccggagtagctgggattacaggccggtgccaccacacccagctaattttttgtatttttagtagagagggagtttcaccatgttagctaggatggtctcaatctcttgacctcatgatcctcctgcctcagcctcccaaagtgctgggattacaggagtgagccacggcgcccggcccagacggctttactctgagtgagattgggagccactgcggtctttgctgaaaaggaaggaagtgatttgacttttttttttttttaagcaaaaatgaaaaatcctaatttctaggctcggctgagtcagaggcaggtggaacacctgaggtcaggagttcaacaccagcctggccaacatggtgaaaccctgtctctactaaagatacaaaaactagctgggcgtggtggcacatgcctgtaatcccagctactctggaggctgaggcaggagactcgcttgaacccgggaggcggaggttgcagtgagccgagatcacgccactgcactccaacctgggcaacaagagcgaaactctgtcttaaaaacaaacaaacaaacaaaaatcactgtgcatttatttccccaccactggctacagaaagcctagcaatactcccaaaggtcaggaaccagcagcagaggtggggccacttcctcctctctaagcctcctctgatgttagggacaatcagccagcgtgaagagcttggtttctgctcctcaggaaatgccagggagggcgctggtctaagccacgggatggttttcaacagggcagagcctctgctcagggtttcgaacggggataggaagaactttcactttcatgggtcgaaaaaatatagtaaagtaaaaaggtttgaagatacatctcagtaacttttttctctttttgagacagagtcttgctctgtcgcccgggctggagtacagtggtgcagtcctggctcactgcaacctccgcctcccaggttcaagtgattttcctgcatcagcctcctgagtagctggaattacaggcacacaccaccacgcccagctgatttttgtatttttagtagagacggggtttcactgtgttggccaggctgttcttgaactcctgacctcaagtgatccccctgcctcggccttgcaaagtgctgggattacaggcatgagccacaaggcccagcccatctcagtgacttttgacatatgcattcacctgggtaatcaccacccaggacaagatgtaaaatatttccaggggcttctgttgtcctcattgttgtgggcacactgctgtagttcccgtgggcctcaggaccaggccacagtgagtgtcccccagcccccaacactgtgcacacaccatctcctgtcccccaccctctgcaaggcaggggacaccaagcccatcttacaggcaaagaaatggaagctcagagagaagtgacaccaccatcaccgtcacccccaacagccacaatggcagcttccattggccaagggcagcttcagggaaattcttggccaaagatcagagattttgtcctccttggcaggccttggcttagcaggttcatttcagtagacagtgacgaaaagattcctatcttgagatcatgtccatcagttatacgaattcccctacacagtctctcccctattttcggctcagggtagcgggaggtgatcgtctgctctttgccccaagctggttttcccagcctctgctttctatcttgttatttcagaagaccagtcagggaagagccactctccctagtccaaggaggacaaccaaagggcccctcctgggctgtgtctggtccacgattctgggggtggtacagccaccagaccccaacctcatagctgagctttttgacaaggaaggtagctacctgcaggggttcccacgggctgggggcgagagaggcagggattctctcttctccgacagaaatatcagccagaagcgagcttgcacagctcctccaacagacaaccagagataaaacgtgtctcagggcatcttgtactttccatgttccgtccctgatggtatggtgacctatcatttatcttgtggggccgggacagcctggcctggcagttccccacgggagtcagtttatcaagcacatcttttgttcggataaaggactgcttggcacacagcaaatgggcaaggcaccacccccaccttgctcacacccacctcccccagcaacaagggcagggatttctatgagtctccctcctgacaaccctactaggtagggatcattattccctttgagcaggaggaaacggaagctcagaggatgatactgaacggagtgcctacttgttccaggggcttcataattatttagctcccacaactgcgctggggagtgacttagggtcagctgcattttacagctgaggaaactggttcagaggaggaacctgcctgcctaaggccacacagctacagctgagggctggctttgggattcgaggctggctaaatctagctctggccaatcttccctttgatctctgctgctttggggcataggttggactgacacagctgtctctctgggcaggtgctgtcccaaagcacctggtcaagcccaagagtgaagtaggcatgggagactggtttctccctttcccctttgccccacttccccagggcacctctcagcaaagccaaatatgttggcgaaaataaatgagcaagaaccgtgtacaagatccctgcccttggccaggtgcggtggctcatgcctgtaatcccagcactttgggaggccgaggtgggtggatcacaaggtcaagagattgagaccatcctggccaacatggtgaaaccccgtctctactaaaaatacaaaaattatctgggcgtggtggtgggcacctgtagtcctagctacttgggaggcggaggcaggagaattgcttgaacctggaggtggaggttgcagtgagcagagatcacgccattgcactccagcctgggtgatagagcaggagtctgtctcacaagaaaaaaaaaaaaagatccctgaccttgtggaggtcctgccagaacccggggaagcgggcaggatgcagcaaggtgaggattttttttgagacagagtctcggtctgtcgcccaggctggagtacagtggtgcaatcttggctcactgcacctccacctcccaggttgaagcgattctcccgcctcagcctcccaagtagctgggattacaggtgtctgccatcacatctggctaatttttgtatttttagtagagaggggatttcaccacgttggccaggctggtctcgaacttctgacctcagataatctgcccccctcggcctcccaaagtgctgggattacatgtgtgagccacctggccaaggtgaggattttgaggtgagggattcaaagaatcttagaaaacaaacgttgatgctttctttcttttttgagacagggtcttgctctgtcacccaggctagagtgcagtggtgagaacatggctcactgcagcctcagcctcctgggttcaggtgatcctcccacttcagcctcctgagtagctgggaatacaggcgagcaccaccatgcccagctaattaaaacatttttttgtagagacggagtctccctatgttgcccaggctggtcttgaacttctgacttcaggtaatctgtcccccttggcctcccaaggggctggaattacaggtgtgagccaccgcgcccggcctggtgatgctttctactgaagagtcagttgataggtctttcggggagatcttgtgatgaagaatcaaagcatttgactggggaaagagttccaggatagtcaagtgatgctcaggaagtcagtggagccacgtgctggttccccatccctgctatagcaaattaccacagacttagtggcttaaaacaacacagcttcattctctgacagttctggtggatgaagcctgaaatgggtctcacagggctaaaatcaaagtgtcgggagggctgcgttctgtctgaacgcagagagtttgtttcgtccccttttccagtttctagaggcccctggtattccttgggccatgatctctccttcatcttcaaggccagcaggttagcgtctctcctgtctgacccctattctgtcctttcatctcctctcttaatgctgcctctgtttttatatcttttctctaattttactgcctccctcttggaagggcccctctgtatactctgggctcacccagataaactaggataatttctcccatctcaaatccttacgaaatcccatgtgaaaagtcccttttgccacatagtcacagtcacgggttctagggattgggacatggatgtctttaggggtggagggcgtccttcagcctgccacagatggcaaagtcatgccattgtggctgcagctccattgtccaggctgagtgtgggggcgcatggcgtggttctcatgcccaccacctaccctgaccctgcggaggtgggcaggaggcagcgataatcaccacgtgcagaggtcctgccaggtgcccagcctcatcattccctagaaggcaggcaccaccacatgctcccacactgtagataaggaaacagctttgaaacagatttgaaagtgtttgaggatttgcctggaaggagggctccagagccagggactgggtccgggacacccggagactctctgcttcttggagctccggcaactgcttgtctttctcttcacaggagaagggggccctgctgccgctgccgtggggcggggcgtgggcggtgctggctgcaggaaggctctcccctcccactttgtgctttccctgcaggctgctcctctgtcgagctgatcacacccacagttgagctgcgctggccagagatgcctgcccacagcctggtgatgagcagcccggccctcccggccttcctgctctgcagcacgctgctggtcatcaagatgtacgtggtggccatcatcacgggccaagtgaggctgcggaagaaggtatgtgcctccctgggggtccccggcctgggtcatacttgcttctctccacgtcctgtcaggaaagccccgggatagggaaacatggccaaggtgtgtgcagggctgggaggtgagcacctcttccagccccgccggggggcttcctgccagtcccacgtgtcagcaaggcctgcaccttctcctctctggcttaagagcacttactcgcttgccgtgccaccgggctgagttcttggcatggagagagccagcgagtgtctgtgagagaagcaggttctggagggtggagtgtgggagcgtgacagcacaaagcctctgtctaacctggtggcttcccggcacgggaggtctgatatctgggtggagtgggaaccggcaaaacaggagtccgagaaacgtttaagtggaaattcccaactcctggcaaatgtcactaacaagcccactgtagcctccaaaggccagctcccagccgggcaccgtcggggtgctcagcgaggaatttccccactaatccgagcccctgaaccaaaacaacattaacgagtcccagagctgggccggggcaagttccagtagcgtccgtcacactggttggcgagtctgcaaagtcataggctgagcttgtcggctgtcctggcggcagaatgcagaaagaccccaggcacctgttacttcctccccaggtattttaataaagcaatcatttcctgaaactgtctctgtcttcccctgtgtccagttcaaaggcgaggtgaggcaaggctggctctggcactgcatgcgggtggatcctggggagtgaggatcttggccacaagccaggctcaggccctgctgcaggtacaggcaggattaaaggcagggc

SEQ ID NO: 12128 - DNA, 6000 bp, Homo sapiens
ccttcccccataccttgccctacacatcccttcatctgtatgctttgtagtatcttttataataaaccagtaaacatgtttccctgagttctgtgagctgctctagcaaattaattgaacccaaagaggaggctctgggaactccagtttgcagctggtgagtcagaagctctggaagcccagatttgtttgtttgtttttttgtttgttttggagatggagtcactctatcaccccggctggagtgcaatggtgtgatcgcagctcactgcaacctctgcctcccaggttcaagcgattctccttggaaacccagatttgtgatggcgtcagtgggaagtgggggagggggcagtcttgtgggactgagatctcaacccgggggatctgatgctacctcctggtgtctgttgcctggtgtgtgggaaacccccacacgctggaccacagaagtcttctgtgttgactgttgaatgagggaagagaaaaagccctttgagagagagagagagagagagagagagagagagagagagagagtgtgtgtgtgtgtgtatgtgtgtgttttccactcaaggacctttgggggaaatggctgcacacttcataggtgagatatgctatctaactcattatcttatttcattgtcctgatgcaggcggaggctggattttcatctttccaccatttctgaagcgtggccccttctgctctcaggggagcctgctgaacatgtgttcttctgggcatccctggggtcaaggtctaggtatggcttccagcacagccaagaagctcctctcccaggtgctgggggcccaggaaccagccctgggatccctcctccgggcctagctggctggtttcagttagtgcttggactggcttccctgggacagggtgcagtgggttctgcttgtatccaggccaggccttagctagtgcaggatgatgggcttggatcagagactggctcctggatgccgctgggttctgggtgggccaactgtatggatgtgaacgcacttgtcctcctgaaacaccaggtcaaagaggaacacagtgaagggagccccagaggagtagggctggcccagagtccacccagccctgtagtctttaaaccccacctttttggggcagtgatacattgttctgataatacagatgtagaaccccaatgtatcaaacccaggacagagctgctcagggtggagctgggatgaggtctggactccctacccccaacccagacacacagacacacttcaggagcctcctccccgacaccccattcctaggcctctgagaggcccagcttgacaagcactaaaggaagctgtcactgcaatgcatagtgggaaaaactgaggctttgtccaagatcagccagcaaagcaggggcagaagcttgggtgatgagctgagacttggggtctgtcctcaggaccctcctgctgctgcccacccccaggttccaaggccaaggggagccaaaatcaatgtctgggtccaaactgagctttgcagagatgcctgatggccactcaggagagcactggctcttgttccagacagaagcttctcctaaagtgaggagagtgaggcccacacggggggccatggggcctgcctccaccccacccagtccctccaccccagctccacggccagggaagctctgcagactctccccacctctccttagagattaaaggtctggggggttctgccacccctgctcacctgagttcccagacttgaccatgaactcccttatttctgggaaacactctggagcattctctggcatcccagaggtaaggcc[135 bp omitted]aaccagaagggggactttagccagccccctacgagaggacatttccccattcccttcatgaatgcaaacctcagccctccaggattaccagtgggaagacaggtcacttctttgtcagcttcagaagatcaagaccaatttatggagaaaccgagagatgagtcctcacaagcccattttccagatgaaaagctgaggcccagtgaggggaatggtcacagagggacactggatagcctgggagttcggaccaagagtcctacatcccctccaccgccgaccccacccaggctggccctgagctgctgcacaagaacttgcccgtgacctcccgatcccagccgctgccctctgacctcccgatcccagccgctgccctcgctgagcttggaccacgtgcctgagacccgtctttcctcatttaaaccctgctcggggtggggggggctccacaccggcggggaacgtgcttgttcaccgtgtgttcttagcctctagaacagagcctcaggcacaggaggcacttcacatttattgaataaatagatgaatgaatcagtgtcatcctcccaacagccccttgaagcaggtactcttatttgacagaggaggaacctgagacacaaagaagtcttggtttcattcattccttcactcattcatgcatccagcacccctgttgtgtgcagacacctggaatatgacagtgaaccccagacaccatccctgtcctgagagctcacagcgcaaaagcagggacagcatctcacccacagctagcagtggaagcgccgatctgggtcccagcttcagtggcccaccacctcctcaaaagatagttaagtaaggccaggcacggtggctcacacctgtaatcccagcactttgggaggccgaggtgggtggatcacctgaggtcaggagttcgagaccagcctcgccaacatggtgaaaccccgtctctacttaaaaatatataaaaatcagccagatgttgtaatcccagctactcaggaggctgaggcaggagaattgcttgaactgggaggcagaggttgaactgggaggcagtgagccgagattgtgccactgcagtccagcctgggcgacagagcaagactccatctcaaaagatcacgccactgcactccagcccaggtgacagagcgagactccattaaaaaaaaattaagtaaaacataaattttatttatttacttatttttgagacatagtctcactctggcacccttgctccagcctcatagcttgctatgttacccaggctgctcttgaactcctgggctcacgtgatcctctcaccctagcctcccaaagtgctgggattacaggcttgagtcaccatgctcggccttaagtaatatttaataagagttttctttaagtcatatagagagagacagacagaaaaacagagacagagagagacagaactggaaggctagcagtgactcttctccccactgctcttctcccactctgcctggcttggatttgttctttctggttcccttgaacactgcaagtctctgcctacattcctatttc[450 bp omitted]ccttttgaacagcactcaccagctcccagggccggtgccaggctcctgcagactgagaaaacaggccctgccttacaggaaccccaaggtgctctagagaaaccccaaggacacaggtaatcatcacacccctgaggggcctgggaggctgtgcccaggcaccaggcagggctgggtttccaacttccagctgcactgtgacctggagcacacccataacctctctgagcccgtctctggctgggtcccaccccccaccccttgggtcactctctcttttattttcccttagggccccttcatttcgccttactgtccctcccctctcgcacccttcctaggagaggtttctgctacgaaaactttctaccccatgcactggcggacctctggtgagctgcaagagggtctctcctggggtcccagagtccctggggtggaaaagagtagcccttcgtggaagggataatgcaaccccgacaggccgtgggaagaaagtgtggccagtcccatttcacagaagagaacacggaggctccgggtaattctgggagccactcacttgtgtcccctcgctgggtaggggcgcctggctcagaggcccccagcaaaggaggacagatcctaaaccggacagcaagctgcgtccagctggttctccctttccgtgactgcttcaaagctcttataaacaaggtaaggttttccccacaaatcgcttcatttctccacccgcaccctaccatggccccggacctgcggttctcggccccccgagctgggcctgctgcatcctaggcagagttctaggcggctagcggaagccaggcccaggggtcagctcaggcgctcggtcccccgggatcctgctcccaggccgcagggaaggggctctgggaccgcaggggcggggcctgcggtaggtgggcggggctgcggcgccctctttcccgtctggcttctcttttctgtcctctttcctgtctgtcttcctcttttctgtctggcccgcggccccgctgcctgccctgctccaggctccacctgcgccgccgatcgcccgggtatcgcgggggcccaggccagctgagtccgttttccgcgccggggtggcgcccctccaaccgtcctaacgccgggccggcagcaaggagtaagtctgcaccccgtagggacagtcgcgctcccttggccccacccagtccctgccacgcaaggggccaaggaggagggccctgagcccaggaggtgcgcatctcggacccagggtcccgggtcccgaccacggactggggccggcggcgctcggggctgggctctgcgttcgcgggaggcgggggcgagacggggcttggaggcccgagtggggaaactgaggccccagaggaagagagagggagagggcttgccggacactcccgagtggcagcggcctaatccccaggaccccggctctccgctcactgtggcccgggctgcgcccagcgttttacagccgttcccgcgtgtcctccccccgggcgccgcgtgccgccccccatccactgaggccgggagcaggggatgactggcccaaggtcaacgagccagcgagttgaggcgcgttcccatcgttccgtggagaacccgggccctgcctcccggagaggtggacagcggccacctcgctcccctcggggaatcctgggcgccccttcccgcgcatcctgcgctgggactgcatgtgtcctcgctgtgcctcggtgcttgatttccagcggacggtggactggcccatgcacccctcccggcggcctcggctcacctctgacaatggacctagtacggagacgcgggagccaaggcagggatccgccttcgcggcctctgcgaagtcggtcccagcccctctcccaaaggacagctggaagcaacagctgagcaccgagccactgccaccgtgcgcctcccagagctgccagagctgagcccggggtccagcgggacctagagtccacatgaccgcagtgggtgaccg

SEQ ID NO: 12129 - DNA, 6000 bp, Homo sapiens
gtgatcctatagcgttgcccagcctgaatggggctcccctcaggatgccagtgagcgaggttacttctctaggcttctctgaagaccactcagaagccatgtccagagagaattagtccctcagagtccctgctgcttcctgggtgtgggggacagactccctcagccctgccttagagggcagcagatgtcatgagacaaggataagtgggtagagaagacactggggacagccgatcattcagaggacacacggtttgatcaggagcgggggaaatatctgaaggctttctcgaaacttcacggcatgtgcttttattaacctggctgtttacaggagctgaagctcttgggtttgcggtgatgactcttgaacttctttttcaacgagcccaactgcttctgtgggataaacaaaattctgattactgagcctttctgatcccatggagaaggggccctggagtgcagggctctccccacccacacagcctcagaggtgtcggtcaaatacccacagaggctttctccacccccgtttccttaacagctgcaggattagaccccgctcagcagggcctcagaggagtacagtgcaatgccacacactcattaggaccttgtcctcttttggccttggtcctgcttatctaccaaaggcggggaagtctccactcctgccctgatggcaaaggcaaaggtggtggctagtaatcaggtccctgtgcccaggggtaaggacaaacacaccacagctcatagtctgaggtaggagggtgtcctcacaaaccagtggtcttgaccgtggtccacagagcctggcttccacaaggggctggctgggaagcaatggtaggcactcacggccttccgccagccagcggcctcggcttctatggttcttgtgtgttgttggcttgggatttcacttgtgaaaaaggttcagttttctttttttaaacaaatggaaaaccatcactaggggaagccactgccacactaacagaggaggtgacagctcaccttcccgcgcttctggaccagccctcggtacacggtcgtctctctcctgctctcatcagtggccttctctcttgggggctttgccttctcatcctctttgtctgtcaaaaagtcatcagtgccatccccatcctccgtgcttccaaggtcctttctggtgaatagctcagctgggaggaacacagggattggctgacagttattttaggctgagttcgctgccacctttgcaggggaggcagcaccacagtctgctccctgctgacagtagagggtcagggagaagcagggcccgttctgcttacgtgggtacaggtctgtcatgctgtcatcacttgcagctcccccctcatcactggatgtgggctcccagaaggcttcccgcgggcgaggcccgtcaccgtccatctggtcctccctcctcctcctccggtgcaccaggcaggcaggcacgtactccaccccttgcttctgacattcttcatctgggagataagccagcacgtgctgggtacctccacaccccccacggtcctctgggccacagctaacttatgaggactgcactcggccagggccccacagccccaccgccctggacaaaaaccagagcagctgctgggtgcctcagctctgttcctaccaggtgtgcagggagggtggtgggccagggctgcagccaggaggcaagaagatggtagaggtctacggggcctttaccactcatccccgatctagccaggcctaggaagccacggctaggagggcactgaccaggcccaaggccaactgtgccccagtgagcttggcatggcctctcaaaggcaactcgggctggcagtgatgccaccctctccccagcagcctgaagtcctccctcagcacatgggagaccccgtcccggagggcggggctcagtggaggttggctgcctggcctttgctgccccttagtgggtgagaagggagttgggacaaggcttccatggaaagacctcactggagtcaccaccgttgtccccttgtatattggagggtctgctggggcttgccctccagcccagcgcagctaccatcatcatccctcatgggctgcatgagccctgctgggccctggccattgatgtggcggcccatctccagggctgtttccctccttgtctctgccacccacccccatggccatgcagcagccttgtcaccaccagaacgtgaaggcagagcccccttacagccacgtttggacttccctggaccactgccttgcagtgacctcggcgccccagtcccatctcagctccacagtccaccatcataaccattcttcatgggaaccccgtggccccctgcacttagagccttcctgcccacccctgagcagctaacacactggctggaaaaagtccaagcctcaggctggcagcccttgtgcctgcaaggcctctgcaaggtgcccgccttctacttgagaaaccctggtcctgccttctcaatccacactcatgcttcgggagggctggactgcctctccgcactcatcagaagcccgtagacgcatcttcccatccgcaaaccaacctgaatctgtccgctccagcctctgtccatttccctccttagctggactccagaaaggctttctggtgacccagcacctgcctaaggccggacactgccctcatgggctgcagcctacgctccactctagccaggtgtccctgccaagcttcaggtgcctcaccaaggttgccaggggcctctgtgttatcaaatctatcatttttctgtcctcatcttcccttcagtaccacgggaggacttccagcctcttcctggggctcaggaccaggcctctctcccttctctaaactctcgccgggtgctcacccagatccacggtgcaaccatctccttcatccagcacgggtgtccctgtttcaaaagcccgatacttccctaatacacacctttcctaatacagctcaagcttaaaaccttcaaagggactctgaattctccccccaaaacccaccgtcttttcctggatgaccgcagtcaaggagtcctcccttctcaaccatgcacactgtccatgcagcccccacccaaccctctccacacacccactgcagtgctcctggcctggtctctgggtcatccgggctgtgcacactagcccagccagtcctttggagcctacctcagccaacacatttttgcctcagacttccatggaccctggcttctccctggggtgctgttcccccgaccccactgccaccacatccctccagcctcagcctcgagcgaatccctcagcgagtctccccagccctcctgtctccgcaagcccaccccacatccctcgcccagtttctttcacacctcgcattgccacgcacactcactcactcccgagcctgcttctggctctgtgcctgcctgcactaaaagctgtggggtcaggggccatcatccctctcttcactgtgccaaaaaacaggcctgatgcatcaacacggatcgctgaaggacgacctgccttcaagcacgctccatctggggcaaggcgggcatgcactcagatggcgatgcactgatgggggtccactgggacttacatttacacagagctcgctggtaccgccggccctgggtgtgcctcagcacgtgttctgggcacttgttgatgtgccgcagggtgagtttgcagaacaactggtgcctacagagcagagagaccaaatttgtagggacagttcacagcaaggattcagactggtggctgtgtcttggactcatccctggacagtctaccatgcggcttggacatcgggcttttaaaggctcccggagcaattccactctgaagctgggtggggaaccgtctgacccaggccgactgcagcctcttaatgtttaccggaaaagcacgcatggcagcctcactgactgctccaggatgagttcatgcaagaggatggctccacctggagcaagggctcaatgaatggaaacatcctatctctgttttgacgattattacaaagcctagctcccagctaaatcaaagaccccttctggggttaagggaagaacccaacgctgttcacaacctcaggtgacaaatcacaagcctctactcatctgggaagcagccacaccccacaggacaaacctcaggtgagcaaacgagctcaccaagaggcctcgccgctgggaccgcaggtgattccagcacccgggcgcccacctgggtcccagggctcccaactctgaaagagtaggggctgcagcactggcggagtccagcggaggggctgtcctaattgccctgggcctccccgcgccgccgcggaccacctacgggttcttggtgctgggcacgatgtgcggctcgaactctgcatagtcgaaggccggggaggcgcggaccagccgctggtactttttgccgcgggtgtagacctggagctccggcaggcggcagggcagctcgtgacctgtcaggatgcacctcacctgcggacgcgtgggcgggcaggacgtcaggagggccagggctccgctccctggtgccccctcctgccgcgcccccttccctctcctcccctgatcccgccgcgccctctcccctgccctcccctctctcctgctctcccctctcccctctcccctgccctctcctctcccctgccctcccctcagcccctcatcccaactgcgcccttctccgccactccgttcccctcccgcgctgcgaaccttgcgggcgtccgtctggagccgcaggctcgggtgctcccgcagaaacgcccgcacgtcgcccggcaactcgctcatggccgacgcgcccgcggagcagcccggcggaagccgctcgcagaacctggagccgggggcggggctctgggcgggactcagcggcgccccggatgcagatgcctcctgcgtcccggaagcgcccgcggggccgggtgcgatggcggcggtggctgcgttgcagctggggctgcgggcggcggggctgggacgggtgagcgccgggtgcggggtgcggggtgcggggtgcggggtgcggggtgcggggcgcggggaggggtcccggagctcagcccgcccgtccgtgtccgcaggccccggccagcgccgcctggaggagcgtcctcagggtctccccgcgcccaggtgagggctgcaggccgggctgtgatccaggcgcctgggcagagccacctgctgtctgccctgcactttgaagggttgtcgtggggattgaaatgaaccaactgccggctgagcggaggctccctgggagtgacaagttccgtattaaaatgctttcagtggaattgtggtcgtgtgccgggcatgtagcgagcgctttgtcctcacaacgcgagaggtagctccttggtcgttcccctgttacagagaaggctcgagagttacttccgaacgtcccatccagctaatgggtggccagcccaggctgaaagcccagggctctgaaagtaaagcgtatctaaccaccgcggcttacgtgttcctctcagtgtgcagcacagggctgttttgccgtgtgtagagtgctgtgcaagcctgccccaggcctgcctttttataaaaaaaaaaaaaaaaatagtatccgcaaggcccctggtgcttttcagcggatggaactcatcctctgagagcttaaaggcactttctgtgtacattcttccctctttacatttacgatgagttgtaaaaatggaaagctgttaagagagctctgtgagccattactgaattgatatatttttctacataacacaataaccactagtgcctgactaagctacttagtaactgtagctgcttattttttattttttgagacagtttcgctcttgttgcccaggctggagtgcagtggcgcaatctcggcttacagcaaccacctcctcccaggttcaagcgattctcctgcctc

SEQ ID NO: 12130 - DNA, 6000 bp, Homo sapiens
ataatgccataagcatctttatcagagctgtttacacaaagtgaaaaattgagaacaagctcaatgctcagcccatgtgatagggatggcttgggttagttacagcacatcaagcaagacgggaggccacacagttgccagagccaagagaggaggaggctgtgggaatgacatgaaactatgtttgcaatataaaaaggatgctatcaactttaacgataccattctcctgaatccaaaaaagtttacaaacgcttaggaaaaaagactggaagaacccataaactcctacctacactctctttccccaatttttatttagaaataattgggtgatatttttatttttaatttaattaattaattaattaatttagacagagtctcgctgtgtcacccaggctggagtgcagtggcgcaatctcgactcactgcaacctccgccgcccgggttcaagcaattctcccgcgtcagctcccaagtagctgggactataggcacccaccaccatgctcagctaatttttgtatttttagtagagatggggtttcaccatgttggccaggctgctctcaaacttctgacctcaagggatctgcctgcctcggcctcccaaaatgctgcgattacagggatgagccaccatgcctagtcatggctgacatttttaaaagctcctcaggccggacgcggtggctcatgcctgtaatcccagcactttgggaggccgaggcgggcggactgcctgagctcaggagttccaggagttcgagaccagcctgggcaacacggtgaaaccctgtctctactaaaatacaaaaaattagccgggcgtggcagcgtgtgcctgtagtcccagctacttgggaggctgaggcaggaaaattgcttgaacccaggaggcagaggttgcagtgagctgagatcacaccactgcactctagccttggcgacagagcaagactccatctccaaacaaaaaaaaaagctccttaactgctcagagggcagtcagccacactgccccagtggcttgtgagacaagggggccaaccccacagccagccagcaagggagcagggcaggggcaaggactccaggcccagccatacagggtgagactgcggagctgtacggactgaggcctggcccagtagcagctgctgacaaggctcctcccgctgtatggccagccctgaacctgctgggtccctgccaccaccacagagaggagggcatgccagggactcttgcagcagctttctcaccctagtccctctgttgatctggacctccctgtctcggacacacaaagggctgtcttcctgcaggcctacacctccccatgccctgctagccctggtgaggagtgtggtggaagggctcagggcctggtgtgtgaccttagccctgtgtgaccttgagccagtccccatcctctctgggcctggctcccttttggtaaaactggtgacccagcactgggtagcacggtgtcccccagtgaggtggcctgaattcaaatcctcttggaaattgtgtgaccttgcctagtctggcgctgcattgagcctcactgtctttggctataaacagggtcattgtttctgctttacagggttgacgggagatgaagtgagtcagtgcctggcatacagcacgtgatgcgtaaatggtgggaggtggtggtgttggagtaaaaattagcattgcttccccatcaaggtgacagagcttcacgcacccccacatctaccccaaccagattagtctccgcaagtgtcagcagcgaggaatccagctgccgcatcaggaagcttctccaacatgggaagagcttgtattggggaaaatcacagtcacagaaccacccggcatgggatgcacaggcttggcctcttacctgctttatcacatgcttgactttggtttccatttcctccaccaccaggttcacccccaaggccccaggattcagctggtacaaaacctatcagcaaggaagagagaagctttcaggaaatgcacacaacttttccctttccaaaagcccagctccaactccttttctggccctgctaactcccctgtcaggctggcagagcaagtggctccaccccatcttgcaatagaggaaatggcccaaggagggcaagaagcctttcaatggcagaactctgatctcacctatttggggccgattctggagctcttctacaaccctgtatccctcccccaacctgcaatgaggaccagctgggcactcaagtgcaagaacctcccagagaaaaagggcttattcactctctatagacctctgtgacctcaacttccagcatccacctcccaactggtttccaacaagaaagtaaccaatcttgtgactggtacaatcaggaagccattgtgtgcctggcatggtgccaagcacttcacagccaccctttgcagttgacaccattgctacctctgtgtttacattggggaaaactgaggcacaaggagctaggtccttgcctgaggctatgtcactagaaagcaggacactgcctggggtaactctgggggtctgatcttagagcctgtgatttgagccaaatctggagagatggccaccaagccagaactctgtgcagagaccaagtgctatggggcagggggctgggccggggattgctggaggctgacattcatcagaggattgggggagggagggcaggacccagaggaggagatatgaggatggaagcctgagcctagggactctcggagcccataaaagtcttaggagtctgtaatccagccttgtgagcagcctgctcatgacactggatattctaagccaggggtccccaacctagtccgtggcctgttaggaaccaggctgcacagcaggaggtgagcagcaggcagtggagcaaagcttcatctgtatttacagccgctccccatggctcgcattaccacccaagctccacctcctgtcagctcagcagcagcattagattctcatgggagtgtgaaccctattgtgaacagtgcatgtgagggatccaggttgcatgctccttatgagaaacaaatgcctgatgatccgtcactgtctcccatcatcccgagaggatggtctagttgcaagaaaacaagctcagggctcccactgattctacattatggtgagttgtgtaattatttcattatgtattacaacataataatagaaatgaactgcacactaagtgtaatgtgcttgaatcatcccaaaaccatcctcccgcctccatctgtggaaaaattgtcttccacaaaactggtcccttgtgccaaaaaggttggggactgctatttttttttttctttctgagacagagttttgctcttgttgcccaggctggagtccaatggcgctatcttggctcaccacaacctctgcctcctgggttcaagcgattctccagcctcagcctcccgagtagctgtgattacaggcatgcgccaccacacctggctaattttgtatttttagtagagacagtttctccatgttggtcaggctggtcttgaactcccgatctcaggtgatccgcccgccttggcctcccaaagtgttggggattacaggcgtgagccaccgagcccggccagggactgctgttctaagccacagcgggctgagggcagagctggtgtgagagcgttcaagcttaggcagcaaattaaacagtaaaatggagccgtatctcgaatcaagtctatttttttttccaaaagcaggtatattcctgaaacgtctatttttttttaatctgaaaaacaactttactttaaaaattatctggccaccagaagctcatctgcttcacctctggcaacgccctatagtcctctcacacaaagacaattcttccaaagtgacaaaaatctaacccgcaaactgtttccaagcgaatgcatttttcacaaatgctgaatctaacatttaataaagtgtatatatcatgtatagaagcatttaattaaacatttacttttattttgcagctttccttttgtgttttgtgaattttttaggtctcaaacattttcacagacccacgctgcaggggtgtttttaggggactgggggctcccaattatgtactcgggatgttcccgggggtcctgcctcggtggacccaagcgcacagaccccaggcacgaaggatagaggagctgccccacgccctcaaatactcagccagggctggagaatccttagtcaattcacaaagggggaaactgagtggcaaagggcacccaggaggtcaccgttggaggccccccgggttcaacctaggagctgcaggccgacactggccagggcgcgggcccctcgccgccctcggtcggaaccgccggccgtagctccagggttgcgaccgttaccccacggagctcccgcctccccgcagggaacactcggcacctggtacttctccatgggctctccgggggaccctgggcctcgctccccctgcgtggggcgcctgcgattggaccctggcccaagcatgatcagtagcgaccgcgtacgggcgagcgtccacccctggccccaccccgcgtgggtcagtgggacccgcgggatcctccccgcccgaacggcgccctcgaggcactcaggcgtccctcccgcgcgctggccccagacccccaggtccccgcccccttaaaagggacgcgttccgccgggccgggagggaccgcagggcctgcgcgcggcgggcggggcctccagcgtgagaggcgtggcgtcgagcgcggcgggcgtggcttcgagcggatgggtcgggaggctggggatggcgcgtggcccctttaagacgcaccggggcgggcccgggcggcgcgcggcccctttaaggcttggcctacgtggcagccgctggagccgcagccgacgcggagcgaggccggccgccgggcacttcctgtggaggccgcagcgggtgcgggcgccgacgggcgagagccagcgagcgagcgagcgagccgagccgagcctcccgccgtcgccatgggccagaacgacctgatgggcacggccgaggacttcgccgaccaggtgcggcctgcgggctcctcccccggccccggtcccgacccaggccgcccgggccgctccggagtcggcctcccagcgcagggcgccaggcccgggccgccccctgactccttgttcccacagagggacccccccgcccgggccctctgtcccggctggacagccccaaacccggcctccgggcccagtctcccctgcccgctgggccgctcccggagcccgggcctcggcgccctgcctggctagccgcccccaccctccagccagcccggggcgcgggctgtgggggtttcttcccgggccggcggcgcgagtcctggcgttgggtcgggtctgaggctcgcggggagcgcctcggcgtttggagctgctggggggtccccgcacgtttttcctctcactggggctcccggaggcgggctgggagctcggggacgaacgggggccgggggtcctcccagaggaaagggggcgcgctggcgtgcgccccagctacaggaagccacagcaccttttccttttctctttcccagatgtgctggactcttggggtccctttgaccctgtctgcgtctccctccccgtttggactctgccctgggctggattgagtggggacctgtacacagcctgggaggaggggaagcctatctccctgatagtctccttccagaagtgtccaggtggcattctgagcaacagggaagcctttgaaacaggcggttgggtaactgttgagagcattcgggaactgggtggacaggatccgatcctacaaagtgaagggacacaactcccttccctctttcttgattaagcttgacagaacaaaaaaacaaaaacaaaaggtggtggtggttacgcagatttatgccttttacttctaaaagaatcc

SEQ ID NO: 12131 - DNA, 6000 bp, Homo sapiens
accttctcctcccctcctttctcccgccctctttctccccagcagcaagttgcagaagccagaattcctctttccctaggtgggccatggacactagagtccctctcccccaaagccagccatgagacctagaaacatgactcgaacgctacctgcctttctggggaagagctggccatgcccaccttgtctgactgtgggtcgtaaaagaccctccctccgggggttctaccccatccctggggggagaagcactgcacagagaggccaagggggatctgcacagctggcctcgccagcctcgcagtccatccccacaggcatcccctgccgtccgacacctgtccacacggctgcctgttctccaccaactctaagcacagggaccatcttccctgggtctctgagtctccacttctgacacctccctgtcacataaagctttgattaaataaatctggtgtgcttttctcttgtgaacctgtcttttgttatagaactgtcacccatggccctgatgatgatgagaccatccctataaactttataaaattaatcaaggaagaagagaggaggagaaatgagaataaaccaggcttgtagcacattcagcatccatcgctaggtcaacttgctctctgacctcaaagttttttggtgcctgttgccttagaatcacagagactctgttacaagattgtagctctccctcactgccctgtagatatagataacaactttaacattgcaaagatgtccttttccttttttttttttgagacagagttttgctctgattgcccaggctgaagtgcaaccgcacgatctcggctcactgcaacctccactcctagattcatgtgattctctcgcctcagcctcccaagcagctgggattacaggctcacgccaccatgcctggctaattctttgtatttttagtagaggcagggtttcaccatgttggccaggcgcccagtcaaaagtttccatttgagatgttcttttgggtcctgtgtaccaatgaaactactgacaccggccgggcgcggtggctcacgcctgtaatcccagcactttgggaggctgaggcatgcagatcacgaggtcagaagttcgagaccagcctggccaacatagtgaaaacccatctctactaaaaatacaaaaatcagccaggtgtggtgacatgcatctgtactcccagctactctggaggctgaggtgggagaatcgcttgaacccagaaggtgaaggttgcagtgagtggagaccataccactgcactccagcctgggtgacagagtgagactctgtctcaaaaaaaaaaaaagaaagaaactactgatgacagctggtctcaaggaccccaggaggacctgattcaccaaagaatacattttccacctcctgatgattttacctcccatccccagacctatcaacaacccacttctaaagcccatcgccctccatgatccccttaaaagccccagcccaaagctcctaggggagatggatttgaggatctcctcccatctccttgctcagagccctgcaatcattaaactcttccctgctgcgaaccctgctgcacggtgtactggtgtgtcgtggtgtcacggtggagcaggcatgtggatctgctggtcttgtaacaatgggtgaggaaacggattccaccttttctacccttacagtttgaaacagctttgatgcccatgacagaagattcattacaaattcaagctcatccacccagcctttaacattaaaaggctgtgaaacagggccgggtgcagtggctcatgcctgtaatcccagcactttgggaggccgaggcgggcggatcacgaggtcaggagatggagaccaccctggctaacacggtgaaaccccgtctctactaaaaatacaaaaaattagctgggcgtggtggcaggcgcctgtagtcccagctactcaggaggctgaggcaggagaatggcgtgaacccaggaggtggagcttgcagtaagctgagatggcaccactgcactccagcctgggggaaagggcgagactcatctcaaaaaaaaaaaaaaaaggctgttaagcagggttctgtgcaagaaggctcacaccggctcattcttttagccaaaaactgtgctacatccgtaaaacactacactacgcggctgcaaataagaacaaaccactgaacatcagcaaaccactgataaatttcataaacatgctgaaaaaagaaggcagacaaaaaaacagtgcttcacataggttctctttataagaccactgtaatctatcgtcacaggaagcagattaatagtttactggggaggccgggcgcggtggctcatgcctgtaatcccagccctttgggaggccgaggccggcagatcacgaggtcaggagatcaagaccatcctggctaacatggtgaaaccccatctctactaaaaatacaaaaaaatattagccgggcatggtggcgggcacctgtggtcccagctactcaggaggctgaggcaggagaatggcatgaacctgggaggcggagcttgcagtgagccgagatcgcaccactgcactccagcctgggggacagagtgaaactccctctcaaaaaaaaaaatagtttactggggagcagggaaaggaggttgacctcagaaaggcacaaagaaaccttctagaagggtggaaatgggctgggcgtgatgactcacgcctgtaatcccagcactttgggaggccaaggcgggaggatcacctgatgttgggagtttgagaccagcctggccaacatggtgaaaccccatctctaccaaaaatgcaaaaactacccaggtgtggtggcgggcgcctgtaatcccagctactcgggaggctgaggcaggagaatcgcttgaacccagtggtcggaggttgcagtgagccgagatcgcactactgcactccagcctgggcaacagagagagactctgtctcaaaaaaagataaaagaaagaaagaaaaggtggaaatgttttatatcttgattgggggtgtttggggttatacaattgtcaaaactcatcaacctatatttaaaatggattcattttactgtatataaattatagcttaacaaagttgatttttcttgtattttattttttcaagaaggctctccctctgtcacccaggctggagtgctgtggtgtgatcacagctcaccgcagcctcaaactcctgggctcaagcaatcttcccacctctgccttccgagtagctggggccacaggcacttgccatcacacctggacaacttttttagctttttgtagagacagggtcactttgttgcccaggctggtgtcagactcctggcatcaagcaattctcctaccttggcctcctaaatgctgggattacaggcacacaccactgcacctggcctaaagttgattttaaaagaaaaaaaatacattttaaaaaaagagaaggccgggtgcggtgactcacgcctgtaatcccagcactttgtgaggctgaagcggaaggatcacaaggtcaggagttcaagaccaagctggccaacatggtgaaaccccgtctccactaaaaatacaaaaattagccgggcgtggtggcacatgcctgtaatcccagctacttgggaggctgaggcaggagaatcgcttgaactcgggaggtggaagttgcagtaagctgagatcgtgccactgcactccagcctggccaacagagcgagactccgtctcaaaaaaaaaaaaaaaaatacacatatagatatgtaaaaatacatacacatatatatgtatatacgtatatatatggccacgaggactgtgcagcctgatcaccataccagggtgtgcctgagtccaaagcctatgatcttgatggcaagaaaacggtgacgtaaaggggctgcacagtttaatgggggccccaatagcaaatatgcaaaataggcacatgaggaaaagactggaagaggctaaaacgccatcaaggtcaggctgacgggagatggatgtgattttattgttctattatggttgtatttcaatcataataaaagggaattctaacttttaaaaatgctttaccatgttaatagctaaaatgggaaatgacccaaatactcagcaacaaaggctccgtttaaaagcgtgtgtggcacgtccatccaacagagcagggcgtgattccgtcctcttcccgaaaaggcccaaagggagaggtggaactgctgtgggattttttgaggacggtcttcccgggaattttccatttctgcttttcttatttttcaatgttatcttactacctgggttacgtgtcacgagctcaggttatttctaccaccagagcctggggtggaggatacagacctcgcccactggagctgcccacagcgcctcgccggcccctcctgcctccttcgtcccgcacatccgctgctgccctgacacaccccgattccctggtgccagggagagccagggcagaggtggccctgagacgccacgcgacggggagggctagagcgtaaggaggagcgaggtgcgcattcgctgtgaccctggcgctcggcttcgcctctctgggcctcggtttccaccccgcgggagcgagtacgacaggggctgcgcgcattgccgcagtcacgcctgcaagagccgggccgggtgagccgcttccggcgctccgcgggggccccggacgatccagcaggggctccgccctgggacccccatcctgtcttggggcgtgaccttcgggggcgcacgcggtgccggccgcgcccggggaagccgggtccgcatccgagcatcaggacagcctgcggccgccccattggccggcgtgtctctgcagggccgtcccacagccaatagcggccaaggggcggagcctggccggtgccctcggagctgctggccccgggcggctgctccagtctgagcgccctccgctcgccccgagagagacccggccatgcaggagccgctgctgggagccgagggcccggactacgacaccttccccgagaagccgcccccgtcgccaggggacagggcgcgggtcgggtgagagtcgctaggttgggggctgcgggtggggcctgggggtggccctggttccctccagccggcggcaggctcccgccctgggcctcccctgacctagtcgccaccgaggggccatctggctccctcctgtcccagacacgctactcctatttaaggaactggtccccctaagggaaggaacgatccacgagagtaccgggcccagccccccactgccacagacagtgagactgaggccccagcgagcaggggttctgcctgaggtcacacagcaagcctccagccgccgccctgggggcagaaccagagcctcctcttccggagaaaaggccccagcaccagaggctcagccactgcggatgagctaacaatggcctgggaatttcccaggggagctggggctcaggccctgggaacgtgaatggccttggacccaggcctccctagcactgcccgctgagccgggcagccactgggttcagaaaaggcaatggtccctggaggagggactcagagaccctggtctttttgtccgccaccatcaccaggaccctgcagaacaaaagggtgttcctggccaccttcgccgcagtgctcggcaatttcagctttgggtatgccctggtctacacatcccctgtcatcccagccctggagcgctccttggatcctgacctgcatctgaccaaatcccaggcatcctggtttggggtaaggaccatcctctggaggagggtgggtgcaggaaggagggacctgctgagccttatctccagctaggaacctcccaaattctccaccttgggggtccctccagggccctggtcccccctcccccagccatccaggccactagtgggtggggtaaagctacaggattcctctgaaatga

SEQ ID NO: 12132 - DNA, 6000 bp, Homo sapiens
acccaggcctatctactgtctttcccactgaggtctgtgctctgagcagtctaggggcttccagggacaggcaggtgggtctgagccctgagccacgtggaaaggacgggcaggtggcctccacctgagatctgcactgcaccagccaccccccaggcccagctctagaatgacaatgccaggtctgccccatggccagtcctgcagctctcgaggcctacaccagctggggccttctcagctcacctgctcaggaggcccagtgcctgcccggggacttgcccgggcaactcactcccccagcctctgtgcagaggggaacagcagggcctgcctctcggatgctgaccctatcccatgcctcatgggcagcaaggggggcagtttctgcatggggaccactggagacactgagtagacagggccccgggcagagtcctggccacagctggggatcactgtcctggcaactgggtccagggagggtaccaggcgcctggcgggagggctggccacagcagcaggcttgcatggacagccagttgactttgcaccaagaaaagcccctgccgggtctgcgcccacattccttcagcttcttgcagtcacaggtcagtcagcaaaccttccggagcctctggtgtgggtcggaatggtagggatgggctctgcctcacacacagagagtgggccaggaaggcttcatggtcaggggtgctcagacggccgagagcctctgggatggctgaggagtctcagggacacgtgggaaagagaccccctcggcaaaggacgaggcctgcaacagcagagcagggaagtccccggcacagaccgaggggtgcagggcatggggagcccctgtgggggccagggtgagatgcccagcacctgcaggcacccctgggcctgggtgacggtggctgtctgcacacagcaggggaccaggaagcagattccagaccccagcctcctcagaacaagggccgttctctgttctcagaacaagggccggcccgaatccatcctagagcaaggactgccaggtgcgtcacagcggaccgcccagcacaggggaccaggtagcaagcgagacactgaaaccacatctggaaaaatgcccaacctcgaggaaatgtcccaagttctttataagtggagaaaggcagatggggctttaaaaatcacttggtgcagcagaacctgaggcccggcggccagcgaaggccccacggtgtgcccgatggtcaggggctgcagtggatggggacgtggaggctgcgtaggaggcaccctggaggctggacaccctggaggcctctgggcttgagctttgcacacaggtcagatgttttttacagtcagcttcaaacggtgaaggggccctactcctaggtggtctggaatgttcccacagctgcctggtggtggcccccacccaggacccagcagggtacccgccacaggacgtccccgcactcggccccgcctcagagcccccacgccccctgctttcagtcccaggggccactccaacctggccacgccaagccatggtccctgcaccgagtccagcctgctgccttgggcggtgaacagactgtgagtgtgggggaggggaggagtgtcccccaacacctcctgggggtcccacttaccctactggatgacagcagctgaggaccaaggcctggctgggccttgagctggcatcctcatgatgtctctgagcctcagcttccctcctgaaaaatggggagcatcatgctagccgccccccagcgccacagggtcatgggggctgcaagagccaagatgaactcctgcaggaaggaaaggggccttgggctcagcaccgggagtctcagccctggctgctccttagaatctactgcagagctttcaacacaggcacccctcaaatacacccacccaccaggtcactgctgacccccctctactcggaccacatctctctggggccggagccggccctggggtgttttaaggtcacctgggtctccatgagctccgtcgctgtccccgtgtgctcaccagctgtgcttacctctccacgcacttaggggtgtgctctgctctcgaaagtccccacagcagccgcaaaggaggggcctggttgggccaatgtcagcagggcctccttagctcaccctgacaatggtacccccatttctctggcagcaaacaagggggaactgacccagttcagtctcctggggtgcaacgcctaagccactctcccctcagcacccgcagggggcctctgaagaagagagggctgcaggacacgtctgcctctcccctccgcaaaccaggctctgcggccccatctcatctgcttccaggctccctggccagcttgggaacagccccattcattcggggtacccctggaaccttgccccagctcccaccacaagttgggacaggaagcccaaagtgactcctacaggggaggcctggcggcactgcaccccaattcagcttcttggggtcctagcccccaccctcccattgggtttctggagtggctggggtgccctgcacacaacctgctcttgtttctctttagtccccgcaatgcccgctgcccagggctgcctcccgacctgtaggagaaggtctccaggccctaggccagcagatgtactcctgttgtgtcaggaccccagcctcccccgactgcccacacccgctggcctgacaaagaggaatggggagcccggacaacttgtgaatgaaaaagcttctcacctacttgccaggggcctacccccttcccaggctggtggggaggtgaggcccatccccctcatccctggcttctcctcggccacagctgtccatggggtactcccggctgtgggtggtgcaggggttgggagctgggaggccgaggcctgtgcttccctcgggcctgtgcacccggccgcaccatccgtaacgcgggcttatgagcgtgcctggctgctgggtggcctgacgggtggacaccgaatgggccactctcttctctgctggtagaggatggaggcccaaggtggaggtgctgtcggcacagctggggcagaccaggggagaccccctatccagggatcccctcctcccctcccaggccgcccctccgcaaaatgctgaggactggcccccgggcctgggctacatgggccattacttctggcctggggcccacaggcagagatgccaatggaggcacacaggcagtcgcacccgcacccgatcagcaccaggcctgaggccttcgggcctccctatgccccaccccacccccacccaccaggagcagaggacgtcgtggtgggcagagtcctcagcctgggagctgcacagccccgcgcttccttctatggaaaatctgctcctccaggctgcctggctgctgttacataaacatctctgctgcctccaggcgcctcctctcctggggcgctgaccccaagatgttaccccaggcctgcagaagtgaggccagattctgggaggacgcaggcgagggaggctcccagcagcagctacaggggcgggacaggccgcctgcactggctgtttccagagtgctcagcatttggcaagaggtgtgccaggaaaggcttgctggggtcaggtgtgagatttgtcctgctttctgtgcctgcctctgccaccatgctctggggtttctgcagccctccccccaggcccccacagtcctaggtccctcccagcctttcggtctccccgcagggcaggcttagccctcctactccaggaggggcgccgggacacgcgccttctgccatcgcactcaccaccctgtgttggggtggggagggggcgctgtctgtccctggcacgaggccgtgaactttgcgcagggactatggcaggcattttggactcctggcgcttaaccaggcttggcacagggtgcccgtgcctggcatcgtggtggagaaataaatcagccggaaggagcacgtgggaagggctgcgccggcgccagcggcagatccgcccgacccgtttgtgctttctggggccaccttaggcaggcggcgcccgggcaggaggaggacggtgaccgaggagcgtgtcgacgcgggtcccccttgggggagcggggcacaatccgtccgcgaggcactggtcccggctgctccctcggggcgcccggagtcccctgcccagaggccgcggcgcccccatccctcgcggtcaagtgctcgggcaatcacggccagggatgtctggcggcgatcgatcctctggacgcctaaagccgcggccacggggccctcgggagggagtgaagccgctgggctaggggcgcacacacggctaggccactctcccagagccctgccccgggcccggggtcccccaacgtggcctcagctgctccccgcccggcccagcgcacggtgcacacggctgtccgcggcctcgccctccccattccgccccgggctcctccgcttattcacatgcaaatttcagtcgccagttgtcgccgagcgcggcaaccgccagagccggatccttccgcagccccggctcaaacttttggcctctgaaaactttcaaacgagaagtagtcccaggcgcccgctcccgacccacgccgcgccgccgggtccctcctccccggagaggctgggctcgggacgcgcggctcagctcggggaggcgcaaaggcggacggggcgtgcgggaggaggtggccgcggagggggcggggggaccggcgggggtggggccgggcggggcggggccggcgggggcggagcgcacctcgactctgagcctcactagtgcctcggccgcgggagggagcgcaagggcgcggggcgcggggcgcgggcgcgggcgcgagcgcagcgaaggaacgagccgggcgcggagccgggcccgggggcctgcgagagcacagcgccgccagccagccggggaagagagggcgggaccgtccgccgccgccccgggaccgtacgccgcgcgtgtgcgtcccagccccgccggccagcgcaggaggccgccgcccgggcgcagagggcagccggtggggaggcatgccgccgctcctggcgcccctgctctgcctggcgctgctgcccgcgctcgccgcacgaggtaggcgcccacccacccgcgagcccccactttccgcgccctttggaaactttggcggcgcccggcgcgcgcgccccacggctgggagcgggcggcggggaggccagcatggagagggaaaagcgggcggcccggggcgtggggttctggagtcccgggatcagggaggaccgaccttccccctcgatccccccgtggaggcggactcgcgccgcccgtgcctggagccgagttaggaggccggtgtggggtgctggggccccggaggccctactccgggcccgcccttcacccgccgcgcgtggggcttgccgccggtcggccgggcgggcgggctgcctactatttttcgatttgaatagagtcggttttggtttcctgttgcttctccgggccatttatcttctttcttcttcgcctctggcccacgccggggcggatgttggggcgcggagtgtgggctctgcggcgccgcgttcgccttcactgacccgcgcggccgggctgggtccccgggctcccggtcgccccgcccgccggtgccccccagcccggctctcagtttgggggaggggttgcgtaagaagccgccgcgcccggggggactgaactttccttttgctttgcggagttgaagtttggaaagcttgggggcggagagcgggacgcgggtggggggctcttacatttctccccgccgcacagcgagcggggtctctggggaatcgagtgattaatccactctttctccgagagttggaggcgagaattatctgtcctcttccagaaagtgcggctctgtgtcacacccccctcccccgtttctcagccccggtaagatggggaggg

SEQ ID NO: 12133 - DNA, 6000 bp, Homo sapiens
gggaaataggtgctctggaggtatttgggggaagggtgaaggaggagccgactgcagcccaggcccccctgcccccgcttgctggggttgggacctcggctcctctgccccagtgggatcagctgctccaagccccgccacagtcgggaggcccttggaggggctcagggagcagagcccgctgtggtgggtggggcagccttggtagtggagggggctcctgaaccgcccattctctggggcacttgcctccctcctgtgccctaggcgagataccagaggagggggcttggaggccctaggcctgattggacgccgccctcagcagtgagtaaaaagccatggggtgaggccgaggctgggggctgggccttcatccctgccttgcttgggctggcctgggccgtcccaagcctcggtcccactgaatcatcacacgcaccctgcacgaaagggaaactgaggcctagagaggcagggctgatccaaggtcacccagggtctcctcgctgggtcgggctgcctgaccctgaccctgggctcttcagccccacaccacacccctctcggactgggacccaggcaccctctgggcctccgtggtcctgtgtgagctccagccatggctgcgtcagaggccggagctctgcgtctgctctggtacttcctgccacggagcccgacttgcccgggctccctgctcctcagaggctccacttagacacaggtgtgctgggtgcgagaggccgtgcatagggcacagctgctctgggcagggaagggctactgcagtgtgggcccctcctccctgggccgtctcctcccttctgtctcctgatgcctccccgcccctgtcctctccatccacctctgtcctctgtctcccagcccagacatcatcctggcaggagaaggaccctgtggggtgtgctctgcccctcactcccaccccagcctgtgacctaagagctccggatgggacatccaaaggcgtgacctcctgttggctcctacatctggggccatatgtcccaaggtcccacgtgccctggccagcgccccttggagccctcacccgccctccctgactccctagggagagtgtggaccgccccgcctgctgcagaggtctgggcagccagcccagagggctcacctcatctatttttaagcacaaacccatgaaagattcacaggctgctttatttacaggtggtgggaatggcattgcgcccagcacacccaccaggaggccggacaacccgtcggccagggtacgctctgcccgagagccccaggcatgcccggcttggacctcagccactctgtgcaggctgaggtcccggcatagcctggcctccccgtccagcccccaagccaggctttgatgtcctccctggaaggaaggagcccctgaagggtccagcccgaggcccagctgtgccgtggctgccccctggccacacgtccccgtgtctccagctgccgagaagctctccccttccctggctcttgtcctggtgtctctccggggcaggtctttggggagaggcctagtcaggcccatgtgccccgccagcccggcagctgcctcctgtcacacactgggcacggcgagcgtcacgtctccactttacagatgaggaaaccgaggctctggtgccttggctaactcagggtttaggtttaaagccagatggactggtcttcaaagcccggctgccctgcccctgccagtccttcctgggccacacagcactggcttcatctctgcttcctggaattggagaggcttggctggtccttccgtcctcactcgctccctgagctgtgtgggctccccgggcctcagcagccggtgccaactcagctctcactgtcacctggtgtcatgcgctgtctggccgggtcccagcaaatgcccaggaggactctcagctgtccttgggtgggtacagccgcacggccaccaccggcccagcactccctgcccctggtagctgagggcatctcaagggtcagacagggcgctggccatccctacacaacagaaccaggctcccagtccctcaccacactcttgggataaacccagcagagcccatgccagccctccctgggtgagaagcactcattttagagaaaatctcttttctaggctgggcgcggtggctcacatctgtaatcccagcacttcgggaggccgaagcgggcagatcacttgaggtcaagagtttgagaccagcctggccaacatgacaaaaccctgtctctattaaaaatacaaaaattagccgggtgtggtgtcgggcgcctgtaatcccagctactcaagaggttgaggtaggagaatctcttgaacccagggggcagagcttgcagtgagccgagatcacgccactgcactccagcctgggtgacagagcgagactccgtctcaaaaaaaaaaaaagaagaagaaaatctcttttcttggcatctctgccagcccataagattctctggagctttacttctagaaacaaataatgtgttagcttcccaaatgtggcattatattaaaatacacagtacttcctcatcactccccaagtccctggcccgcctcctcttggatcttgtcggaggaaaagtggacgtttctctcaacacttctgcaaggtgcagagaagagggaggaggtgaaattaggtctcaccctcttcaggagagcagtgggcaaaaccccaccttgtctggggaggcaacagggtcaccgtgtgctgccctggcactgttcctgccagccctggcaggagtcttccggctcagagtcagcctcttttcctctgtcacgtcccggctgtctggtgttcacccttgagagcctcagttttccctctgtaaaatggggatgcctttgctactatggaaagtgtgtgctgagcacctgctatgtgccagacattggcctgagtgctggtcgcacatggtgcacaaaacagatgaggccccacgggctccattccggggggaggagaggagggagaggtgtccaacacacacacagtcacctaggggtgcaggaagatggtggccaccctggaaaggtcggtgggctgggaggtaaaggacaagaagggggctggcatgtaaagcccctggacaggcctgatggttgtgaggactggattccacagccagggtacaacctgctcgggacctgggtgcacagagcctccagctgaaggtgctgtgaagccccactcctccaggaagtccacctgggaccccagcccacacccccgcatcccccagctcccggcagcggcactcctgtctgcagggtgcacccacctcatctgccctggaagatgaaaaccccgcagccgtcagcagccacctctcagcctctcagaggcacagcagtgcagctctcagacctcccggctgcggggtgtgcagttccggctccaagcgtggaaagaggtcaagccaggccctccaagctgattccagatgaagcccatatggatctggaaggagactgggctggaaaatgctctcctgggtttcgctgtaagatgcctacaggcctaaggcaaaaggatgtgtctccactttcaagaaaagctgggaccgcctgggcaggggctgctgagcccaggcagcgagaccccacgtccttcaggaccgcagttccccattcatttgaagagcagtttctgtatttgtcattctctcagtacagtttggggggtggttacaatgttcagggaaatgttttaacagctcaactctgcatctgaaaaaagaggggccgtgctcccctgctgacccgttagagcgcagggcggccagcactcccgcaactgcagcaaacccaagagtccctatgaggagggaccccaggaaactgcttttcaatctccatctgctccctgaggtgggacgccgggtgggggccgggccaggtgactgctgcccttgtcccagctgcaccttgccctgccacgctggccgtgctgccaagcggatgtgaacgccgccacctgacacccacctcgcctgcccccggagcgtccctggtgacaaggctacttctggcacccagggtggggcaacccagccccgcccagacacacgccccagttggcctgcgcgcccccacgagtctccccgcaggggaccgagaacaccctaagagccaggctttctgccaggtggccactggtcactcgggggcggttccggcggccctttgcgtggccaccggcctggcacgggcgcatccccgctggttttacgcccttggggagctgtggttctgcgcgcgggagcctgtggctgccccggcagcggggggagggggcaccgggcggggcaggaggcccagaccatggggggcagcgccagagcccgagccaccggcaagccatgatgggggggtcccctgggaccgggagggtgggagcagagcgccagagcctcggtaacctggcagaaggctgtggggagggagcgtggaggggaggtccgggccgggtgacccagggcgggaagggggggccgtgtcggggcggggttggggacagtggcggggcggggcctggtgaggggaccgtgtcggggcgttgttggggacagtgtcggggcggggcgccgcacctagcccttccctgccgcgcgctcctcccccacgccgcgccccgccccgcccagccccgccgccctcgcaataaggggcctgagcgcgcgggggagaagcgggagcgggagcgggagcgagctggcggcgccgtcgggcgccgggccgggccatggagctgtggccgtgtctggccgcggcgctgctgttgctgctgctgctggtgcagctgagccgcgcggccgagttctacgccaaggtcgccctgtactgcgcgctgtgcttcacggtgtccgccgtggcctcgctcgtctgcctgctgcgccacggcggccggacggtggagaacatgaggcaaggccgggggccgccgggaggggccggggaaccgccgcgccgcttccgcttccctaactttcttctgggcttccctccttcctgccccgcccgtcccgccccgctccggggctccggggagagcgcgcctgggccggcggcaggcacaggagggggtcccggagtcagggggtcccggagtcacggggtcaaggagccggcgtcacagtgcccagcaccccaccccccgccctggccccgggcgtctacaccggtttcggcctccgccgcgtccctgcagcccggcgtggggttccgggggtggagcagctttcggagagaaagggggccggtccgcgctgggagaggctcagccctgcttcctgagcggggaaaccgaggccggggcggcggggacttgccccagggctattgatcagggcgcacgacggcgtgggggcacccctcggcctccctccgaccccctcctgactgtccgcccggtgatgggcgcacctgtggggcgggttcccctttctctccctttcctcttcgcagggaggtgggggacccggaggggacctgcttccgtgctggggagcgcgcccctggcctacagctccgggggcccagcttccaagcgaagggaaggaagagttaggactagggttcggcggggctgaaattttcccctggacgccttccagaaggtgggagcttggttttgccaggctggggttgggggccagaggtcagactgggctgccaaagacggcgggggctgcctgctcctgggcggggtggctgctggagaaggctcttgcctgccccctctccctgttagccgtccccaggctgttgctacatttctccctgccctgtttggactgcccagccagtggcttttgcaatggcctggggtgggggcattgtggccccagaggcccccttccccgtggttccaggggcagtgggtgagggtttgctagctccctgcactcgctgtccttgccagccctgggagggcactgaggctg

SEQ ID NO: 12134 - DNA, 6000 bp, Homo sapiens
agaggctgatggggcctcccactgtggctgagagtggggtgttggttggctggggctcagggtgaccccgcagggccatcccagcctggctggcacccaacgtgggctggtgtagaagaaggaacctggcctccaggctccaggccctggcttagagggagcggggagtctggacttcaggctggatcccttcctcttcctggagcgggtgctggcccccaacccgcttgcgtcagggacaaaaggactccttccctttccagcctggaaagcccctctgctgcaggctggaggaagggaccctgggcccagcctatagtcagcggtgtctatgggcatggatctggacggggaaaaggacaaagcagcctccatccacagttcattccgggaccaggcccttgcaggcacgcgctgggctcctgtgggaagacactaagggccccaggacagacctcctctccgggcatctgggttcctagatggcagaggtggcagagtggggtgggatggcccaattgggagctttagcttccggcaaagagctgagcacagtacatcttcaatgtgtaagattctcctgggagaccagggcccagctggtggtgagctgggggaagtgggtgatactgccgtgggaggagccacctggccctctggggaagtgcactcgctgtctgcagcgcccaggcctgggtagctgggtgggggctggggggccatctgtgctcagggtgcctgcacctgggccttctctgccctgggccaagcctgcccgagcctctctgtcctctgcctgcccagctggacatctctgggcctctctggagaccagtggggtgggctgtgggggcgtcatattgccctggcttggcatccctcttgtggctgtacccctcccagcagccccaggactagcaagtccccgagatgggggtggggacagtggttgatgccaaaggttgtgggggcaggggcggggcaggagcaggaaggtcccctgagttccctcaccttgggcagagataaaaggagcacagttccaggcggggctgagctagggcgtagctgtgatttcaggggcacctctggcggctgccgtgatttgagaatctcgggtctcttggctgactgatcctgggagactgtggatgaataatgctggtgagtgtctggccctcggggaggcccaagctggggacagctaggcaacctgggaggggaggacgggggtggcgctgagtggggcatgtcggtgtccctgagcccatgggaggggaggacgggggtggcgctgagtggggcatgtgggtgtccctgagcccatgggaggggaggacggggttggcgctgagtggggcgtgtggatgtccctgagcccaagtgacagagcctcccctccctcgtgctgctgcagggcacggccccacccggaggctgcgaggcttgggggtcctggccggggtggctctgctcgctgccctctggctcctgtggctgctggggtcagcccctcggggtaccccggcaccccagcccacgatcaccatccttgtctggcactggcccttcactgaccagcccccagagctgcccagcgacacctgcacccgctacggcatcgcccgctgccacctgagtgccaaccgaagcctgctggccagcgccgacgccgtggtcttccaccaccgcgagctgcagacccggcggtcccacctgcccctggcccagcggccgcgagggcagccctgggtgtgggcctccatggagtctcctagccacacccacggcctcagccacctccgaggcatcttcaactgggtgctgagctaccggcgcgactcggacatctttgtgccctatggccgcctggagccccactgggggccctcgccaccgctgccagccaagagcagggtggccgcctgggtggtcagcaacttccaggagcggcagctgcgtgccaggctgtaccggcagctggcgcctcatctgcgggtggatgtctttggccgtgccaatggacggccactgtgcgccagctgcctggtgcccaccgtggcccagtaccgcttctacctgtcctttgagaactctcagcaccgcgactacattacggagaaattctggcgcaacgcactggtggctggcactgtgccagtggtgctggggcccccacgggccacctatgaggccttcgtgccggctgacgccttcgtgcatgtggatgactttggctcagcccgagagctggcggctttcctcactggcatgaatgagagccgataccaacgcttctttgcctggcgtgacaggctccgcgtgcgactgttcaccgactggcgggaacgtttctgtgccatctgtgaccgctacccacacctaccccgcagccaagtctatgaggaccttgagggttggtttcaggcctgagatccgctggccgggggaggtgggtgtgggtggaagggctgggtgtcgaaatcaaaccaccaggcatccggcccttaccggcaagcagcgggctaacgggaggctgggcacagaggtcaggaagcaggggtggggggtgcaggtgggcactggagcatgcagaggaggtgagagtgggagggaggtaacgggtgcctgctgcggcagacgggaggggaaaggctgccgaggaccctccccaccctgaacaaatcttgggtgggtgaaggcctggctggaagagggtgaaaggcagggcccttggggctggggggcaccccagcctgaagtttgtgggggccaaacctgggaccccgagcttcctcggtagcagaggccctgtggtccccgagacacaggcacgggtccctgccacgtccatagttctgaggtccctgtgtgtaggctggggcggggcccaggagaccacggggagcaaaccagcttgttctgggctcagggagggagggcggtggacaataaacatctgagcagtgcctcgtgggtctggccagtgtctcatgggtcacctccgtgcagggccacagagcctgcatctgccctcccctgacatgtcgcccccacggccatggggctgcttgttccccacggggggtcctgtcgcctgacttctgggcctttgctcaccctccgcctgagagccctccctgtgccgggctgcccactggctaccccagttcctacagcctccgccagacggccccttatcagagagccttctgtgtcccccaaaaggccaaggcgatgagcccaggagttcgagaccagcctgggcagtgtagtgaaatctcatctctaccaaaaatacaagaattagcagggcgtggtggctcacgcttgtggtctcagctacttgggatactgaggtgagaggatggcttgagcccaggaggttgaagcttcagtgagccgtgatcacaccacagcactccagcctgggcaacagaatgagaccctgtctcaaaacaaaaaccaaaacaggccaaggttggggaagagtagggaacggacgtcagaggcctggccaggctgaaatcgcccatctcccaggcccgcaggctggagggtgtctggggtgacagggtctgacctgtgccttgtagctccctctggtggccagtgctggggaggcactggggatgcggctgcagccagggagcccctgtagtggacggtggagagtggggcgaggaggagagaggccaacccacgggtggtgctgaccagggccccaacaggctaagcccccggggctggggcacagggcttgtccctaccccaggtaggggtgggcaggttgagggcaggaagcccccctcacccatggctgtggcttgtgggaaagacctgctggtagcttcctgccctgacccagccctgtggactgagcagagaaaagcaagtgccttgaggctgcgggctggggtgggaagctgatccctcactcactagcccagggtcaccttcctgctgcaaaggagctgggaggagtggggagctgtggcctcggaggtcttcattcacttgaggatgcgccttctatgtgcgccctgacactggacaccacacagcgctactccaccccattcacaggggggaaactgagtctgggaagcgccgtcagagccacccatggggtcagcctgtcctctgtcgctctctacaggccacgcggaggaactgccccacctcccggggcgccccagcaggtgccaagccacagccgcagaaccgcctgatcccgaactccctgtgcagagaccagactcgcccgaatatggggagaaaaacgagccgcgtgcagcaggggccgcctcggtcccctgcctgctccgctcacggcgagcgttcctggggcctcgagtttccccccttccgctggctgctcggaatcgcgggacggacccacctggccgccctgcctcccttccaggtgggcaccacctggactccaagtgctggtttacaaagcacacaggagacccttacgggggtgagctggcccctcgccagcgtccgctcggcgcgccccggggacagtgaaggcttggggcgcctctgcagagtcgccagcgcggtgggcgcagccggatgcctctgggagaagagcgcagcgcccgagggtcccccggcctacgaaggctaagccggggtctcggattcgatgtgggcgcgtcgcgtgacgcccggcgaggggcggcccggaggcttcccggcggcggcgcgcgcagggtctcgggcccgggtcggtcccgggcgcggcgcgggcggcgggcgcctcctggcgggcgcggacggagcgcggcgcctttaagcgggggcgggcggggcgcgggcagagtcgctgtcgccgcggccgccggggcggagccagcgcggatcgggtcccggacgcccgagcgccccgcccccgcgcgggcgatgcccagcggcgcggcgggctgcggggcccggcggggcgcgcagaggagcgggccgcggcgctgaggcggcggagcgtggccccgccatgggcttcctgcaccagctgcagctgctgctctggaagaacgtgacgctcaaacgccggagcccggtgagcccaccccacgcgcccgccctcagcccgaggccgcgcgcaccgcggccagaggcgcgctccccgcgcgcacgtgcggacggccgggcgcgcgcagaccccggcgggcgctgggggcggcgcgggcccgagccccctccccgccgggccctgccctcgcctgccggcgctgcggcctccggggaggtggctcggtcgtgtccagtccggtcccgcgtccgctgacatcgcggtgctcggctgagtcacggcacccgcgccctctgcagcgcgctcgctggggccgctgtgggcggggggcaagcggcgctcaggactctggctcgagggaggccctggttcccaggacagaaggcaggcctggggggctccattcagctgcgaggctccatggtccttgggcccagcctccctggggtcccggaggagaccctgtcccttccctccgtccacccctcccctgcccttgggccgcggcctgccatagaggttggtcccaggcatctctccgcctcccctcctggcacatccgtgacccttgctcatgctctcgccactgggaatgtccttgtgccagccttggccagcctgaatctctgcacccatttgtcctttggggtcagttctccccgagcctgatccactctgttgcctcctggtccccccacctgctctgggggctgggtctactgtttggagctgtgaaccccggctttcccagcactgcctgggcagccagtggacctgagggtgcaggacacatggctgtcagggacagaagtccttcgtggagcgaggggcttggggatatgggtgtcctgccatacccccagctggccagcttggctccagcctgggaagggaagggacacctcccaggccacaggcctggaccagcttaggtttctgaaggcccttgggattgtcca

SEQ ID NO: 12135 - DNA, 6000 bp, Homo sapiens
gtccgatgttcgagggcaggaagcgtccagcacaggagaaagatgtaggctgggaggcgaggcctgtcgtctccttttcacgtttttctggttgacattcgctggcagctgattagatggtgcccaccagatgaagggtgggtctgccttccgcagcccactgactctagtgttaatctcttttggcaacaccctctcagacacacccagcatcaatactttgtatccttcaatccaattaaattgacagtattaaccatcacacctggcatggggaagataaggcccactgggcaccgtccctggagaaagggtgggccaggcaggctgggggaaaattgttcacccctgctgggggagactggcttgacctaagcaacatgttttgggggccacagcccacccagaccaggaagcccccttgcctctcacctctcactcctcacctgtgaccttgggctggccctcagctgggagccccatgtccctctgggcactgctgtgatggggcagggtgtgatgggagcctgtgtgtgggccctggtgtgatgggtgcctgcgtgcatggggcagggtggacgctgagcccacgtggcacgcccacgcccaccatccttcactctaagccattagccacagggaaagcgggtgggtgcagggaggcccgagcgtcactcaagggcgcagggcagcgtctggcccaaggccagcgtgtcactggctgggaggttcccctggagctccacgttcagtccctcaggtcacaatacacacctatcctgctggcctgacgcaggggcccaagagcctcctagtgtgtcccatcttcttcttgttctgggtgtccccaacctgtcctcagggtccctgctgcccattctcttaggtattggcaaggaaggactccctcccagagcagctgtgtgagaagggagctggtgggcctgagctggggaagggttggcagggggctaggtcctccggtgggggcataggcccccatgcagcctagcaccctgctccccactcgcctttttggaattgttttttttttttttgagacagattctcactctgtcagccaggctggagtgcagtgatatgatcttggctctctgcaacctccatctcccaggttcaagtgattctcctgcctcagcctcccgagtatttgggattacatacaggtgcctgccaccacgcccagctatttttagtggagatggggtttcaccatgttgaccaggctggtctcgaactcctgacctcaggtgatccacccgccttggcctcccaaagtgggattacaggcataagccaccacaccagctttttggctttcattggcccctggccaattcagacagaaggccttcaactttgtccaagctcctgcccccacccatcaggagcccccttgctcccataggccccaggctgtgggtgagctgccctggggcccccagggactctggagaccccaatcctgggcttggggcctggctcagccttgcctgggggcccattactcaattcctttccactttaccttctgctgttcctgtccctgtcccaagggccctggcggcagtaagaggcagatttcaccttggtttctggctcaactctgagccctgagccggcctgagcctgctgaccctggcccggcagcctagcgccccctccaccagttcccacttgaggaagcccagcggggcactgatgtgcatcttccagcctcggctacctccctgcttggtgccctgcccacacctggtgacctcctgagcacagatgcccaagagtgacatgcccagaccctggcggagacgctggggtggcactcatctgtgcagagatgcccccaacccagcaagatgctggggcaggaccatgcttgacccagaatgtggggcgtgtgatcccctagccaacatcctaggaagcaaggacatccccagcttctggccctgggaggcgatcttgttccccaccctgggtggctgggtgggccggccccgggttcagagtccctggctgcagccctcccctacagccacacaacacagaggagcgggtcccggcaaaacttggggtgcagagtgggtccctggaggaccagagccccacccagcagctccacctggaggagaacaaggacagacgtgatccccccacgccttggggctcaatgggatgagagttggaggggaggggctgagctcacccactgcaccaccctgtgctgcccctcgaccaatccctccacttgggggtccccttggccacctgccaggctccgtgcacccacccagctttcccaaggcgaggtccgaggggctctccagcccccagctccacctgttactgagaataagggcagtcttccttgttgccggagccatgtagctttgcagcatgccgccagggagcgctcgagacacgcatctggactgccttgctcaagccaacccatgaagcaggtggggctcaggaagacagccaggctcagcccgctccctgagacgcccctggggctggggctgggtgcccctcaccttgctgctgccccgggtgccgctgtctgcagggggcagctggccaatggtctgctcttggtctggagtggggcccactgggttgaggcctcttcagtgggcatccaccgggaagctggcccacagtgaaggctcagcggggaagagcttgtgtcctgatcatcacgatgctcacacaccacggagctggggttggctgcctgcctgggtccgcacaaacccagggagtcaggaggcctgggtggggtgagatgagggggagcccctgccccccgactttctctttgactcatgcccttttctttcctctgagaggctttcgttctgacccatttctgggcaaaacccccgagccccgtttgccagctcgcaggttcccacgcacgattgggccccatggcagccaccctgcccagggtcctcaaggagcaagctaggggcggagggtgggggaggctccttcaaatccacccagggagggagcaggctgtggctgcggctgaggtcggtggcaagggaccctgccagcctggcagcacaaacaggaaggatggcaggctctggcaccagaggccgggtcacccgcaggcgtggcaggacagcctccttcctgcaggaactgccgccgggtgtctgtttcaaggagaagagatggggtggtgtgaggctgaagccaaggtgtggctccccgggggccccctgccagaggaggaacgctggggtgggattaaaggcccaggtgccactgtggtcatcaccgaaaacatgggaggctggaaaggcggggctggaggcagctgcccactctggtgccagcccctaagccaagcagctcaggcactgacagtttcccgtggcgcccacaggcacccctccctccaaacccccctccctccaagctcccctccaagctcccctccctccagccccctccctccaaacccccctctctccagcccccctcccaagccccctccctccaagtccccctccctccagcccccctccctccagccgttgcacaagttccgcagcaaagctcagctcagaggctacactgcgccacaggggtgggggcctctgactaccaccctgtcccagtcttgcctctgtccccacagtgggatcctcccacttcagtctccagctgcctggttcccctcccaaggcagccttgtcctcactgtggggccggggagaggccagcagcccctggggcccaaaagtagaacaggacagggacaggggtggtgggaggcaggccccctctgagggtgctggggcaaaggtctggacaacagttcatggttgccattcctcccaggacacacgatctgagcccccaaaagacctgacaggacagacgcgtcctcattcccagcatcccagcattttgggaggccgaggtgggaggactgcttgagccaggagtttgaaactagcctggacaacataacaagactctgcctctacaaaaaattttaaaaaattaaccaggcatggtagtgcacacccatagacccagctccttgggaggctgaggtgggagcattgcttgagcccaggaggttgaggctgcagcaaaccgtgactgcgccactgcactccagcctgggcaacagagcaagaccctgtctcaaaaaacaaaaaacaaaaacccacacacaaaaaagcaaacttggctgggcgcggtggctcatgcctgtaatcccaacactttgggaggctgaaacttgtggatcacctgaagtcaggagtttgagaccagcctggccaacatgggaaaaccccatctctactaaaaatacaaaaattagctgggcgtggtggcaggcacccataatcccagctacttgggaggctgagacaggagaatcacttgaacccggaaggtggaggttgcagtgagccaagatcgcaccacttgatcctgacttcaggtgatccacaagccttggcctcccaaaatgctgggattacagcctgggcgatagtgcaagactccctctcaaaaaacaaacaaacaaacaaacaaacaaaccaagcctgacctgcattgagatctccaggacgtctgggtctggccacgcctgggaccacacaaggtcccgtgcagcagagtggcaacgtggttgggtgaagaggctgatggggcctcccactgtggctgagagtggggtgttggttggctggggctcagggtgaccccgcagggccatcccagcctggctggcacccaacgtgggctggtgtagaagaaggaacctggcctccaggctccaggccctggcttagagggagcggggagtctggacttcaggctggatcccttcctcttcctggagcgggtgctggcccccaacccgcttgcgtcagggacaaaaggactccttccctttccagcctggaaagcccctctgctgcaggctggaggaagggaccctgggcccagcctatagtcagcggtgtctatgggcatggatctggacggggaaaaggacaaagcagcctccatccacagttcattccgggaccaggcccttgcaggcacgcgctgggctcctgtgggaagacactaagggccccaggacagacctcctctccgggcatctgggttcctagatggcagaggtggcagagtggggtgggatggcccaattgggagctttagcttccggcaaagagctgagcacagtacatcttcaatgtgtaagattctcctgggagaccagggcccagctggtggtgagctgggggaagtgggtgatactgccgtgggaggagccacctggccctctggggaagtgcactcgctgtctgcagcgcccaggcctgggtagctgggtgggggctggggggccatctgtgctcagggtgcctgcacctgggccttctctgccctgggccaagcctgcccgagcctctctgtcctctgcctgcccagctggacatctctgggcctctctggagaccagtggggtgggctgtgggggcgtcatattgccctggcttggcatccctcttgtggctgtacccctcccagcagccccaggactagcaagtccccgagatgggggtggggacagtggttgatgccaaaggttgtgggggcaggggcggggcaggagcaggaaggtcccctgagttccctcaccttgggcagagataaaaggagcacagttccaggcggggctgagctagggcgtagctgtgatttcaggggcacctctggcggctgccgtgatttgagaatctcgggtctcttggctgactgatcctgggagactgtggatgaataatgctggtgagtgtctggccctcggggaggcccaagctggggacagctaggcaacctgggaggggaggacgggggtggcgctgagtggggcatgtcggtgtccctgagcccatgggaggggaggacgggggtggcgctgagtgg

SEQ ID NO: 12136 - DNA, 6000 bp, Homo sapiens
aaccagtccagctgaggacagagccagcgaggtccagctgcatctctacggccagcactaccgagtctacacccacagcttcctctgctatggccgtgaccaggtcctccagaggctgctggccagcgccctccaggtgcccctccaccctggctcacctgcactgcactgttccctcctggagcagagcctggacagccactgtgctgtggaaggcttctccaggctgggctttaattggctggaaagacaggtgggagggtcagagcatgagcaaaggcccagtggctgggctgggcctggagaagggagggccagggacggctctcagagggagcctggtcaggggcgttgggatctgtcaagcaggcagtggggagccatggattgcccctgagcacaaaagtgaagttgccagagtgagacctgtgggaggtttgtcaggctggtcctctggagcggtggtggtgccaccctgtcacgctggtgattcccccagacccacggcttccacccctgctggccgaggggcttttccacccaagtgctgctcggggatgtgtaccagtcaccatgcaccatggcccagcggccccagaacttcaacagcagtgccagggtcagcctgtcagggagcagtgacccccacctctgccgagatctggtttctgggctcttcagcttctcctcctgccccttctcccgatgctctttcaatggggtcttccagcccccagtggctgggaactttgtggtgagtaggggcaggcgggtggctgggaactttgtcgtgggtagggacaggcgggtggctgggaactttgtcgtgggtagggacaggcgggtggctgggaactttgtcgtgggtagggacaggcgggtggctgggaactttgtcgtgagtagggataggcgggtggctgggaactttgtcgtgggtaagggcaggcgggtggctgggaactttgtcgtgagtagggacaggcgggtggcagcaggtgctctgagccgctggggttcggtcacagtgtgactgcgccccctacaggccttctctgccttcttctacactgtggactttttgcggacttcgatggggctgcccgtggccaccctgcagcagctggaggcagccgcagtgaatgtctgcaaccagacctgggctcaggtgagccccgctcccactccttcagggctgtgcggaagggctcagcctccgcctccgcatgcctccccagccctgcatggacaggcctctcggagcacccgctgcagtgggggcgatggcaggcattaggctgactccagaggtggcgtggctgtggccggtaggctgtgaacaagtcgggcgggttggagaagcttcgccaggcccgaccctcatcccagatctggagggcagggggaggccggtgcccaggtttctggcttctgccactggttccctccatggtaccacacaagggaagatggaagtgggtctgggcaccgggagtgtgcccaccggagactccaagagaaacgtacgagtcgtcccaggaccggggtggtgagcgaggccccattttgtcctcccagggcctagtctcagacagactggggtgagggaggtggggacaggcggcgagccagcgggcagactcaggcctggagctcgtcctgttcccctggccacacaccaaggtgttgctgcctcctgctccctggtggccatgcctgctgtccctcctcactggccttccaggcatgggcgctggctggggagggatggaagcgtgccctgccgggggtgcccctcggactcggtcttgccattcgtgtccgggcctgtgtggtggtctctggcctcgcacggcccgtgtgtgtctggggaggggtgaagcacgccgccggccccctctccccgtggggccgagacctcctggtggtcgcctgcctgacggtgtcccgcccgcgtcccagctgcaagctcgggtgccagggcaacgggcccgcctggccgactactgcgccggggccatgttcgtgcagcagctgctgagtcgcggctacggcttcgacgagcgcgccttcggcggcgtgatcttccagaagaaggtgggctggggcggggcggggcggggccgaccttgcggggcggggcctctcgggagctgaggccacgcccttccccgcaggccgcggacactgcagtgggctgggcgctcggctacatgctgaacctgaccaacctgatccccgccgacccgccggggctgcgcaagggcacagacttcagctcctgggtcgtcctcctgctgctcttcgcctccgcgctcctggctgcgcttgtcctgctgctgcgtcaggtgcactccgccaagctgccaagcaccatttaggggccgacgggggcagctgccccatccctcccccaacccctgtatccccaccccgtactcccacccctcccacaacccctgtacctcccacccctgtatccccacccctccacccacccctctcccaacctctctccccgcccctgtatcctgcattcctccacccaccctctatcccccaccgctccaccccaccactgtcttctccatccttccaccccaccctcagcgtctctgcccctaaggcagcccaggaaataggaactgagactctggtacccacaggagcctgggtgggcaaagagcgctcaatccagctccttgaacccctccagcccgcttcagcctgggcatcactgcaggccccgtgctcctcctcctcctcctcagggctgggtctccagagagtggggccttggtcctgagaatcagcccttagaggctccttctgtgtagtctgggtctgtactggggagggtcacagcccacgggctggcagccagcccagcacctacttgtaaaaattttgtaataaaaagtttttcctagagacgtgaaaggagagtgtctgtggggtggggcatccttgctgtggcctgtgcccccaccttcccgctgttctagccgcacgggcctgcccttggtcctgagggtggacaccatccctccctactgccttctgctctggagccaggcctggggcactggctgctgccctggtgtgccgtggcagcctagagtagctgcaggatggctggcccgagggaatgttcctgggcccttgagtcttctctggccagcagagttccccaaaaccatcacatccagatctgcgttggtgaccaaggccagactgaaggttgggtcctggtacagtgagcctgggggtgagggtagaggtcagggaggtggcggagagtgggtggcagccagccaggcggcttcctagggggcagtcagtgctggtagagactggcgggagggcaggcccacatcaggaggtggcacaggggtgggagatgagatcaggaccaggacccataggcaggaatcttgcacagaacctggctgtggagctgagccatgcaatggcacagggcaccttgcccttctcacctgggactgagtgtcctgcacctccaaaaggcatcctgcagccccagccaggccctgcagcccctccccaagccagttttctccaggatgggaaggcctggtcttgcccactcgcctcctcaccttcctgggaagtgagcttagacactgtctctatgctcagtgccctggcgaggagggtggtggttcttattctgctcttccctcccctcttcaccatttttttttaaagtcatttgataaacctgagggcagccagccccagctttggagttctgagactggaaggaccaaggggacaccccgggttggaggtctcactcttgttctctgaatgactagtcaaaggaggtttctagtgggatggggtgggcgtgctcttgggaggcaacaggtgaggtgcaaggggggcatcagagatgcccgttgtcagctgggcacagtggctcacgcctgtaatcccagcactttgggaggctgaggctggcgtatcacctgaggtcaggagttcaagaccagctgaggcaacatggtgaaaccccgtctgtactaagaatacaaaaattagcccagcatggtggcacgcgcctgtaatcccagctactcaggaggcagaggcacgagaatcacttgaacccgagaggtggaggttgcagtgggccgaaatggcaccactgcactccaggctaggcgacagagacgctgtctcaaagaaaaaaaaaaaaaaagatgcccattgtcctgagggagctaaagggctgtcacctggggaccctgaacaccttggacagctcccagctccggtcctcagtggctccggatcactcttgccccctggtggcctcactgagcgcggccgccgcggctccagccaaagctgcagtcggggccggggccgttctgtgttcctgtatttgcttttcccgcgagtgggggtgcccctgcctctgtgggcacacctgtgccttcctgtgcacctgcccagctcgtgagcacctgtctgcgtgcgcccggcgctcctgtgtctctgtgcgctcgcgaggctaggcccacacaggtcctctgccccatcgcgggtgcgggtgaggggctcggagtcctaccgggaagaggccagaagggagcgcatcctggagaagcccacccgcggcccaaacccagccggacttctgggaaccgcaccggccccagagaccgcaggtgccgagacaccctgaggccgagagaggtccagcgaggcccggagaggggaccagaactggagcagggggagggggcgcagtctggagccgccctcccgccccctcaggtggagcgcgcaggcgcagtctccgcgtgcgcgcctcgccggcgcctccatcccggatccttgctgcagcgtcagcgccgccgcccgtgcctttcctcttcctcctcctcctccttggcatccgcctcttcttcctcctgcgtcctcccccgctgcctccgctgctcccgacgcggagcccggagcccgcgccgagcccctggcctcgcggtgccatgctgccccggcggcggcgctgaaggatggcgacgccgctgcctccgccctccccgcggcacctgcggctgctgcggctgctgctctccggcctcgtcctcggcgccgccctgcgtggagccgccgccggccacccgggtgagcgagcgcgctgggcgcaggccgcggggcgccccggggccgggatcgccgggcggggaccgggttgccgggcgccgccgccctcgtcctgcccaggcccgcaggccctgcaggcctggtccgctggtggcgggggccccgcctcgcccacgatggaataaacaggcctggccggagggcgcagcgcggagcctccaaaaggccgcgccggatggggcttctgccggttcccagaggcgtaccttacattcatggcttcttccgccgggagcgcgtctggctcaggcctccgcgccgcggccatctggctctgggcgggcccgccgggagtctgcctgtgtgcgtctctgtgtctccgtgttcggggctcctgcgggtgtggggctggccctgagtgcccgccggcttcgctgccggtgcgcgtcccggggtcggggcctcagtgctgctctgcctgtcctcacgccttgggtggcgctgggcaccggccttgtgcgccatggtgggcgctgaagttctgggggcacttatggcgcaggctcggggtgctgttctagcttcaataggagggagactgttgcagcctcagagcctccgcctgcatcccctgccctcgagggcactggcattctgtctttgggactgagggctgcaggtggactccggaggagggtgataagcccagggtcctgggacaccctctcacctgcacagatgggtcctgagggtccagagagcagagctccctgcaggaacccaggatgcaaagctgacgtttttctggggggactgaactgggagactttgcgactgcattcgtacagtactcctggcagc

SEQ ID NO: 12137 - DNA, 6000 bp, Homo sapiens
aggggaggggagagactgttaccaaaacaccaggggttcagtccaggtcctgctgttcgctgcacagaaagccaatcacggagaccaggagcaccgccagggggaaggctttaagccggccgcagccaaggagatgggtgctcagtctcaaatccgtctccctgacccactgaaattaggggtttatagagcagggaagccacgtaactaggtgtgagaaaacaggaattaggggcagctgaagaagaggagttggtcaacaggaagctggtggttggccaggcaatcttgacagctggggggtctggtgtctcattgtcaagataccgtgatctggtgagttttagctctttcattctatctgggggcctcatggttggttttctgagaaaggaactcaaataggacaaatgtcactttctcaaattttaagactaggaggatcaatttctgtgtttattcaaagaaaccataaacatcagttccacgggacaattgagccggtttcaaaatcaaagaaggccaaagccaggcagggtgtggcacacacctctagtccccagctactcaggaggactgcttgaggccaggaatttaccagcctgggcaacatagtgaggccccggtctccaataaaaggagatggggggctgggtttggtggctcacgcctataatctcagcactttgagaggccaaggcaggtggatcacttgaggtcaggagttcgagatcagcctggccaacatggcaaaaccccgtctctactaaacatacaaaaattaggctgggcacggtggctcatgcctgtaatcctagcactttgggaggccgagatgggcggatgctcaggagtttgagaccagcctgggagcaacacagtgagaccccgtctctattagaatgcaaaaaaattagcctggtggcacacggctgtagtcccagctatttgggaggctgagtcagaagaattgcttgaaccaggaggcggagattgcagtgagccgagatcacatcactgcactccagcctgggcaacagaggaagagtctgtctcaaagtaaataaataaaataagataaaatgaaataaaatgctcacagtgccagctagagccatcgttcagaaaagaatttggcacttgctagagaagcagaacacacacttgcctgacaaccagcagttcagatccgggatgctccccagagaagtgctctcaagagcacacatgcggccggcgcagcggctcacacctgtcaccccagcactgtgggaggccgacgcagacggagaggccgggcgcggtggctcacacctgtcatcccagcactgtgggaggccgaggcaggcgggtcgcctgaggtcaggagtttgagaccagcctggccaatatggtgaaaccctgtctctactaaaaatacaaaattagtggggaatggttataggcgcctgtaatccgagttgctcaggaggctgaggcgggaaatcgcttgaacccaggaggtggaggttgcagtgagctgagatcgcgccactgcactccagcctgagcgatagggccagactccacctcagataaaaaataaaattaaaaaaaagagtgtatatgtgcagagcagcaatctcagcaaagcctaaagccagacactgtgtgttcaccagctgcagcgacacgccgtctgcatgttctcactcacaggatggaatacagcaaggaacaaacaagccacacctctcagtgtcaacagggtgaatcccaaacgcgtaacgtgagtgaaagaagcaagtcccagaacagcacgtccagcacatcagagaccaccaatggggtcctgctgccaccctggcattgctcttaccaactgtgcatatgtgcacctcccattctgttgtgtctccgacctcgaacaggacagcacaggcttccccgcctcccgtgggcctttgcaaagtctgctctccccaggccagtgggtgccctccccacagggctccctgtgcatgcatggagcctggcgtgctttgggcacccaggagtactactcagcaagcgtttgttgaatgacttaatgagcacctgcagaaagggagcagtgagtgaaaggcctttcacaattaaaccatcaaggtgtttcggccacagcacaagtttcttttttttttttcttttgagatggaatctcgctctgtcgtccaggctggagtgcagtggtgcagtctcagctcactgcaacctctgcctcccaggttcaagcgattctcttgcctcagcctcccaaatagctggaattacaggtgtctgccactacagccgactaattttttttttttttttgactcgctctgtcacccaggctggagtgcagtggcgcgatcttggctcactgcaagctccgcctcccgggttcacaccattctcctgcttcagcttcccgagtagctgggactacaggtgcccgccaccacgcccggctaattttttgtatttttagtagagatggcatttcactgcgttagccaggatggtcttgatctcctgacctgatgatccgcccgcctcagccttccaaagtgctgggattacaggagtgagccaccgcgcccggcccacaaccggctaatttttgtatttctattagagacggcgtttcaccatgttggccaggctggtcttgaactcctgaccttaagtgatccacctgcctcagcttcccaaagtgctggaattacagacgtgagccacacagcacaagcttctgatgtggagactgaggcagggcagccaagatgtcagcaggcctcaggaaagcccccctccctgggaggtctgagccctgcgtgggcgggaggctccgagttccctcccccaggggttctcccctaacctctctgcatccgcatgttcccagctcagccggggtcatgtgcagcacatctggaggccccatccccgagagggtcctggaagccgagagctgccccacccagaggcccctccaccccttcagctcctgccagcttccctctgacgctctcccaagtctgccttccagggtccctgagtccatgccaggaaggggcgttcccccgccctcactccgtctcaaagagagctcagcctcagcctttgtcctggccgctctgggctccctgcctctccctccgcaggcgaagctgggcactcggccatgagcctgtctccccggggcagagtccagctcccctctccctccccatcctctcaggcctggcagacctcccactccctggcttgagctttttgtccatgaaaagagtccagaacaccaggaagccccgctgggcctggagggaagcggggtaccgcaggccagtgggggtcgcagcaccctgcctctgggcggcctttgttccttccttttcaggcatgatgtgcactgtgcgtgcctctccctcctctgggcggtcaggggtggaagaaaggcctggggtgtgtggggggaaactggggcctggggcctggagcttagcaccggcaacacccagagattgcctgctggagccccgccaggctgggctgtgaggctgaggcagcagagaggcttcccagggttcccacccctccctttggggtcctgagctggaagaaagatgcctttactgggcctgtggcgccagaccctcagcccaggcagcaatcccagcacaattgtcactgcccgttccagaaggccgggcatggtctggaccctgccccatggggctgccctttgggccccagcagcctgcactccctggtggccttgcctcgtggctccctgacgctgtgtggctggaattattgggacaagaattcccactttgcagcaggcgcaaagggggtggcccctggccgggctgggatgcggggcctgtgaggctgcagagccgaaaggccagccatgtcgtgggacggaggagcagggcttgcgtctggggccagctgcgcttcgcctgccccagccgtccccagaagcctgttgctgacccgcaccccaagcttggcctggggaccctcttccttgcctttcaggccacgtagaggccccacctgtttccgtcctggggaagcctcctctggcctccgcagcccaagcctctgttcccctcaggccgagggggcagcaggcgcggctgaggccctgggctgggaggtatggacctttggcccggtctgtgctgcttctcctgtttctcggctcggtgtgacctgggccgtccctccccttccccgttcctgcgtcctcaccttcacctcagtacagggcccaggtgaggtggatctgactgggcctcaagggtagttctggcctgggtcagctgcgtgtctctggagctgacctgcgctggctcagcgccgcaggctggcggatccttgctggccgggagggcatcccgcaggccagcctggtcctcaccagccctgggagttggcgctcagggccctgctccacaaacaggtgctgaccctcggcttcctcctgagtccccagcccgggccccgcgtggctccgcagccgacagtgcctcattcctgcaagcgagtctggcctcctttcccgggcccgggaaaagcgcggctctccagcacaggaccctccgagccagcctcgcccgcccacccccacgccaggtctcctgcctccacggccgggggatccccttgctgagtgggcgggaaggggaaggtgggccatagccgcggggcgcccgggctcagacccgggagccggggggcggtgctggtgactcagccgcgcccgcgtctctcacctgcgcgggccggacggcggaagcttgggagcggaggcgaaacctgtccgcccgtgggcgtggccggtgatgggcgggcccgcccggcctcccgcccctcgtcccgccccggggcccctaccccgcggtcccgcggccccgcccgcctccgcctccggctccccgcactctccgggtccacgcatcgtcctcccgcgcgcccgcccgcccatggccgggaaggtgcggtcactgctgccgccgctgctgctggccgccgcgggcctcgccggcctcctactgctgtgcgtccccacccgcgacgtccgggagccgcccgccctcaaggtgcgcgcccgggcacccagcgcacgtctggggagcagcgggccgggcttggagccggggagggggtgcggctgggaacctgagcaggatcagcccgggacccccaccgtgctctgctcctggcgggctgggtggggtcccgggttccgcgctctgcgctccccgaccgggtacgcggagggggcggggggcggtggcgcttccagggcgacgcggtgctgaaggaacaagtcccgggagttccgcgcccgccgccgagtccgtcaacgcagcccaggggctgtgtccccgctcccgggatagcccagcgatgccccctgggtgctgccggacgcccgcccccaggcctgtgcgggcccccaggggcactccgggccacttctgccctgtgccgccgccccggagggtgcggttagagccacatcgactgggtattcagcccagatggggatccacaagccccaggacccagggcccccgccaggacacgagagtggcccagaaagacaggagggcttgaccggagcagccctggccggtcctcaaaaggttggagcaggctagcctggatctccactccagcaggcccagggacctcctggtcggcccctttaaccctttattgggcttgtaggggggtggggtggagagccaagtcccccagcctgatggggagtcagaagcagggagctctgcggccctgcaggacggccatgtggcggtgcacgcgctgacctgttgatgctctgggctctggggaagccttggtcgggatggactggtgcggccctctcggaggctggaattggcgcccgggcctgggaggctggtccccagctttccaggtggatccaggatgctggggcaggagctggaaaagggc

SEQ ID NO: 12138 - DNA, 6000 bp, Homo sapiens
accattatttctgtgctaagaaactctacaggtaataaaaatgaacttatttgtgtgttataggtggagagtcaggaattggggtaggaggtggctagatgagggaaagatgactatcttttgaggcgtacttattatgtgccaaggtttaggcatagaccagggaaaaatagagaagtattctttttatattagcagatgttccagtaacccattttatggatgcgaaaacagaacctacaagaggctaagtaatttgcccaaactttgtaactagaatacaaaaccaagtttgtatgcattccagtgttctttgtactgtactatgctgcctgtaaatctctgtcaacaaggaaaatctctataaatcccagccactgttcctcaaaggttattcattatctttccttcaaagtggggactggggctatgtcaatgcagagtaatattctttaactttttatgttaagataatggtagatccacatgcagttgtaagaactcatatggtaagattttgcatatcctttcaataatttttttaaatctgctatcatactagacccccttcttagtgctggggccacagagacaagatcatcctttcccttaaagacttcagaggagatgaggaacatgtaaataaatcattaatatagagttggttaaagcaaaaacgtaatgcaactttcacctatccattaaccaataagaacaataataataataataatgacattctgaccaagctactgtaaaacagacactcaacttgtatctgttttctcacctgtaaaatagaataatagtacctatactataggattggtgtaaacattaacagaacagtatctggacattctatttactatttaatattgtatcaattgttggtattctggtttctatttttaaatttttctacaatgcacttatgtaacttttagagaaaaaaatttaatcactcttagttaaaacaagtgtctcatgttgtaagctagtagtatatactatcttaattgaggacactgagatgggacagctgattcaccttggagaaacacagcgatgtcagacaagaatcactgaaagagaaagacaatgtctgaggtgacttttggaagccaaagatttaagaagaaggttggaagagaattcaagataaatggattatcaagcaaagacttagaatcttagtaatttaaagacaagaaggggacatgaaggtcatccagtcctactttccaccctctgcaggtctcccttgcagcctgctcgactgattcttaaatgcattcagaaagagggtgctttcccatggaatactatgcagccataaaaaggaataagattatgtcctttgcagggacatggatgaagctggaagccatcatccttagcaacctaagacaggaatagaaaaccaaacaccacatgttctcactcataattgggagctgaacaatgagaacacatggacacagggaggggaacgacacacaccgtggccagtcagaatgaggggtgaggggagggagagcattaggacaaatagctaatgcatgcagggcttaaaacttagatgacgggttgataggtgcagcaaaccaccatggcacatgtatacccatgtaacaatcctacacgttctgcacttgtatcctggaacttaaggtaaaattaaattaaaaaaaagaaagagggtgttttccacattatgggtcaaccattgttggacagttttattagaaacagtctatatatgtgtatactcatctaatgttgcacttacatgcatatacatcagggcaaaatccaagcaactactcataccgggggtgtaagagtcacttaagtggggtctacccaggtaatattcctcaatctactgtatggatgtggtgtttgtgcttagcttctagatgccatacaaacattactaactccatagtttttaagtgttgaaagtctggataagtggtagtacatgggttgggcatggtggcttacacctgtaatcccagcattttgggagaccaaggtgggtggatcacctgagatcaggagttcgggaccagcctggccaacatgacaaaaccccatctctactaaaattacaaaaattagccaggcatgctggcgggcgcctgtaatcccagctagtcaggaggctgaagcagaagaattgcttgaacccaggaggcggagattgcagtgagccgagatcacgccactgcactccagcctgggcaacacagtgagactctgtctcaaaaaaaaaaaaaaaaagtagtatattatttcaattgaaaaagaagaagataaaaatatgaaaatggtgatatttttactttttttttttttgtcgagaccaagtctcactctgtcacccaggctggagtatagcagcatgatctcagctcactgcaacttctgtctcccgggttcaaacaattcttgtgtgtcagcctcctgagtaactgggattacaggcacccgccaacatgcccagcccggctaatttttgtatttttagtagagatggggtttcaccaagttggccaggctggtctcaaactccttacctcgagtgatccacctacctcggcctcccaaagtgctaggattacaggcgtgagccaccacacccagtctttactttttataatagtataattggttctgaagagaaaaggtgaatttatgcaacatgcaaaatctattatggcagtactcagcacaatataaagaaaagatagacttggaaagcaattaagtgtgtggctagcaaaacaacatcaatattgtataccaaaaagggaacgctagaaatacatttaggaacttaaaggctaagcctggtaagaagctttaccataagcttgtaggtctgaggcctattgcaagctaaacaacatcagtgaatgccacactagcagatgcagacctcataacgttacccgtctcaacaactttgaagcatagttaaaactcaactaagtgacaaagatagtaccacaaatcagtgaggaaatgatggattatgcaattaatgtgttgaaacatctggataaaagcttggaaaataaagttaggcccctacttcactctttacatcaaaattaatttctgatgttaaaactataaaaagaaaagttttatttacagagaggtgaagccttttctaatactacacaacacccagaaatcataaaataaagatttttacatggaaaaaatattaaagttaaaaccgaaaaaaggtgcaatccatatcacaagtaaagggtcttttttcataatgtattaagctctcctacaaatcaataagaaaaatgtaaacaactcagtggaaaatataggcaaagtcgatgaacagacagttcccagaaaaagaaatagcttttaatcacatgaaaaagtgttcaatcacatttataagaaatacaaattaacccacacatcatttttcacttacaaaattggtagagttaaaaaagtataagacattttcaaccgttgatgaattgtaaattggtaaaacttttatggagagaaatgtagcactactaatcaaaattacaaatgtgcaatctttgacctagtaatctcacctctaagaatttatcctttatatatcttgaacatgtgtaaagtgatgtacatataaggtatttgttgcataattgtccataaaagcaaaggtagaaacattctgaatgtctgtcattaggaaagtgctcagtggctatttttaaaataaggtagatatttgtgttcaaatatgaaaacatcttttatatggccaactggaaaaggcaaagtatatagcattctatgatttctattaataatgaagaggtactgagatgatggataaaggtaggtatatttttgcttgtatatgtttagaatatttctggaaggatagccaaaaggtagtaatagtggttgcttccttgaggtacacctgatgtcttgaaattatgggtgggaaagacataaactttctactgtaatatgtctttttacctttacaattttttatcatgaatgtgtattagctatgcaaaataaattgaatagaaaaaccaattccctgctcaaagcaaatccctcctgcttctctcctccccagtatttattgcatcttttgttatccttgcatgtttatatccccaacaaaaccaagagttctttgactgctacaactgtgtctccatcgtgtttgcatatccagcatttgcacattgccttaatcatgaaaagggttttttttttttttttaaagtgatgttttgaaggatgaagaagaccctttttttttgggtggaagtcaggctccctttaaatatggcctaatattgctgagcagggttgtgaggccctaaaaacgtcttcctaccattcctggaattctaccttgaaacatgtctctatcctttaagagaaagggaggagataaaaaggagagagagaagctgaagctgactcaaagatccgactggacctgaacagtgccccagggagaatccatttgaaaaaaaaaaaaaaatgtgatcatgtgaatggacaagaaggagatggctttagatcttatatgctctaaacgaagagttacgctgagagggaaactgacttgtcatgaagtcagctttgttccgttgctatgtgtcatccctgctaatggtgagtttacctagggcagaggctaccatctcaaccatgaagctgaagacacaggcatccgtattctatagctaattcagttgatttcatctcagcacacatacactgagcgcttcctaagagcgaggttgaccgacatttttattagcaataatctctgccttcttctgattacctagagatttaagaccacataatcatcctctacctcacagggtcaagggagtgggggaggaaatgggctaagaggttctaaatccctcctaacacttgcttcttccaaatcagcaagattagagcagtcaacagctgactgcgttcagaccctgcaggctgggctggcctgcccaggacctgagaaggggcagctccggtggcaatgtctgagcccctagctgtgctggtccgggctggcctctctaagacagtgcaggccacgtgatccatcctcctagaggcagtgagcaggtgagggacccctaccacagccaggaggaaaaagctaggcgtccactttccgcagccatgctcaaacagagtgagaggagacggtcctggagctacaggccctggaacacgacggagaatgagggcagccaacaccgcaggagcatttgctccctgggtgcccgttccggctcccaggccagcatccacggctggacagagggcaactataactactacatcgaggaagacgaagacggcgaggaggaggaccagtggaaggacgacctggcagaagaggaccagcaggcaggggaggtcaccaccgccaagcccgagggccccagcgaccctccggccctgctgtccacgctgaatgtgaacgtgggtggccacagctaccagctggactactgcgagctggccggcttccccaagacgcgcctaggtcgcctggccacctccaccagccgcagccgccagctaagcctgtgcgacgactacgaggagcagacagacgaatacttcttcgaccgcgacccggccgtcttccagctggtctacaatttctacctgtccggggtgctgctggtgctcgacgggctgtgtccgcgccgcttcctggaggagctgggctactggggcgtgcggctcaagtacacgccacgctgctgccgcatctgcttcgaggagcggcgcgacgagctgagcgaacggctcaagatccagcacgagctgcgcgcgcaggcgcaggtcgaggaggcggaggaactcttccgcgacatgcgcttctacggcccgcagcggcgccgcctctggaacctcatggagaagccattctcctcggtggccgccaaggccatc
